United States Patent Application Publication US 2018/0126003 A1 - sequence listing, part 5

SEQ ID NO: 4618 - DNA, 2031 bp, Artificial Sequence
  derived and/or modified sequence
atggcagcagcctcatcccctcctagagctgagcggaagcgatggggttggggaagattaccaggtgctcggcgaggatctgcagggcttgcaaagaagtgtccttttagtctggagctagccgaggggggaccagccggaggggccctctacgcaccaattgccccaggagcacctggccccgctccgccagcttcccctgccgcccctgccgctcctcctgtggcttccgacctcggcccgcggcctccagtgtcactcgacccgcgtgtgtctatttattcaacccgacgccctgttcttgctcgcacacacgtccaaggacgcgtctacaatttcctggagcgtccaacaggctggaaatgttttgtctatcactttgctgtgttcctgattgttctcgtatgccttatcttttccgttttatcgacaatagaacagtacgcggcccttgctacaggaaccctattctggatggaaattgtcctcgtggtgttttttggcacagagtatgtcgtgcggttatggagtgctgggtgtcgctctaagtatgtgggcctgtggggacggcttcgttttgcgagaaagccaatttcaatcattgacctgatagtggtcgtggctagtatggtcgtgctctgcgttgggtcaaagggacaggtgtttgcaacttcagcgatcagaggtattcgatttttgcaaatactccgcatgctgcacgtggatagacagggaggtacatggcgtctactgggttcagtcgtattcatccaccgacaggaattaataactaccttatatattggctttctcggactgatcttttcaagctacttcgtctacctcgccgaaaaggacgctgtgaatgaatctggaagggttgagttcggctcttacgccgatgctctgtggtggggggtggtcaccgtgacaacaattggctatggggataaggtacctcagacgtgggttggtaagaccattgcatcatgcttctctgtattcgctattagtttcttcgctctgcctgcaggcattcttgggagcggctttgcactgaaagtacagcaaaaacaacgccagaaacactttaataggcaaatcccagctgctgcctctctgatccagactgcttggagatgctacgctgctgaaaacccggatagttcaacttggaaaatctacatcaggaaagcgccaagatctcatacccttctgtctcctagtcccaaacccaaaaaatcagtggttgttaaaaaaaagaaatttaagctggataaagacaatggtgtcacacccggcgaaaagatgctgacagtgccccatatcacctgtgaccctcctgaagaacgccgattagaccatttctcagtagatggatatgactctagcgtccgaaaatctcctacattactggaggtgagtatgcctcacttcatgcggaccaacagttttgccgaggacctggatctcgaaggcgagacactgttaaccccaatcactcatatctctcagctccgcgagcaccaccgggctaccattaaagtaatacggaggatgcagtattttgtggcaaagaagaaatttcagcaagcacgcaagccctacgacgtaagagacgttatcgaacagtactcccaaggacacctcaatttgatggtgcgcatcaaagaactccaacgtcgacttgatcagtctataggaaagcctagcctgtttatctccgttagcgagaagagtaaggacagaggttctaacactattggagctagattaaacagagtcgaagataaggtgacccagcttgatcaacgcttggcactgattacagacatgctgcaccagctcttgagtttgcatggtggttcgacgcctggctctggtgggcccccccgtgagggaggcgcacacatcactcagccttgtggatctggaggtagcgtagatccagaactgttcctcccgagcaacacacttccaacttatgaacagctgaccgtgccacgccgcggccccgacgaaggttcatag

SEQ ID NO: 4619 - DNA, 2031 bp, Artificial Sequence
  derived and/or modified sequence
atggccgccgccagcagcccccccagagccgagagaaagagatggggctggggcagactgcccggcgccagaagaggcagcgccggcctggccaagaagtgccccttcagcctggagctggccgagggcggccccgccggcggcgccctgtacgcccccatcgcccccggcgcccccggccccgccccccccgccagccccgccgcccccgccgccccccccgtggccagcgacctgggccccagaccccccgtgagcctggaccccagagtgagcatctacagcaccagaagacccgtgctggccagaacccacgtgcagggcagagtgtacaacttcctggagagacccaccggctggaagtgcttcgtgtaccacttcgccgtgttcctgatcgtgctggtgtgcctgatcttcagcgtgctgagcaccatcgagcagtacgccgccctggccaccggcaccctgttctggatggagatcgtgctggtggtgttcttcggcaccgagtacgtggtgagactgtggagcgccggctgcagaagcaagtacgtgggcctgtggggcagactgagattcgccagaaagcccatcagcatcatcgacctgatcgtggtggtggccagcatggtggtgctgtgcgtgggcagcaagggccaggtgttcgccaccagcgccatcagaggcatcagattcctgcagatcctgagaatgctgcacgtggacagacagggcggcacctggagactgctgggcagcgtggtgttcatccacagacaggagctgatcaccaccctgtacatcggcttcctgggcctgatcttcagcagctacttcgtgtacctggccgagaaggacgccgtgaacgagagcggcagagtggagttcggcagctacgccgacgccctgtggtggggcgtggtgaccgtgaccaccatcggctacggcgacaaggtgccccagacctgggtgggcaagaccatcgccagctgcttcagcgtgttcgccatcagcttcttcgccctgcccgccggcatcctgggcagcggcttcgccctgaaggtgcagcagaagcagagacagaagcacttcaacagacagatccccgccgccgccagcctgatccagaccgcctggagatgctacgccgccgagaaccccgacagcagcacctggaagatctacatcagaaaggcccccagaagccacaccctgctgagccccagccccaagcccaagaagagcgtggtggtgaagaagaagaagttcaagctggacaaggacaacggcgtgacccccggcgagaagatgctgaccgtgccccacatcacctgcgacccccccgaggagagaagactggaccacttcagcgtggacggctacgacagcagcgtgagaaagagccccaccctgctggaggtgagcatgccccacttcatgagaaccaacagcttcgccgaggacctggacctggagggcgagaccctgctgacccccatcacccacatcagccagctgagagagcaccacagagccaccatcaaggtgatcagaagaatgcagtacttcgtggccaagaagaagttccagcaggccagaaagccctacgacgtgagagacgtgatcgagcagtacagccagggccacctgaacctgatggtgagaatcaaggagctgcagagaagactggaccagagcatcggcaagcccagcctgttcatcagcgtgagcgagaagagcaaggacagaggcagcaacaccatcggcgccagactgaacagagtggaggacaaggtgacccagctggaccagagactggccctgatcaccgacatgctgcaccagctgctgagcctgcacggcggcagcacccccggcagcggcggcccccccagagagggcggcgcccacatcacccagccctgcggcagcggcggcagcgtggaccccgagctgttcctgcccagcaacaccctgcccacctacgagcagctgaccgtgcccagaagaggccccgacgagggcagctag

SEQ ID NO: 4620 - protein, 372 aa, Artificial Sequence
  derived and/or modified sequence
MFKHLRKWVVTRFFGHSRQRARLVSKDGRCNIEFGNVEAQSRFIFFVDIWTTVLDLKWRYKMTIFITAFLGSWFFFGLLWYAVAYIHKDLPEFHPSANHTPCVENINGLTSAFLFSLETQVTIGYGFRCVTEQCATAIFLLIFQSILGVIINSFMCGAILAKISRPKKRAKTITFSKNAVISKRGGKLCLLIRVANLRKSLLIGSHIYGKLLKTTVTPEGETIILDQININFVVDAGNENLFFISPLTIYHVIDHNSPFFHMAAETLLQQDFELVVFLDGTVESTSATCQVRTSYVPEEVLWGYRFAPIVSKTKEGKYRVDFHNFSKTVEVETPHCAMCLYNEKDVRARMKRGYDNPNFILSEVNETDDTKM

SEQ ID NO: 4621 - protein, 391 aa, Artificial Sequence
  derived and/or modified sequence
MNASSRNVFDTLIRVLTESMFKHLRKWVVTRFFGHSRQRARLVSKDGRCNIEFGNVEAQSRFIFFVDIWTTVLDLKWRYKMTIFITAFLGSWFFFGLLWYAVAYIHKDLPEFHPSANHTPCVENINGLTSAFLFSLETQVTIGYGFRCVTEQCATAIFLLIFQSILGVIINSFMCGAILAKISRPKKRAKTITFSKNAVISKRGGKLCLLIRVANLRKSLLIGSHIYGKLLKTTVTPEGETIILDQININFVVDAGNENLFFISPLTIYHVIDHNSPFFHMAAETLLQQDFELVVFLDGTVESTSATCQVRTSYVPEEVLWGYRFAPIVSKTKEGKYRVDFHNFSKTVEVETPHCAMCLYNEKDVRARMKRGYDNPNFILSEVNETDDTKM

SEQ ID NO: 4622 - DNA, 1176 bp, Artificial Sequence
  derived and/or modified sequence
atgaatgcgagctctagaaatgtgttcgacactctgattcgtgttttaacagagagcatgtttaaacatctgagaaaatgggtagtcacccggttcttcggccattcacgccaacgagccagattagtctcgaaggacggacgctgcaacatagagtttggtaacgtggaggctcaatctcggtttatcttctttgtggatatttggaccacagtcttggacctaaaatggcggtacaaaatgaccattttcattacggcatttctgggctcctggtttttctttggattgctgtggtacgcagtcgcttacattcataaggacctacccgagttccatccttccgctaatcatacaccttgtgtagagaacattaatggccttaccagcgctttcctgttctctctcgagacacaggtgaccatcgggtacggatttcggtgtgtgactgagcagtgcgcgactgccatatttttgcttatttttcagagcattctgggcgtaataatcaattcattcatgtgcggtgctattcttgcaaagatcagccgcccgaagaaacgtgccaaaacaattaccttttccaaaaacgccgtcatcagcaagagaggtggaaagctatgtctgcttatccgcgtggccaacctgcgaaagtctctgctcatcggtagtcacatatatggcaaactcctcaaaaccacggtcacccccgaaggcgaaacgataatccttgaccaaattaatataaatttcgtggtagatgcgggaaatgaaaacttgttctttattagtcctctgaccatttaccacgtgatcgatcataattcacctttttttcacatggccgcagaaacactgctgcagcaggactttgagttggtggttttcctcgatgggactgtggagagtacctccgcaacatgccaggttagaacttcctatgtgcccgaggaggtactgtggggctaccgcttcgcccctatcgtgtcgaagactaaggagggcaagtatcgcgtcgactttcacaatttcagcaagacagtggaggtcgagaccccccactgtgccatgtgtctttacaacgagaaggatgtccgcgcccgcatgaaacggggctatgacaatcccaactttatcctgtctgaagttaacgaaactgacgatactaagatgtag

SEQ ID NO: 4623 - DNA, 1176 bp, Artificial Sequence
  derived and/or modified sequence
atgaatgccagcagcagaaatgtgtttgacaccctcatccgggtgctgacagagagcatgttcaagcacctgaggaagtgggtggtgacccgcttcttcggccacagccggcagagggcccggctggtgtccaaggatggccgctgcaacattgaatttggaaatgtggaggcccagagccgcttcatcttctttgtggacatctggaccaccgtgctggacctgaagtggagatacaagatgaccatcttcatcacagccttcctgggctcctggttcttcttcggcctgctgtggtatgctgtggcctacatccacaaggacctgcctgagttccaccccagcgccaaccacaccccctgtgtggagaacatcaatggcctgaccagcgccttcctgttcagcctggagacccaggtgaccatcggctacggcttccgctgtgtgacagagcagtgtgccacagccatcttcctgctgatcttccagagcatcctgggcgtcatcatcaacagcttcatgtgtggggccatcctggccaagatcagccggcccaagaagagggccaagaccatcaccttcagcaagaatgctgtgatcagcaagaggggcggcaagctgtgcctgctgatccgggtggccaacctgaggaagagcctgctgattggcagccacatctacggcaagctgctgaagaccaccgtgaccccagagggggagaccatcatcctggaccagatcaacatcaactttgtggtggatgctggaaatgaaaatctcttcttcatcagccccctgaccatctaccacgtgattgaccacaacagccccttcttccacatggctgctgagaccctgctgcagcaggactttgagctggtggtgttcctggatggcaccgtggagagcaccagcgccacctgccaggtgaggaccagctatgtgcctgaggaggtgctgtggggctacagatttgcccccatcgtgtccaagaccaaggagggcaagtacagagtggacttccacaacttcagcaagacagtggaggtggagaccccccactgtgccatgtgcctgtacaatgagaaggatgtgcgggccaggatgaagaggggctatgacaaccccaacttcatcctgtctgaggtgaatgaaacagatgacaccaagatgtag

SEQ ID NO: 4624 - DNA, 1176 bp, Artificial Sequence
  derived and/or modified sequence
atgaacgccagcagccggaacgtgttcgacaccctgatccgggtgctgaccgagtccatgtttaagcaccttcgcaaatgggtggtcaccagattttttgggcattcacgacagagggcaaggctggtctcaaaggacggccgctgtaatatcgaatttggcaacgtcgaagctcagtctcgattcattttctttgtggacatctggacaacggtgctcgatcttaaatggcggtacaaaatgacaatcttcatcactgcattcttaggcagctggttctttttcggtctgctgtggtatgccgtagcttacatacataaggacctgcctgagttccatcctagtgccaaccatacgccctgtgtcgagaacatcaatggcctcacgtcagcatttttattcagtctggagacccaggtaacaatcggatacggctttcgctgtgtcaccgagcagtgcgccaccgcgatctttttgctaatcttccaatcgatcctgggagttattataaattcattcatgtgtggcgccatcctggccaaaatttcacgtcctaagaaacgcgcaaaaacaatcacttttagtaagaatgcggtaatcagtaagcgcggggggaaactatgcctgctcatccgtgtggctaatttacgcaagtccttgctcatagggtcccatatttatgggaagctgctcaaaaccacggtcacaccagaaggggagacaatcatattagaccaaatcaatattaacttcgtggtcgacgctggcaacgagaatcttttcttcatctcacccctgactatttatcacgtgatcgatcataactccccgttctttcatatggcggccgagacattgctgcagcaggatttcgagcttgtggtatttttggacgggacggtggaatctacaagcgcaacctgccaggtgcggacctcatatgtgcctgaggaagtgctctggggctataggtttgcgcctatcgtgtctaagacgaaggagggcaaataccgcgtggatttccacaatttctctaagacagttgaggtggagaccccgcattgtgctatgtgcctgtacaacgaaaaagacgtgcgggcccgcatgaagagaggatacgacaacccaaatttcattctgtccgaggttaacgaaaccgacgatacgaagatgtag

SEQ ID NO: 4625 - DNA, 1674 bp, Artificial Sequence
  derived and/or modified sequence
acacaaattagcgtcagtccactgactgtcgcctacaataaattaggctgagtctaaaagaaatcagtctgcatagaaagaccaacaaccagcaccacttccttgctttttccagccatgaatgcttccagtcggaatgtgtttgacacgttgatcagggtgttgacagaaagtatgttcaaacatcttcggaaatgggtcgtcactcgcttttttgggcattctcggcaaagagcaaggctagtctccaaagatggaaggtgcaacatagaatttggcaatgtggaggcacagtcaaggtttatattctttgtggacatctggacaacggtacttgacctcaagtggagatacaaaatgaccattttcatcacagccttcttggggagttggtttttctttggtctcctgtggtatgcagtagcgtacattcacaaagacctcccggaattccatccttctgccaatcacactccctgtgtggagaatattaatggcttgacctcagcttttctgttttctctggagactcaagtgaccattggatatggattcaggtgtgtgacagaacagtgtgccactgccatttttctgcttatctttcagtctatacttggagttataatcaattctttcatgtgtggggccatcttagccaagatctccaggcccaaaaaacgtgccaagaccattacgttcagcaagaacgcagtgatcagcaaacggggagggaagctttgcctcctaatccgagtggctaatctcaggaagagccttcttattggcagtcacatttatggaaagcttctgaagaccacagtcactcctgaaggagagaccattattttggaccagatcaatatcaactttgtagttgacgctgggaatgaaaatttattcttcatctccccattgacaatttaccatgtcattgatcacaacagccctttcttccacatggcagcggagacccttctccagcaggactttgaattagtggtgtttttagatggcacagtggagtccaccagtgctacctgccaagtccggacatcctatgtcccagaggaggtgctttggggctaccgttttgctcccatagtatccaagacaaaggaagggaaataccgagtggatttccataactttagcaagacagtggaagtggagacccctcactgtgccatgtgcctttataatgagaaagatgttagagccaggatgaagagaggctatgacaaccccaacttcatcttgtcagaagtcaatgaaacagatgacaccaaaatgtaacagtggcttttcaacgggagtaaagcaaagtctctaaagctcctagtacctagaagcattatgaagcagtcaacaatttaggggtacgaaagtaggatgagagccttcaaagtctaccagcacaaagacccctgagccccgcaattgtgatcccacaagacatgcatctccacaaggctactgtattagaacgtgcaatgcatttatatgaaactggtgtatggaagacataggtgctctcttgaaatcttaaatatgattatttgagctcatataaggtggattggagcagataaaattatcaaaagtttcatgaacaggccaaacaaaatattttttaaagtttccttaaagaagttatgaactttagaaaggatcagg

SEQ ID NO: 4626 - DNA, 1176 bp, Artificial Sequence
  derived and/or modified sequence
atgaatgcctcttcccgcaacgtgttcgataccctgattagggtgctcaccgagtcaatgtttaagcatctccgcaaatgggtggttaccagattcttcggacattccaggcagcgggcaagacttgtctcgaaggacggtcggtgtaatatcgagtttgggaacgtggaagcccagagccggtttattttcttcgtggatatctggaccacggtcctggaccttaaatggcgatataagatgacaatttttatcaccgcctttcttggctcctggttcttctttggcctcctgtggtacgccgtcgcatatattcacaaagatctccctgaatttcacccaagcgctaatcacactccctgcgtcgagaatatcaatggtctcacgtctgcctttcttttctctctcgagactcaggttaccattggttatggctttcggtgtgttacagaacaatgtgccaccgcgatcttcttattaatctttcaatctattctcggagtgatcattaactcctttatgtgcggcgctatactggcgaagatctccaggcctaagaagcgcgcaaaaacaattaccttcagcaaaaacgccgtgatctcgaaacgcggaggtaaactctgcctgttaatccgcgtcgccaacttgaggaagtcccttctgatcggatctcacatctatggaaagttactgaaaaccaccgtgacaccggagggggagaccattatactggaccagatcaatattaactttgtagtcgacgccggaaatgagaacttattctttatttcccccctgacgatataccacgtgatagatcacaactcacctttcttccacatggcggctgagacgctgcttcagcaggatttcgagttggtggtttttctagatggtactgtcgagtctacatccgctacctgtcaggtgcgaacttcatatgtgcctgaggaggtgctgtggggttataggtttgccccaatcgtctcaaagaccaaggagggcaaatatagggttgactttcataacttcagtaagacggtggaagtcgagactccgcactgtgctatgtgcctgtataacgaaaaggacgtgcgggctagaatgaaacggggttacgataatcccaattttatcctcagtgaggtcaacgaaactgacgatactaaaatgtag

SEQ ID NO: 4627 - DNA, 1176 bp, Artificial Sequence
  derived and/or modified sequence
atgaacgccagcagcagaaacgtgttcgacaccctgatcagagtgctgaccgagagcatgttcaagcacctgagaaagtgggtggtgaccagattcttcggccacagcagacagagagccagactggtgagcaaggacggcagatgcaacatcgagttcggcaacgtggaggcccagagcagattcatcttcttcgtggacatctggaccaccgtgctggacctgaagtggagatacaagatgaccatcttcatcaccgccttcctgggcagctggttcttcttcggcctgctgtggtacgccgtggcctacatccacaaggacctgcccgagttccaccccagcgccaaccacaccccctgcgtggagaacatcaacggcctgaccagcgccttcctgttcagcctggagacccaggtgaccatcggctacggcttcagatgcgtgaccgagcagtgcgccaccgccatcttcctgctgatcttccagagcatcctgggcgtgatcatcaacagcttcatgtgcggcgccatcctggccaagatcagcagacccaagaagagagccaagaccatcaccttcagcaagaacgccgtgatcagcaagagaggcggcaagctgtgcctgctgatcagagtggccaacctgagaaagagcctgctgatcggcagccacatctacggcaagctgctgaagaccaccgtgacccccgagggcgagaccatcatcctggaccagatcaacatcaacttcgtggtggacgccggcaacgagaacctgttcttcatcagccccctgaccatctaccacgtgatcgaccacaacagccccttcttccacatggccgccgagaccctgctgcagcaggacttcgagctggtggtgttcctggacggcaccgtggagagcaccagcgccacctgccaggtgagaaccagctacgtgcccgaggaggtgctgtggggctacagattcgcccccatcgtgagcaagaccaaggagggcaagtacagagtggacttccacaacttcagcaagaccgtggaggtggagaccccccactgcgccatgtgcctgtacaacgagaaggacgtgagagccagaatgaagagaggctacgacaaccccaacttcatcctgagcgaggtgaacgagaccgacgacaccaagatgtag

SEQ ID NO: 4628 - protein, 298 aa, Artificial Sequence
  derived and/or modified sequence
MEEKQILCVGLVVLDVISLVDKYPKEDSEIRCLSQRWQRGGNASNSCTVLSLLGAPCAFMGSMAPGHVADFVLDDLRRYSVDLRYTVFQTTGSVPIATVIINEASGSRTILYYDRSLPDVSATDFEKVDLTQFKWIHIEGRNASEQVKMLQRIDAHNTRQPPEQKIRVSVEVEKPREELFQLFGYGDVVFVSKDVAKHLGFQSAEEALRGLYGRVRKGAVLVCAWAEEGADALGPDGKLLHSDAFPPPRVVDTLGAGDTFNASVIFSLSQGRSVQEALRFGCQVAGKKCGLQGFDGIV

SEQ ID NO: 4629 - DNA, 897 bp, Artificial Sequence
  derived and/or modified sequence
atggaggaaaaacagatcttgtgtgtcggcttggtggtgctggacgtgatcagcttagtggacaaataccccaaggaagactcagaaattcggtgcctctcacagcgatggcaacgtgggggcaacgcttcgaatagctgcaccgtgctgtctctcctgggcgccccctgcgctttcatgggtagcatggcacctggtcacgtggccgattttgtcctggatgacttgcggcgatacagcgtagacctaagatacactgtattccaaactacagggagcgttccaatcgccactgtcatcatcaacgaagcatccggctcaagaaccattctctactatgaccgttcgctccccgacgtttcggccacagatttcgaaaaggtggatttgacccagtttaagtggattcacatcgaggggcgcaatgcgtcagagcaggtgaagatgctgcagagaatagacgcacacaatacgagacaacccccagagcagaaaatccgagtgtcagtggaagtggagaaacctagggaggaactgtttcagctgttcgggtacggtgacgtcgtgtttgtgagcaaagacgtagcaaaacatctgggcttccaaagcgctgaagaggccctgcgagggctgtatggccgtgtacgtaaaggtgctgtgctcgtatgtgcttgggcagaggagggtgccgacgcccttggacctgacggcaagctcctacattcggatgcgttcccgccacctagagtggttgatacgttaggtgccggagatacgttcaatgcctccgtcatattttctttatctcaaggcaggtccgttcaggaagcactcagattcggttgtcaagttgccggaaagaagtgcggcctgcagggcttcgatggcattgtttag

SEQ ID NO: 4630 - DNA, 2411 bp, Artificial Sequence
  derived and/or modified sequence
cggggccgccgcgaccgcgggcttcaggcagggctgcagatgcgaggcccagctgtacctcgcgtgtcccgggtcgggagtcggagacgcaggtgcaggagagtgcggggcaagtagcgcattttctctttgcattctcgagatcgcttagccgcgctttaaaaaggtttgcatcagctgtgagtccatctgacaagcgaggaaactaaggctgagaagtgggaggcgttgccatctgcaggcccaggcaacctgctacgggaagaccggggaccaagacctctgggttggctttcctagacccgctcgggtcttcgggtgtcgcgaggaagggccctgctcctttcgttccctgcacccctggccgctgcaggtggctccctggaggaggagctcccacgcggaggaggagccagggcagctgggagcggggacaccatcctcctggataagaggcagaggccgggaggaaccccgtcagccgggcgggcaggaagctctgggagtagcctcatggaagagaagcagatcctgtgcgtggggctagtggtgctggacgtcatcagcctggtggacaagtaccctaaggaggactcggagataaggtgtttgtcccagagatggcagcgcggaggcaacgcgtccaactcctgcaccgttctctccctgctcggagccccctgtgccttcatgggctcaatggctcctggccatgttgctgattttgtcctggatgacctccgccgctattctgtggacctacgctacacagtctttcagaccacaggctccgtccccatcgccacggtcatcatcaacgaggccagtggtagccgcaccatcctatactatgacaggagcctgccagatgtgtctgctacagactttgagaaggttgatctgacccagttcaagtggatccacattgagggccggaacgcatcggagcaggtgaagatgctgcagcggatagacgcacacaacaccaggcagcctccagagcagaagatccgggtgtccgtggaggtggagaagccacgagaggagctcttccagctgtttggctacggagacgtggtgtttgtcagcaaagatgtggccaagcacttggggttccagtcagcagaggaagccttgaggggcttgtatggtcgtgtgaggaaaggggctgtgcttgtctgtgcctgggctgaggagggcgccgacgccctgggccctgatggcaaattgctccactcggatgctttcccgccaccccgcgtggtggatacactgggagctggagacaccttcaatgcctccgtcatcttcagcctctcccaggggaggagcgtgcaggaagcactgagattcgggtgccaggtggccggcaagaagtgtggcctgcagggctttgatggcatcgtgtgagagcaggtgccggctcctcacacaccatggagactaccattgcggctgcatcgccttctcccctccatccagcctggcgtccaggttgccctgttcaggggacagatgcaagctgtggggaggactctgcctgtgtcctgtgttccccacagggagaggctctggggggatggctgggggatgcagagcctcagagcaaataaatcttcctcagagccagcttctcctctcaatgtctgaactgctctggctgggcattcctgaggctctgactcttcgatcctccctctttgtgtccattccccaaattaacctctccgcccaggcccagaggaggggctgcctgggctagagcagcgagaagtgccctgggcttgccaccagctctgccctggctggggaggacactcggtgccccacacccagtgaacctgccaaagaaaccgtgagagctcttcggggccctgcgttgtgcagactctattcccacagctcagaagctgggagtccacaccgctgagctgaactgacaggccagtggggggcaggggtgcgcctcctctgccctgcccaccagcctgtgatttgatggggtcttcattgtccagaaatacctcctcccgctgactgccccagagcctgaaagtctcacccttggagcccaccttggaattaagggcgtgcctcagccacaaatgtgacccaggatacagagtgttgctgtcctcagggaggtccgatctggaacacatattggaattggggccaactccaatatagggtgggtaaggccttataatgtaaagagcatataatgtaaagggctttagagtgagacagacctggattaaaatctgccatttaattagctgcatatcaccttagggtacagcacttaacgcaatctgcctcaatttcttcatctgtcaaatggaaccaattctgcttggctacagaattattgtgaggataaaatcatatataaaatgcccagcatgatg

SEQ ID NO: 4631 - DNA, 897 bp, Artificial Sequence
  derived and/or modified sequence
atggaggagaagcagatcctgtgtgtgggcctggtggtgctggatgtgatcagcctggtggacaagtaccccaaggaggacagcgagatccgctgcctgagccagcgctggcagaggggcggcaatgccagcaacagctgcaccgtgctgagcctgctgggcgccccctgtgccttcatgggctccatggcccctggccacgtggccgactttgtgctggatgacctgcggcgctacagcgtggacctgcgctacaccgtcttccagaccactggatctgtgcccatcgccaccgtcatcatcaatgaggccagcggcagcaggaccatcctgtactatgacaggagcctgcctgatgtgtctgccacagactttgagaaggtggacctgacccagttcaagtggatccacatcgagggcagaaatgccagcgagcaggtgaagatgctgcagagaattgatgcccacaacacccggcagcccccagagcagaagatccgggtgtctgtggaggtggagaagccccgggaggagctgttccagctgtttggctatggagatgtggtgtttgtgtccaaggatgtggccaagcacctgggcttccagagcgctgaggaggccctgcggggcctgtatggccgggtgaggaaaggagctgtgctggtgtgtgcctgggccgaggagggcgcagatgccctgggcccagatggcaagctgctgcacagtgatgccttccccccaccccgggtggtggacaccctgggcgctggggacaccttcaatgccagcgtcatcttcagcctgagccagggccgctctgtgcaggaggccctgcgcttcggctgccaggtggccggcaagaagtgtggcctgcagggctttgatggcatcgtgtag

SEQ ID NO: 4632 - DNA, 897 bp, Artificial Sequence
  derived and/or modified sequence
atggaggagaagcagatcctgtgcgtgggcctggtggtgctggacgtgatttcactagtggacaagtacccgaaggaagattctgaaatccgctgcctgagtcagcggtggcagcgggggggtaacgccagcaactcgtgtaccgtattatctttactcggcgcgccatgcgcctttatgggtagcatggctcccggccacgttgcagatttcgtgctcgatgacctgaggcggtactccgtggacctgagatatacagtgtttcaaaccacaggaagtgtgccgatagccaccgtaatcataaatgaggccagcgggtctcggacaatactgtactatgaccgaagtctgccagatgtatctgcaaccgattttgaaaaggtggatctgacacagttcaagtggatccacatcgagggacggaatgcctccgaacaggtgaaaatgctgcagcgcattgacgcccacaacacgaggcaaccacccgagcagaaaatacgcgtgagcgtggaagtagagaagcctcgggaggagctgttccagcttttcggctacggtgacgtggtgtttgtctccaaggatgtcgctaagcacctcggtttccaaagtgcggaggaggcgctaagaggcctctatggtagggttcgcaagggcgctgtgcttgtttgcgcatgggccgaagagggggccgatgctcttggcccagatggcaagctcctgcactccgatgcatttccccctccacgtgtggttgacaccctgggggctggcgatacattcaacgcatccgtcattttcagcctctcacaggggaggtctgtgcaggaagcccttcgtttcggttgtcaggtagccggtaaaaagtgcgggctgcagggattcgacggtatagtgtag

SEQ ID NO: 4633 - DNA, 897 bp, Artificial Sequence
  derived and/or modified sequence
atggaggagaaacagattttatgcgttggactggtggtgctggacgtgatcagcttggttgataagtaccctaaagaggatagcgaaatccgatgtctgtcccagaggtggcaacggggaggaaacgcatcgaacagctgcaccgtcctgtcactcttgggcgctccttgtgcttttatgggcagcatggctcccggacacgtggccgacttcgtcttagacgacctgcgcaggtacagtgtggaccttaggtatacggtgttccagacaaccggctctgttcctatcgctactgtgattataaacgaggctagcgggtcccgcaccattctgtattacgacaggtcattgccagatgtttccgctacagactttgagaaagtggacctcactcaattcaaatggatccatatcgagggtaggaatgcttccgaacaggtcaagatgttacaaaggatcgatgcccataacaccaggcagccgccagaacagaaaatcagagtgagtgtggaggtggaaaaaccccgagaggagctatttcaattatttggatacggagatgtggttttcgtatctaaggatgtcgccaaacacttgggcttccagagtgcagaggaggctctcaggggcctgtacgggagggttagaaaaggggctgtcctcgtctgcgcctgggccgaggaaggagcggacgcactgggtcccgatggcaaacttttgcattcggacgcttttccacctccgagagtagtcgacactctgggagccggagacacctttaacgcatcagttattttttctctctcccagggccgttcagtgcaggaggcacttcgatttgggtgtcaagtggccggaaaaaagtgtggcttgcagggtttcgacggcatcgtctag

SEQ ID NO: 4634 - DNA, 897 bp, Artificial Sequence
  derived and/or modified sequence
atggaggagaagcagatcctgtgcgtgggcctggtggtgctggacgtgatcagcctggtggacaagtaccccaaggaggacagcgagatcagatgcctgagccagagatggcagagaggcggcaacgccagcaacagctgcaccgtgctgagcctgctgggcgccccctgcgccttcatgggcagcatggcccccggccacgtggccgacttcgtgctggacgacctgagaagatacagcgtggacctgagatacaccgtgttccagaccaccggcagcgtgcccatcgccaccgtgatcatcaacgaggccagcggcagcagaaccatcctgtactacgacagaagcctgcccgacgtgagcgccaccgacttcgagaaggtggacctgacccagttcaagtggatccacatcgagggcagaaacgccagcgagcaggtgaagatgctgcagagaatcgacgcccacaacaccagacagccccccgagcagaagatcagagtgagcgtggaggtggagaagcccagagaggagctgttccagctgttcggctacggcgacgtggtgttcgtgagcaaggacgtggccaagcacctgggcttccagagcgccgaggaggccctgagaggcctgtacggcagagtgagaaagggcgccgtgctggtgtgcgcctgggccgaggagggcgccgacgccctgggccccgacggcaagctgctgcacagcgacgccttccccccccccagagtggtggacaccctgggcgccggcgacaccttcaacgccagcgtgatcttcagcctgagccagggcagaagcgtgcaggaggccctgagattcggctgccaggtggccggcaagaagtgcggcctgcagggcttcgacggcatcgtgtag

SEQ ID NO: 4635 - protein, 976 aa, Artificial Sequence [sequence omitted]

SEQ ID NO: 4636 - DNA, 2931 bp, Artificial Sequence
  derived and/or modified sequence
atgagaggcgccagaggcgcctgggacttcctgtgcgtgctgctgctgctgctgagagtgcagaccggcagcagccagcccagcgtgagccccggcgagcccagcccccccagcatccaccccggcaagagcgacctgatcgtgagagtgggcgacgagatcagactgctgtgcaccgaccccggcttcgtgaagtggaccttcgagatcctggacgagaccaacgagaacaagcagaacgagtggatcaccgagaaggccgaggccaccaacaccggcaagtacacctgcaccaacaagcacggcctgagcaacagcatctacgtgttcgtgagagaccccgccaagctgttcctggtggacagaagcctgtacggcaaggaggacaacgacaccctggtgagatgccccctgaccgaccccgaggtgaccaactacagcctgaagggctgccagggcaagcccctgcccaaggacctgagattcatccccgaccccaaggccggcatcatgatcaagagcgtgaagagagcctaccacagactgtgcctgcactgcagcgtggaccaggagggcaagagcgtgctgagcgagaagttcatcctgaaggtgagacccgccttcaaggccgtgcccgtggtgagcgtgagcaaggccagctacctgctgagagagggcgaggagttcaccgtgacctgcaccatcaaggacgtgagcagcagcgtgtacagcacctggaagagagagaacagccagaccaagctgcaggagaagtacaacagctggcaccacggcgacttcaactacgagagacaggccaccctgaccatcagcagcgccagagtgaacgacagcggcgtgttcatgtgctacgccaacaacaccttcggcagcgccaacgtgaccaccaccctggaggtggtggacaagggcttcatcaacatcttccccatgatcaacaccaccgtgttcgtgaacgacggcgagaacgtggacctgatcgtggagtacgaggccttccccaagcccgagcaccagcagtggatctacatgaacagaaccttcaccgacaagtgggaggactaccccaagagcgagaacgagagcaacatcagatacgtgagcgagctgcacctgaccagactgaagggcaccgagggcggcacctacaccttcctggtgagcaacagcgacgtgaacgccgccatcgccttcaacgtgtacgtgaacaccaagcccgagatcctgacctacgacagactggtgaacggcatgctgcagtgcgtggccgccggcttccccgagcccaccatcgactggtacttctgccccggcaccgagcagagatgcagcgccagcgtgctgcccgtggacgtgcagaccctgaacagcagcggcccccccttcggcaagctggtggtgcagagcagcatcgacagcagcgccttcaagcacaacggcaccgtggagtgcaaggcctacaacgacgtgggcaagaccagcgcctacttcaacttcgccttcaagggcaacaacaaggagcagatccacccccacaccctgttcacccccctgctgatcggcttcgtgatcgtggccggcatgatgtgcatcatcgtgatgatcctgacctacaagtacctgcagaagcccatgtacgaggtgcagtggaaggtggtggaggagatcaacggcaacaactacgtgtacatcgaccccacccagctgccctacgaccacaagtgggagttccccagaaacagactgagcttcggcaagaccctgggcgccggcgccttcggcaaggtggtggaggccaccgcctacggcctgatcaagagcgacgccgccatgaccgtggccgtgaagatgctgaagcccagcgcccacctgaccgagagagaggccctgatgagcgagctgaaggtgctgagctacctgggcaaccacatgaacatcgtgaacctgctgggcgcctgcaccatcggcggccccaccctggtgatcaccgagtactgctgctacggcgacctgctgaacttcctgagaagaaagagagacagcttcatctgcagcaagcaggaggaccacgccgaggccgccctgtacaagaacctgctgcacagcaaggagagcagctgcagcgacagcaccaacgagtacatggacatgaagcccggcgtgagctacgtggtgcccaccaaggccgacaagagaagaagcgtgagaatcggcagctacatcgagagagacgtgacccccgccatcatggaggacgacgagctggccctggacctggaggacctgctgagcttcagctaccaggtggccaagggcatggccttcctggccagcaagaactgcatccacagagacctggccgccagaaacatcctgctgacccacggcagaatcaccaagatctgcgacttcggcctggccagagacatcaagaacgacagcaactacgtggtgaagggcaacgccagactgcccgtgaagtggatggcccccgagagcatcttcaactgcgtgtacaccttcgagagcgacgtgtggagctacggcatcttcctgtgggagctgttcagcctgggcagcagcccctaccccggcatgcccgtggacagcaagttctacaagatgatcaaggagggcttcagaatgctgagccccgagcacgcccccgccgagatgtacgacatcatgaagacctgctgggacgccgaccccctgaagagacccaccttcaagcagatcgtgcagctgatcgagaagcagatcagcgagagcaccaaccacatctacagcaacctggccaactgcagccccaacagacagaagcccgtggtggaccacagcgtgagaatcaacagcgtgggcagcaccgccagcagcagccagcccctgctggtgcacgacgacgtgtag

SEQ ID NO: 4637 - DNA, 2931 bp, Artificial Sequence
  derived and/or modified sequence
atgaggggtgcccggggcgcctgggacttcctgtgcgttctgttattgttactgcgcgtgcaaaccggatccagtcaaccgtctgtgtcccctggggagccctcacctcctagtatccacccaggtaaaagcgatcttatcgtccgcgtcggcgacgagatcaggctcttgtgtactgatcctggcttcgtcaagtggacctttgaaatactggatgagacgaacgaaaataagcagaacgagtggattacagaaaaggccgaggccacaaataccggtaagtatacatgtactaacaaacatgggctgtccaactctatctacgttttcgttcgcgatcccgcaaaactgttcctggtcgatcgatctctctacgggaaagaggataacgatactcttgtgagatgtccactgacagatcctgaggtgactaactactccctgaagggatgtcaggggaagccgctgccaaaagatttaaggttcatccccgaccccaaggctggcatcatgatcaaaagtgtgaagcgggcataccatagattgtgcctacactgctctgttgaccaggagggcaagtccgtcctaagcgagaagttcattctgaaggtgcgaccggctttcaaggcagtccccgtcgtatccgtttccaaagccagctaccttctgcgcgagggagaagaatttacagtgacatgcaccatcaaggacgtgagttcttccgtttacagtacttggaaacgcgaaaattcgcagaccaagctgcaagaaaagtacaactcttggcatcacggggacttcaactatgagcgacaggccacattgaccatttcaagcgcccgtgttaacgactccggggtattcatgtgctatgcaaacaatacatttggatcggccaatgtgaccactaccctcgaagtggttgataaaggcttcattaatatctttccaatgataaatacaacagtgttcgttaatgacggcgagaatgtggacctgatcgtggagtacgaggctttccccaaacctgagcatcaacagtggatttatatgaatcgtaccttcaccgataagtgggaggactatcctaagagtgaaaacgagtctaatattaggtacgtgagcgagttgcacctgacccgtttgaagggtacagaaggagggacttatactttcctcgtctctaatagcgacgtcaacgcagccattgccttcaacgtgtatgtaaatacaaaacccgagattctgacctacgaccggttggtgaatggaatgcttcagtgtgttgcggctggcttccccgaaccaactatcgattggtacttttgccccggcacagagcagagatgctccgctagcgttttgccagttgatgtgcagacgctgaattctagtggtcctcccttcggaaagctggttgtgcaatctagtattgatagctccgctttcaaacataacggcacagttgaatgtaaggcgtataatgacgtaggaaaaacaagcgcttatttcaatttcgccttcaaaggcaacaacaaagaacagatacacccgcacaccctgttcaccccactgctcattgggtttgttatcgtcgccggaatgatgtgcattatcgtaatgatattgacatacaaatacctccagaagcctatgtatgaggtgcaatggaaagtggtggaagagattaacggtaataattatgtatatattgaccccacacaactgccctacgatcacaagtgggagttccctcggaatagactttctttcgggaagaccctcggtgccggtgcctttggcaaggtggttgaggccaccgcttatgggttaattaaaagtgacgccgccatgaccgtggctgttaaaatgcttaaaccgtcagcccatctgacggagcgcgaggccctaatgtcagaactgaaggtgctgagttacttggggaaccacatgaacattgttaaccttctgggcgcatgcacaattggcggtcctacgcttgtcatcaccgagtactgttgctatggagacttgctcaactttttacggagaaagagagatagcttcatctgctccaagcaagaggatcacgctgaagctgccttgtacaaaaacctcttacactcgaaagagtcctcatgctcagactctactaatgagtatatggacatgaaacccggagtgtcctatgtggtgcccacaaaggctgacaaacgacgtagtgtccgtatcggatcttatatagaacgggacgtcacccctgccataatggaggacgacgaattggccctggatctggaagatcttctgtcattttcctatcaggtggcaaaaggtatggctttcctcgcaagcaaaaactgcatccatcgagacctggcggctcggaacatcttactgactcacggccggatcactaagatatgcgactttggcctggcacgagacataaaaaacgattctaactatgtagtgaaaggaaatgctcgcctgccagtgaagtggatggcgcccgaatcaatctttaactgtgtttacacatttgagagcgatgtgtggtcttacgggatattcctctgggagttgttctcactggggagctcgccatatccaggaatgcctgtggactcaaaattctataaaatgattaaagagggttttcgcatgctgtcccccgagcatgcgcctgcagagatgtacgacatcatgaagacttgctgggatgccgaccccctaaaaagacccacattcaaacaaatagttcagctcatagaaaagcagatttccgaaagcacaaaccatatttactctaacttagcgaattgttccccaaaccgtcagaaacccgttgtcgatcacagtgttcgcatcaactcagtggggtctaccgcctcgtcctctcagcccctgctggtgcatgacgacgtttag

SEQ ID NO: 4638 - DNA, 2931 bp, Artificial Sequence
  derived and/or modified sequence
atgagaggagcccggggggcctgggacttcctgtgtgtgctgctgctgctgctgcgggtgcagacaggcagcagccagcccagcgtgtccccaggagagcccagcccccccagcatccaccctgggaagagtgacctgattgtgcgggtgggagatgagatccggctgctgtgcacagatcctggctttgtgaagtggacctttgagatcctggatgagaccaatgaaaacaagcagaatgagtggatcacagagaaggccgaggccaccaacacaggcaagtacacctgcaccaacaagcacggcctgagcaacagcatctacgtgtttgtgcgggaccctgccaagctgttcctggtggacaggagcctgtatggcaaggaggacaatgacaccctggtgcgctgccccctgacagatcctgaggtgaccaactacagcctgaagggctgccagggcaagcccctgcccaaggacctgcgcttcatcccagaccccaaggccggcatcatgatcaagtctgtgaagagggcctaccaccggctgtgcctgcactgcagcgtggaccaggagggcaagtctgtgctgtctgagaagttcatcctgaaggtgcggcctgccttcaaggctgtgcctgtggtgtctgtgtccaaggccagctacctgctgcgggagggggaggagttcaccgtgacctgcaccatcaaggatgtgagcagctctgtgtacagcacctggaagcgggagaacagccagaccaagctgcaggagaagtacaacagctggcaccacggggacttcaactatgagcggcaggccaccctgaccatcagcagcgcccgggtgaatgattctggagtcttcatgtgctacgccaacaacaccttcggcagcgccaacgtgaccaccaccctggaggtggtggacaagggcttcatcaacatcttccccatgatcaacaccaccgtgtttgtgaatgatggagaaaatgtggacctgattgtggagtatgaggccttccccaagccagagcaccagcagtggatctacatgaacagaaccttcacagacaagtgggaggactaccccaagtcagaaaatgaaagcaacatccgctacgtgtctgagctgcacctgacccggctgaagggcacagaaggaggcacctacaccttcctggtgagcaacagtgatgtgaatgctgccatcgccttcaacgtgtatgtgaacaccaagccagagatcctgacctatgaccggctggtgaatggcatgctgcagtgtgtggccgccggcttccctgagcccaccatcgactggtacttctgccccggcacagagcagcgctgcagcgcctctgtgctgcctgtggatgtgcagaccctgaacagcagcggccccccatttgggaagctggtggtgcagagcagcattgacagcagcgccttcaagcacaacggcaccgtggagtgcaaggcctacaatgatgtgggcaagaccagcgcctacttcaactttgccttcaagggcaacaacaaggagcagatccacccccacaccctcttcacccccctgctgattggatttgtgattgtggccggcatgatgtgcatcatcgtgatgatcctgacctacaagtacctgcagaagcccatgtatgaggtgcagtggaaggtggtggaggagatcaatggaaacaactacgtgtacatcgaccccacccagctgccctatgaccacaagtgggagttccccaggaaccggctgagctttgggaagaccctgggcgctggggccttcggcaaggtggtggaggccacagcctacggcctcatcaagagtgatgctgccatgacagtggccgtgaagatgctgaagcccagcgcccacctgacagagcgggaggccctgatgtctgagctgaaggtgctgagctacctgggcaaccacatgaacatcgtgaacctgctgggcgcctgcaccatcggcggccccaccctggtgatcacagagtactgctgctatggagacctgctgaacttcctgcggaggaagagggacagcttcatctgcagcaagcaggaggaccacgccgaggccgccctgtacaagaacctgctgcacagcaaggagagcagctgcagcgacagcaccaatgagtacatggacatgaagccaggagtgtcctatgtggtgcccaccaaggctgacaagagaagatctgtgcgcatcggcagctacatcgagagagatgtgaccccagccatcatggaggatgatgagctggccctggacctggaggacctgctgtccttctcctaccaggtggccaagggcatggccttcctggccagcaagaactgcatccaccgggacctggccgccaggaacatcctgctgacccacggccgcatcaccaagatctgtgactttggcctggcccgggacatcaagaatgacagcaactacgtggtgaagggaaatgcccggctgcctgtgaagtggatggcccctgagagcatcttcaactgtgtgtacacctttgaaagtgatgtgtggagctatggcatcttcctgtgggagctgttcagcctgggcagcagcccctacccaggcatgcctgtggacagcaagttctacaagatgatcaaggagggcttcaggatgctgagccctgagcacgccccagctgagatgtatgacatcatgaagacctgctgggatgctgaccccctgaagaggcccaccttcaagcagatcgtgcagctgattgagaagcagatcagcgagagcaccaaccacatctacagcaacctggccaactgcagccccaaccggcagaagcctgtggtggaccacagcgtgcgcatcaacagcgtgggcagcacagccagcagcagccagcccctgctggtgcatgatgatgtgtag

SEQ ID NO: 4639 - DNA, 2931 bp, Artificial Sequence
  derived and/or modified sequence
atgcggggcgcccggggcgcctgggacttcctgtgcgtgctgctgctgcttctgagggtgcaaactggatcatctcagccaagcgtgagtccaggcgagccctcgccacccagcatccatcccggtaagtccgatctcattgtaagggtgggggacgagatcaggctattatgcaccgacccaggctttgtgaagtggacgttcgaaatcctggatgagactaacgaaaataaacaaaatgagtggatcaccgagaaggccgaggccaccaatactggaaaatacacttgtaccaataaacacggactgtccaattccatctacgtattcgttcgggaccctgcaaagctgtttctggtcgaccgaagcctgtacggtaaggaggacaatgacaccctggtgcgctgtccactcaccgacccagaagttacgaactacagcctcaaggggtgtcagggcaagcccctcccaaaagacctgcgatttatcccagatccgaaggccggcattatgataaaaagtgtaaaacgggcctatcatcgcttatgcctgcactgctccgtcgatcaagaaggtaaaagtgttctgtccgaaaagttcattctgaaagtgcgacccgcgtttaaggccgtccccgtcgtgtctgttagtaaagcaagctacttactccgagagggcgaagagttcacggttacctgcacaatcaaggacgtcagctcttcggtatatagcacctggaagcgcgagaactctcaaaccaagctgcaggaaaagtacaattcctggcaccacggcgattttaactacgaaagacaagccaccctcaccatctcttctgcaagagtgaacgattcgggagtgtttatgtgctatgctaataatacgttcgggagcgcgaacgtaaccacgacgttggaggtagtcgataagggattcattaatatatttccgatgattaataccacagtgtttgtgaatgacggtgagaacgtggatctgattgtggaatatgaggcctttcccaagccggagcaccagcagtggatatatatgaatagaacctttactgacaaatgggaagattatcctaaatcggagaatgagagtaacatcaggtatgtatccgagttgcatctcacgaggctcaagggcaccgagggcggtacttacacgtttcttgtctccaactctgatgtgaatgccgccattgcattcaatgtgtatgtcaacaccaagcccgagattctgacgtacgaccggctggtcaatggtatgctgcagtgtgtcgctgccgggttcccggagccaaccatagattggtatttctgtccaggcacagaacagagatgctctgcatctgttttgcctgtggatgtccagacactgaattcatccggacctccctttggtaagttggtcgtacagtcaagtatcgattctagcgcctttaagcacaatggcactgttgagtgcaaagcttataatgatgtcggaaaaaccagcgcctacttcaatttcgcgttcaaggggaacaataaggagcagatccacccacacacacttttcacgccattactgatcggattcgtgatagtggccggaatgatgtgcatcatcgttatgattctcacatataaatacttgcaaaagcctatgtacgaggtgcaatggaaggtggtcgaggagataaatgggaataattatgtgtatattgatccaacacagcttccttacgatcataaatgggaattcccgcggaaccgtctttctttcggaaaaacccttggcgccggagcatttggaaaagtggtcgaagccaccgcatacggccttataaaaagcgatgccgccatgaccgtagccgtcaaaatgttaaagccctctgcacatctaaccgaacgagaggccctcatgtcggagctcaaagtgttgtcctacctgggcaatcatatgaatattgtaaatcttttgggggcctgtacgattggcggcccgactctagtgattactgagtactgttgctatggggatttgctaaatttcttgcggaggaaaagggacagctttatttgcagcaaacaagaagatcatgctgaagcggccctatacaagaatttgctgcactctaaggagtccagttgctcggactctaccaacgaatatatggacatgaagccgggcgtctcttacgtggtgccaactaaagccgacaaacgtagatcagtccgtattggaagttatattgaacgtgacgtgacacccgcaatcatggaggatgatgaactggcactggatttggaagacctgctctcttttagctaccaggtcgccaaaggaatggcattcctggccagcaagaactgcatccaccgcgatctggcggctcgtaacatcctgcttacccacggacgtattaccaagatttgcgatttcgggctggccagagatatcaaaaacgatagcaattacgtggtgaagggcaacgctaggctgcccgtgaagtggatggctcctgagtcgatattcaactgcgtgtatacttttgaaagcgatgtgtggagttatggcatttttctgtgggaattgttctctctcggaagtagcccgtatcctgggatgcctgtggacagtaaattctataagatgataaaggagggcttcaggatgctctcacctgagcatgctccagctgagatgtatgacattatgaaaacgtgctgggacgctgacccactgaaacgtccaacatttaagcagattgtgcaattaattgagaagcagatatcagagtctactaatcacatttatagtaacctggctaattgctccccgaatcgacagaagcccgtggtggatcattccgtccgcatcaatagtgtaggcagtacagcaagctctagccagcccctgctcgtccacgacgatgtttag

SEQ ID NO: 4640 - DNA, 2931 bp, Artificial Sequence
  derived and/or modified sequence
atgagaggagctagaggtgcctgggattttctttgtgtgctcttacttttactgcgcgtccagaccggatcctcccagcctagcgtgtctcccggtgagcctagtccccctagcattcaccctggaaaatccgatctgatagtgcgggtgggtgacgaaattaggctcctttgtactgaccccggatttgtgaagtggacgtttgagatcctggacgaaaccaacgaaaataaacagaatgagtggattactgagaaagctgaggcgactaataccggaaagtacacgtgcaccaataagcatggactgagtaactcaatatacgtcttcgtgagagacccagctaaattgtttcttgttgatcggagcctgtacgggaaagaggacaacgatactctagtacggtgtccgctgaccgatcctgaggtgacaaactactccctgaaaggatgccagggtaaacccctgccaaaagaccttcggttcattccagatcccaaagccggtatcatgatcaaatcggtgaagcgagcctaccatcggctttgcttgcactgcagtgtggaccaggaaggaaagagcgtgttatccgagaagttcatactcaaagttcgtcctgcgttcaaggctgtgcccgtagtcagtgtctcaaaagctagctatctcctgcgagagggagaggaatttacggtcacttgcacgatcaaagacgtgagctccagtgtatattcaacctggaaacgggaaaactctcagaccaagttgcaagagaagtataacagctggcaccacggggacttcaattacgagagacaggctaccctgaccatcagctccgcacgcgtgaatgattcaggtgtcttcatgtgttatgccaataacacgtttggcagcgcaaacgtgaccacaacactggaagtggtggacaaggggttcatcaacattttcccaatgatcaacactacggttttcgtgaatgatggagagaacgtggatttgatcgtagagtacgaggcgttccctaaaccggaacaccagcaatggatttacatgaatcgtacatttactgacaagtgggaagactaccctaagtctgaaaacgaaagcaacatacggtacgtgagtgaactccatctcacaagactcaaaggcacagagggaggtacatatacgttcctggtgtccaacagcgatgtgaacgctgctattgcattcaatgtgtacgtgaatactaaacccgagatcctgacctacgaccggttagtgaacggcatgttacagtgtgttgcagctggttttcccgagcccacaatcgattggtacttttgtcctggtactgaacagcgctgtagcgcctcggtgcttccagtggatgtgcagaccctgaacagctctggcccacccttcggtaagctggtggtgcagtcttctatagacagcagtgcctttaagcataatgggaccgtcgaatgtaaggcttataacgatgtgggaaaaacttctgcttacttcaatttcgccttcaaaggcaataacaaggaacagattcatccccacaccctgttcacccccctgttgatagggtttgtgattgttgctggtatgatgtgcatcattgtgatgatcctcacatataaatacctgcaaaaacccatgtacgaggtgcaatggaaggtggtggaggaaatcaatggcaataattatgtgtacattgatccgacacaattgccctacgatcacaagtgggagtttcccagaaatcgactgtcttttggcaagactctaggcgctggcgctttcggcaaggtcgtggaggctaccgcctatgggttgatcaagagtgatgctgcaatgactgtcgctgtgaaaatgttgaagccctctgcccatctaactgaacgggaggcattgatgtctgagcttaaggtgctgtcttatctcggaaaccacatgaacatcgtgaacctgctgggtgcatgtactattggtggccctaccctggtgatcaccgagtattgctgctatggcgatctgttgaatttcttgagacggaagagggatagtttcatctgctctaagcaggaggaccatgccgaggcagccctttataagaacctgctgcacagcaaagagtcatcctgctctgattctaccaatgaatacatggatatgaagcctggcgtcagttatgttgtccctacaaaagcggataaaagaagatcagtgagaattggtagctatatcgaacgcgatgttacacccgcaatcatggaagacgatgaactggcactggacctggaggatctgttgtcattctcctaccaggtggctaagggaatggcctttctggcatcaaaaaactgtatccaccgagacctggcggcaaggaatattctcttgacccatggtcggatcacgaagatatgtgactttggcctggctagggacattaaaaatgactcaaattacgtggttaaaggtaacgctcggctaccggtgaagtggatggcgccagaaagcatcttcaactgtgtgtacacgtttgagagcgacgtatggagctatggaattttcctttgggagctcttttcccttggatcatccccctaccccggaatgccggtcgactctaagttttacaaaatgatcaaggagggattccggatgctttccccagaacacgcgcctgccgaaatgtatgacattatgaagacctgttgggacgccgacccccttaagaggcctacattcaaacagattgtacagctgatcgaaaaacagatcagtgagtccactaatcatatctacagcaatctggccaactgctcccccaatcggcaaaaacctgtcgtggaccacagcgtgaggattaactccgtgggatccactgcaagctcctcccagcccctgttagtccacgacgatgtttag

SEQ ID NO: 4641 - DNA, 5186 bp, Artificial Sequence
  derived and/or modified sequence
cgctcgcggctctgggggctcggctttgccgcgctcgctgcacttgggcgagagctggaacgtggaccagagctcggatcccatcgcagctaccgcgatgagaggcgctcgcggcgcctgggattttctctgcgttctgctcctactgcttcgcgtccagacaggctcttctcaaccatctgtgagtccaggggaaccgtctccaccatccatccatccaggaaaatcagacttaatagtccgcgtgggcgacgagattaggctgttatgcactgatccgggctttgtcaaatggacttttgagatcctggatgaaacgaatgagaataagcagaatgaatggatcacggaaaaggcagaagccaccaacaccggcaaatacacgtgcaccaacaaacacggcttaagcaattccatttatgtgtttgttagagatcctgccaagcttttccttgttgaccgctccttgtatgggaaagaagacaacgacacgctggtccgctgtcctctcacagacccagaagtgaccaattattccctcaaggggtgccaggggaagcctcttcccaaggacttgaggtttattcctgaccccaaggcgggcatcatgatcaaaagtgtgaaacgcgcctaccatcggctctgtctgcattgttctgtggaccaggagggcaagtcagtgctgtcggaaaaattcatcctgaaagtgaggccagccttcaaagctgtgcctgttgtgtctgtgtccaaagcaagctatcttcttagggaaggggaagaattcacagtgacgtgcacaataaaagatgtgtctagttctgtgtactcaacgtggaaaagagaaaacagtcagactaaactacaggagaaatataatagctggcatcacggtgacttcaattatgaacgtcaggcaacgttgactatcagttcagcgagagttaatgattctggagtgttcatgtgttatgccaataatacttttggatcagcaaatgtcacaacaaccttggaagtagtagataaaggattcattaatatcttccccatgataaacactacagtatttgtaaacgatggagaaaatgtagatttgattgttgaatatgaagcattccccaaacctgaacaccagcagtggatctatatgaacagaaccttcactgataaatgggaagattatcccaagtctgagaatgaaagtaatatcagatacgtaagtgaacttcatctaacgagattaaaaggcaccgaaggaggcacttacacattcctagtgtccaattctgacgtcaatgctgccatagcatttaatgtttatgtgaatacaaaaccagaaatcctgacttacgacaggctcgtgaatggcatgctccaatgtgtggcagcaggattcccagagcccacaatagattggtatttttgtccaggaactgagcagagatgctctgcttctgtactgccagtggatgtgcagacactaaactcatctgggccaccgtttggaaagctagtggttcagagttctatagattctagtgcattcaagcacaatggcacggttgaatgtaaggcttacaacgatgtgggcaagacttctgcctattttaactttgcatttaaaggtaacaacaaagagcaaatccatccccacaccctgttcactcctttgctgattggtttcgtaatcgtagctggcatgatgtgcattattgtgatgattctgacctacaaatatttacagaaacccatgtatgaagtacagtggaaggttgttgaggagataaatggaaacaattatgtttacatagacccaacacaacttccttatgatcacaaatgggagtttcccagaaacaggctgagttttgggaaaaccctgggtgctggagctttcgggaaggttgttgaggcaactgcttatggcttaattaagtcagatgcggccatgactgtcgctgtaaagatgctcaagccgagtgcccatttgacagaacgggaagccctcatgtctgaactcaaagtcctgagttaccttggtaatcacatgaatattgtgaatctacttggagcctgcaccattggagggcccaccctggtcattacagaatattgttgctatggtgatcttttgaattttttgagaagaaaacgtgattcatttatttgttcaaagcaggaagatcatgcagaagctgcactttataagaatcttctgcattcaaaggagtcttcctgcagcgatagtactaatgagtacatggacatgaaacctggagtttcttatgttgtcccaaccaaggccgacaaaaggagatctgtgagaataggctcatacatagaaagagatgtgactcccgccatcatggaggatgacgagttggccctagacttagaagacttgctgagcttttcttaccaggtggcaaagggcatggctttcctcgcctccaagaattgtattcacagagacttggcagccagaaatatcctccttactcatggtcggatcacaaagatttgtgattttggtctagccagagacatcaagaatgattctaattatgtggttaaaggaaacgctcgactacctgtgaagtggatggcacctgaaagcattttcaactgtgtatacacgtttgaaagtgacgtctggtcctatgggatttttctttgggagctgttctctttaggaagcagcccctatcctggaatgccggtcgattctaagttctacaagatgatcaaggaaggcttccggatgctcagccctgaacacgcacctgctgaaatgtatgacataatgaagacttgctgggatgcagatcccctaaaaagaccaacattcaagcaaattgttcagctaattgagaagcagatttcagagagcaccaatcatatttactccaacttagcaaactgcagccccaaccgacagaagcccgtggtagaccattctgtgcggatcaattctgtcggcagcaccgcttcctcctcccagcctctgcttgtgcacgacgatgtctgagcagaatcagtgtttgggtcacccctccaggaatgatctcttcttttggcttccatgatggttattttcttttctttcaacttgcatccaactccaggatagtgggcaccccactgcaatcctgtctttctgagcacactttagtggccgatgatttttgtcatcagccaccatcctattgcaaaggttccaactgtatatattcccaatagcaacgtagcttctaccatgaacagaaaacattctgatttggaaaaagagagggaggtatggactgggggccagagtcctttccaaggcttctccaattctgcccaaaaatatggttgatagtttacctgaataaatggtagtaatcacagttggccttcagaaccatccatagtagtatgatgatacaagattagaagctgaaaacctaagtcctttatgtggaaaacagaacatcattagaacaaaggacagagtatgaacacctgggcttaagaaatctagtatttcatgctgggaatgagacataggccatgaaaaaaatgatccccaagtgtgaacaaaagatgctcttctgtggaccactgcatgagcttttatactaccgacctggtttttaaatagagtttgctattagagcattgaattggagagaaggcctccctagccagcacttgtatatacgcatctataaattgtccgtgttcatacatttgaggggaaaacaccataaggtttcgtttctgtatacaaccctggcattatgtccactgtgtatagaagtagattaagagccatataagtttgaaggaaacagttaataccattttttaaggaaacaatataaccacaaagcacagtttgaacaaaatctcctcttttagctgatgaacttattctgtagattctgtggaacaagcctatcagcttcagaatggcattgtactcaatggatttgatgctgtttgacaaagttactgattcactgcatggctcccacaggagtgggaaaacactgccatcttagtttggattcttatgtagcaggaaataaagtataggtttagcctccttcgcaggcatgtcctggacaccgggccagtatctatatatgtgtatgtacgtttgtatgtgtgtagacaaatatttggaggggtatttttgccctgagtccaagagggtcctttagtacctgaaaagtaacttggctttcattattagtactgctcttgtttcttttcacatagctgtctagagtagcttaccagaagcttccatagtggtgcagaggaagtggaaggcatcagtccctatgtatttgcagttcacctgcacttaaggcactctgttatttagactcatcttactgtacctgttccttagaccttccataatgctactgtctcactgaaacatttaaattttaccctttagactgtagcctggatattattcttgtagtttacctctttaaaaacaaaacaaaacaaaacaaaaaactccccttcctcactgcccaatataaaaggcaaatgtgtacatggcagagtttgtgtgttgtcttgaaagattcaggtatgttgcctttatggtttcccccttctacatttcttagactacatttagagaactgtggccgttatctggaagtaaccatttgcactggagttctatgctctcgcacctttccaaagttaacagattttggggttgtgttgtcacccaagagattgttgtttgccatactttgtctgaaaaattcctttgtgtttctattgacttcaatgatagtaagaaaagtggttgttagttatagatgtctaggtacttcaggggcacttcattgagagttttgtcttggatattcttgaaagtttatatttttataattttttcttacatcagatgtttctttgcagtggcttaatgtttgaaattattttgtggctttttttgtaaatattgaaatgtagcaataatgtcttttgaatattcccaagcccatgagtccttgaaaatattttttatatatacagtaactttatgtgtaaatacataagcggcgtaagtttaaaggatgttggtgttccacgtgttttattcctgtatgttgtccaattgttgacagttctgaagaattctaataaaatgtacatatataaatcaa

SEQ ID NO: 4642 - protein, 494 aa, Artificial Sequence
  derived and/or modified sequence
MDLSNNTMSLSVRTPGLSRRLSSQSVIGRPRGMSASSVGSGYGGSAFGFGASCGGGFSAASMFGSSSGFGGGSGSSMAGGLGAGYGRALGGGSFGGLGMGFGGSPGGGSLGILSGNDGGLLSGSEKETMQNLNDRLASYLDKVRALEEANTELENKIREWYETRGTGTADASQSDYSKYYPLIEDLRNKIISASIGNAQLLLQIDNARLAAEDFRMKYENELALRQGVEADINGLRRVLDELTLTRTDLEMQIESLNEELAYMKKNHEDELQSFRVGGPGEVSVEMDAAPGVDLTRLLNDMRAQYETIAEQNRKDAEAWFIEKSGELRKEISTNTEQLQSSKSEVTDLRRAFQNLEIELQSQLAMKKSLEDSLAEAEGDYCAQLSQVQQLISNLEAQLLQVRADAERQNVDHQRLLNVKARLELEIETYRRLLDGEAQGDGLEESLFVTDSKSQAQSTDSSKDPTKTRKIKTVVQEMVNGEVVSSQVQEIEELM

SEQ ID NO: 4643 - DNA, 1485 bp, Artificial Sequence
  derived and/or modified sequence
atggaccttagtaacaacacaatgtccttgtccgttcggacacccggcctgagcaggagattatcctcacagtctgtcatcggtcggcctcggggaatgagtgcgtcgtcagtgggaagtgggtacggcggctccgctttcggatttggagcctcttgtggcggcggctttagcgctgcctctatgtttggctcatcttctggtttcggtggcggctcgggcagttccatggccggaggactgggtgcgggctacggacgcgcgctgggtggcggaagtttcggaggtttaggtatgggttttggcggctcaccggggggcggtagcttggggatcctgagcgggaacgatggagggcttctgagcgggtctgagaaagaaacgatgcagaacctcaacgacaggctagcgagctatcttgacaaagtgcgagccctagaagaagccaacaccgaactggaaaacaaaattcgggagtggtatgagactagaggtaccggcacagcggatgcttcacagagcgactacagcaaatactaccctcttatcgaggatctacggaataagattattagcgccagcatcggaaatgctcaattgctgctgcaaattgataatgccaggctggctgcagaagatttcaggatgaagtacgagaacgagctcgctctgaggcaaggggtcgaggctgatataaatggacttcggcgcgtcctcgacgaactgacactcacccgaaccgatctagaaatgcagatcgagtccttaaacgaagagctcgcctatatgaagaaaaatcacgaggacgaactacagagtttcagagtgggagggcctggggaggttagcgtggagatggacgctgcccctggagtggatttgacaagactgctcaatgatatgcgggcacaatatgaaacaatagctgaacagaatcggaaagatgccgaagcatggtttattgaaaagtcaggcgagctaagaaaggagatcagtactaacactgagcagctccaatcgagcaaatcagaagttacagacctccggcgcgcttttcagaacctggagatcgaacttcagagccagctggcgatgaagaagtctctggaggatagcctggcagaggcagaaggcgactactgcgctcaattgtctcaggtacagcagctgataagtaacctggaggctcagctccttcaggtgcgggccgatgcagaacggcagaacgtggaccatcagcgtctgttaaacgtgaaggctcggctggagctggagattgaaacctaccgaaggctgcttgacggggaggcccaaggtgatgggctggaagagtcactgtttgttaccgatagcaagagtcaagctcagagtactgactcctccaaggaccccacaaaaacaaggaaaatcaagaccgttgtgcaggagatggttaacggcgaggtggtttcttcacaggtccaggagattgaggaactgatgtag

SEQ ID NO: 4644 - DNA, 2227 bp, Artificial Sequence
  derived and/or modified sequence
agttgtggccaccttccccaggccatggatctctccaacaacaccatgtcactctcagtgcgcacccccggactgtcccggcggctctcctcgcagagtgtgataggcagacccaggggcatgtctgcttccagtgttggaagtggttatgggggaagtgcctttggctttggagccagctgtgggggaggcttttctgctgcttccatgtttggttctagttccggctttgggggtggctccggaagttccatggcaggaggactgggtgctggttatgggagagccctgggtggaggtagctttggagggctggggatgggatttgggggcagcccaggaggtggctctctaggtattctctcgggcaatgatggaggccttctttctggatcagaaaaagaaactatgcaaaatcttaatgatagattagcttcctacctggataaggtgcgagctctagaagaggctaatactgagctagaaaataaaattcgagaatggtatgaaacacgaggaactgggactgcagatgcttcacagagcgattacagcaaatattatccactgattgaagacctcaggaataagatcatttcagccagcattggaaatgcccagctcctcttgcagattgacaatgcgagactagctgctgaggacttcaggatgaagtatgagaatgaactggccctgcgccagggcgtagaggccgacatcaatggcctgcgccgggtgctggacgagctgaccctgaccaggaccgacctggagatgcagatcgagagcctgaacgaggagctggcctacatgaagaagaaccacgaggatgagctccaaagcttccgggtgggcggcccaggcgaggtcagcgtagaaatggacgctgcccccggagtggacctcaccaggctcctcaatgatatgcgggcgcagtatgaaaccatcgctgagcagaatcggaaggacgctgaagcctggttcattgaaaagagcggggagctccgtaaggagattagcaccaacaccgagcagcttcagtccagcaagagcgaggtcaccgacctgcgtcgcgcctttcagaacctggagatcgagctacagtcccagctcgccatgaagaaatccctggaggactccttggccgaagccgagggcgattactgcgcgcagctgtcccaggtgcagcagctcatcagcaacctggaggcacagctgctccaggtgcgcgcggacgcagagcgccagaacgtggaccaccagcggctgctgaatgtcaaggcccgcctggagctggagattgagacctaccgccgcctgctggacggggaggcccaaggtgatggtttggaggaaagtttatttgtgacagactccaaatcacaagcacagtcaactgattcctctaaagacccaaccaaaacccgaaaaatcaagacagttgtgcaggagatggtgaatggtgaggtggtctcatctcaagttcaggaaattgaagaactaatgtaaaatttcacaagatctgccccatgattggttccttaggaacaagaaatttacaagtagaaattattcctttcagagtaacatgctgtattacttcaatccctatttttgtctgttccattttctttggattccctattcacattgaatcctttttgcccttctgaaacaatattcagtcacaagtcattttggtcatgttggtctttgtaacaaatcaaaattaccttatatccttctggacctggagtagtcttttaacgaactttcttctggtaacccggaatattttttaatcatagagctttaatcaagtagtattgttttaatagagttaattgtaataaaagatgaatggtaataatgtgaaatgtatgccttgattccaacaagaatgtcaagagcatagagagaagtttttgaaatactactaataaaatagaggctgggagtaatgactcacacctataatcccagcactttgggaggctgagaggcaagatgattgcttgaggcccggagttcaagaccagcctggacaacatagagagacccccatctctacacaacattaataatgataataatgataatgtagataaaactgggatgaagatgtcagggtttgaggattaagctaaaagaagattcttttagaagttctggcctttttatgtaagctcatcaaggttgtagcaaaattatattgtctactacagca

SEQ ID NO: 4645 - DNA, 1485 bp, Artificial Sequence
  derived and/or modified sequence
atggacctgagcaacaacaccatgagcctgtctgtgaggaccccaggcctgagccggcggctgagcagccagagcgtgattggccggccccggggcatgtctgccagctctgtgggcagcggctacggcggcagcgcctttggatttggagccagctgtggcggcggcttctctgctgcctccatgtttggcagcagcagcggctttggaggcggcagcggcagctccatggccggcggcctgggcgccggctacggccgggccctgggcggcggcagctttggaggcctgggcatgggctttggaggcagccctgggggcggcagcctgggcatcctgtctggaaatgatggcggcctgctgagcggcagcgagaaggagaccatgcagaacctgaatgaccggctggccagctacctggacaaggtgcgggccctggaggaggccaacacagagctggagaacaagatccgggagtggtatgagacccggggcaccggcacagcagatgccagccagagcgactacagcaagtactaccccctgattgaggacctgaggaacaagatcatcagcgccagcattggaaatgcccagctgctgctgcagattgacaatgcccggctggccgctgaggacttcaggatgaagtatgaaaatgagctggccctgcggcagggcgtggaggccgacatcaatggcctgcggcgggtgctggatgagctgaccctgaccaggacagacctggagatgcagatcgagagcctgaatgaggagctggcctacatgaagaagaaccatgaagatgagctgcagagcttccgggtgggcggccctggagaggtgtctgtggagatggatgctgcccctggggtggacctgacccggctgctgaatgacatgagggcccagtatgagaccatcgccgagcagaacaggaaggatgctgaggcctggttcatcgagaagagcggggagctgaggaaggagatcagcaccaacacagagcagctgcagagcagcaagtctgaggtgacagacctgcggcgggccttccagaacctggagattgagctgcagagccagctggccatgaagaagagcctggaggacagcctggccgaggccgagggggactactgtgcccagctgagccaggtgcagcagctgatcagcaacctggaggcccagctgctgcaggtgcgggcagatgctgagcggcagaatgtggaccaccagaggctgctgaatgtgaaggcccggctggagctggagattgagacctaccgccgcctgctggatggagaggcccagggagatggcctggaggagagcctgtttgtgacagacagcaagagccaggcccagagcacagacagcagcaaggaccccaccaagaccaggaagatcaagacagtggtgcaggagatggtgaatggagaggtggtgagcagccaggtgcaggagattgaggagctgatgtag

SEQ ID NO: 4646 - DNA, 1485 bp, Artificial Sequence
  derived and/or modified sequence
atggacctgagcaacaacaccatgagcctgagcgtgcggacccccgggcttagtagacgcttgagttcccagtctgtgatcgggaggccacgtggtatgtcagcaagctccgtgggcagcggatatggcgggagcgcatttggttttggggcttcatgcggaggtggatttagtgcggcatctatgtttggctcatcaagcggcttcggggggggatctggcagttcaatggccggcggcctcggagcgggctatgggagagcgctggggggaggaagctttggaggcctgggtatgggctttggcggttctcccggggggggtagcctgggaattctgtccggaaacgatggaggcctcctgagtgggagtgaaaaggagacaatgcaaaacctgaacgatcggcttgcgagttacctcgacaaggttcgagcactcgaggaagccaatactgagcttgagaataagatccgcgagtggtacgagacacggggcaccggcaccgctgatgccagccagagcgactattccaagtattaccctctgattgaagacctgcgtaacaagataattagcgcctccataggcaatgcccagcttctgttacagatcgataatgctcgcctagccgcagaggatttcaggatgaaatacgaaaatgaattggccctcaggcaaggcgttgaggccgacatcaacggcttacgccgcgtcttggacgaacttactcttactaggacagacctcgagatgcagatcgagagccttaatgaggagctggcgtatatgaaaaaaaaccacgaagacgagttgcagtcctttcgagtgggcgggcctggggaggtaagtgtcgaaatggacgctgcgccaggggttgacctgacgaggcttctgaacgacatgcgggcccagtacgagactatcgcggaacagaatcggaaggacgctgaagcctggtttatagagaagtccggtgaactccgaaaggaaatctctactaatacggagcagctgcagtcctcaaaatccgaagttacggatctgaggcgcgcgttccaaaacctcgagattgagttgcagtctcagctggccatgaaaaaatctttggaagattctctcgcagaggctgaaggtgactattgtgcccaactctcccaggtgcaacaacttatcagcaaccttgaggctcagctgctgcaggtcagagccgacgcggaacgtcaaaatgtcgaccaccagcggctcctcaacgtcaaagccagactggagctggaaatcgagacgtatcgtcgattgttggatggcgaggcacagggtgacggactagaggagtctctcttcgtcacagactctaaaagccaggcacagtctacagatagttccaaggaccccactaaaacgaggaagattaaaactgtggtccaggagatggtgaatggggaagtggtttccagccaggtgcaagaaatcgaggagctcatgtag

SEQ ID NO: 4647 - DNA, 1485 bp, Artificial Sequence
  derived and/or modified sequence
atggatctctcaaataacactatgtctctatccgtacgcacacctggcctgagcagacgtctcagctcacagtctgtgatcggcaggccccgtggaatgtccgcttcgtcggttggctctggctacgggggttccgctttcggctttggagcctcatgtggcggaggtttttccgcggcttccatgttcggctccagctccggattcggtggcggatcgggctcgtcaatggccggaggcctcggcgctggatatggcagagccctggggggtggttcattcgggggactgggcatgggctttggtgggagccccggaggaggcagtctggggattctgagcggaaatgatggcggtctgttaagtgggtccgagaaagaaaccatgcaaaatttgaacgatagattagcaagttatctcgataaggtccgcgctctcgaggaggcaaacactgaactggagaataagatccgggaatggtatgagacccgaggtacaggtacagcagacgcctctcagtcagattactccaagtattatccactgattgaagatcttcgcaataaaataatttccgcctctattggcaatgcacagctactgcttcagatcgacaatgccaggctggccgctgaggatttcagaatgaaatacgagaacgagcttgctttgcgtcagggagttgaagctgacatcaacggcctccggagggtgctggatgagctcacgctgaccaggacggacctggagatgcagatcgaatctctgaacgaggaactggcatatatgaagaagaaccacgaggatgagctgcaaagcttccgagtcggcggacccggtgaggtgtcagttgaaatggatgccgctccaggagtagatcttactaggctgctcaatgacatgcgcgctcagtatgagacaatcgccgagcaaaatcgcaaagacgctgaggcatggtttattgagaaatcaggtgaattacgtaaggagataagtacaaatactgagcaactccagtcctcgaaaagtgaggttactgacttgcgacgggctttccagaacctcgaaatcgagcttcagtcacaactggccatgaagaaatccctagaggattcactggcggaagccgaaggggattactgtgcacaactcagccaggtgcagcagctgatatccaaccttgaggctcagttgcttcaggtacgggcagacgccgagcgacagaacgtagatcatcagcgattgctcaacgttaaggcccgtctcgaactggaaatcgaaacatacagacgtcttcttgacggagaagcacaaggggatggactggaagagagtttattcgtgactgacagcaagtctcaggcccaatctactgactcaagcaaggaccctactaagacgagaaaaatcaagaccgtggtgcaagaaatggtgaatggtgaagtggtaagttctcaagttcaggagattgaagagctcatgtag

SEQ ID NO: 4648 - DNA, 1485 bp, Artificial Sequence
  derived and/or modified sequence
atggacctgagcaacaacaccatgagcctgagcgtgagaacccccggcctgagcagaagactgagcagccagagcgtgatcggcagacccagaggcatgagcgccagcagcgtgggcagcggctacggcggcagcgccttcggcttcggcgccagctgcggcggcggcttcagcgccgccagcatgttcggcagcagcagcggcttcggcggcggcagcggcagcagcatggccggcggcctgggcgccggctacggcagagccctgggcggcggcagcttcggcggcctgggcatgggcttcggcggcagccccggcggcggcagcctgggcatcctgagcggcaacgacggcggcctgctgagcggcagcgagaaggagaccatgcagaacctgaacgacagactggccagctacctggacaaggtgagagccctggaggaggccaacaccgagctggagaacaagatcagagagtggtacgagaccagaggcaccggcaccgccgacgccagccagagcgactacagcaagtactaccccctgatcgaggacctgagaaacaagatcatcagcgccagcatcggcaacgcccagctgctgctgcagatcgacaacgccagactggccgccgaggacttcagaatgaagtacgagaacgagctggccctgagacagggcgtggaggccgacatcaacggcctgagaagagtgctggacgagctgaccctgaccagaaccgacctggagatgcagatcgagagcctgaacgaggagctggcctacatgaagaagaaccacgaggacgagctgcagagcttcagagtgggcggccccggcgaggtgagcgtggagatggacgccgcccccggcgtggacctgaccagactgctgaacgacatgagagcccagtacgagaccatcgccgagcagaacagaaaggacgccgaggcctggttcatcgagaagagcggcgagctgagaaaggagatcagcaccaacaccgagcagctgcagagcagcaagagcgaggtgaccgacctgagaagagccttccagaacctggagatcgagctgcagagccagctggccatgaagaagagcctggaggacagcctggccgaggccgagggcgactactgcgcccagctgagccaggtgcagcagctgatcagcaacctggaggcccagctgctgcaggtgagagccgacgccgagagacagaacgtggaccaccagagactgctgaacgtgaaggccagactggagctggagatcgagacctacagaagactgctggacggcgaggcccagggcgacggcctggaggagagcctgttcgtgaccgacagcaagagccaggcccagagcaccgacagcagcaaggaccccaccaagaccagaaagatcaagaccgtggtgcaggagatggtgaacggcgaggtggtgagcagccaggtgcaggagatcgaggagctgatgtag

SEQ ID NO: 4649 - protein, 430 aa, Artificial Sequence
  derived and/or modified sequence
MSFTTRSTFSTNYRSLGSVQAPSYGARPVSSAASVYAGAGGSGSRISVSRSTSFRGGMGSGGLATGIAGGLAGMGGIQNEKETMQSLNDRLASYLDRVRSLETENRRLESKIREHLEKKGPQVRDWSHYFKIIEDLRAQIFANTVDNARIVLQIDNARLAADDFRVKYETELAMRQSVENDIHGLRKVIDDTNITRLQLETEIEALKEELLFMKKNHEEEVKGLQAQIASSGLTVEVDAPKSQDLAKIMADIRAQYDELARKNREELDKYWSQQIEESTTVVTTQSAEVGAAETTLTELRRTVQSLEIDLDSMRNLKASLENSLREVEARYALQMEQLNGILLHLESELAQTRAEGQRQAQEYEALLNIKVKLEAEIATYRRLLEDGEDFNLGDALDSSNSMQTIQKTTTRRIVDGKVVSETNDTKVLRH

SEQ ID NO: 4650 - DNA, 1293 bp, Artificial Sequence
  derived and/or modified sequence
atgagcttcaccaccagaagcaccttcagcaccaactacagaagcctgggcagcgtgcaggcccccagctacggcgccagacccgtgagcagcgccgccagcgtgtacgccggcgccggcggcagcggcagcagaatcagcgtgagcagaagcaccagcttcagaggcggcatgggcagcggcggcctggccaccggcatcgccggcggcctggccggcatgggcggcatccagaacgagaaggagaccatgcagagcctgaacgacagactggccagctacctggacagagtgagaagcctggagaccgagaacagaagactggagagcaagatcagagagcacctggagaagaagggcccccaggtgagagactggagccactacttcaagatcatcgaggacctgagagcccagatcttcgccaacaccgtggacaacgccagaatcgtgctgcagatcgacaacgccagactggccgccgacgacttcagagtgaagtacgagaccgagctggccatgagacagagcgtggagaacgacatccacggcctgagaaaggtgatcgacgacaccaacatcaccagactgcagctggagaccgagatcgaggccctgaaggaggagctgctgttcatgaagaagaaccacgaggaggaggtgaagggcctgcaggcccagatcgccagcagcggcctgaccgtggaggtggacgcccccaagagccaggacctggccaagatcatggccgacatcagagcccagtacgacgagctggccagaaagaacagagaggagctggacaagtactggagccagcagatcgaggagagcaccaccgtggtgaccacccagagcgccgaggtgggcgccgccgagaccaccctgaccgagctgagaagaaccgtgcagagcctggagatcgacctggacagcatgagaaacctgaaggccagcctggagaacagcctgagagaggtggaggccagatacgccctgcagatggagcagctgaacggcatcctgctgcacctggagagcgagctggcccagaccagagccgagggccagagacaggcccaggagtacgaggccctgctgaacatcaaggtgaagctggaggccgagatcgccacctacagaagactgctggaggacggcgaggacttcaacctgggcgacgccctggacagcagcaacagcatgcagaccatccagaagaccaccaccagaagaatcgtggacggcaaggtggtgagcgagaccaacgacaccaaggtgctgagacactag

SEQ ID NO: 4651 - DNA, 1293 bp, Artificial Sequence
  derived and/or modified sequence
atgtcttttaccacgcgctctaccttttcgactaactatagatcacttggatccgtccaggctcctagctatggcgcccgcccagtgtcttctgccgccagcgtctacgccggggccgggggtagtggatcccgcatttccgtttcccgttccacatcttttcgcggcggtatgggatcaggcggcctggcaactgggattgccggaggattggcgggcatgggaggaattcaaaatgaaaaggaaaccatgcagtccttaaacgatcgattggcctcttatctagatcgagtccgaagcctggagaccgagaataggagactagaatctaagatcagagagcatctggaaaaaaaaggccctcaggtgcgagactggtcacactacttcaagatcattgaggacctccgcgcccaaatcttcgcaaatactgtcgataacgcgcggattgtcttgcagatcgataacgctagactggctgccgacgacttccgcgtcaagtacgaaacggagctggctatgcggcagtccgtggaaaacgacattcatggcttgagaaaggtgattgatgatacaaatatcacccgactgcagctggaaacagaaatcgaagcactgaaagaggaactgctgtttatgaaaaagaaccatgaagaggaggtaaagggactgcaggcacagatcgccagtagcggcttgactgtggaggtggatgcgccaaagtctcaagatctggctaagattatggccgacattagagcacaatacgatgagctggccagaaagaatagggaagagttagacaaatattggagccagcagattgaagagtctacaactgtggtgaccacgcagagcgcagaagtcggagctgccgagaccacactaaccgaattaagacgaacagtgcagagcctggagatagatctcgatagcatgcgcaacctcaaggcttcactcgaaaatagtctcagagaggtggaggcgcgatacgcacttcagatggagcagcttaatggaatcctcctgcaccttgagagcgagctcgcccagacacgggccgaggggcagcggcaggcccaagagtacgaagcactgttaaatattaaagtgaaactggaagcagagatcgccacttaccgacgcttgctggaggacggggaggattttaacctgggcgacgcccttgattcttccaacagtatgcaaacaattcagaaaaccaccactcgcaggatcgtggacggtaaggttgtgtcagaaaccaacgacacaaaggtgctgagacattag

SEQ ID NO: 4652 - DNA, 1293 bp, Artificial Sequence
  derived and/or modified sequence
atgtccttcactacgcgatctaccttcagtaccaattaccgctctcttggctccgttcaggcgcctagctatggcgctagacctgtgtccagcgccgcctcagtgtacgctggcgccggcggtagcgggtctagaatatctgtgagcagatcaacctcatttaggggcggcatggggagcggtggccttgccactggaattgcagggggattagcaggaatgggggggatacagaatgagaaagaaactatgcaatccctcaacgatagactggcttcatacctagaccgagtaagatcgctagagacagagaatcggaggttggaatcgaagatccgagagcacctggagaagaaggggccccaagtgcgcgactggtcccactatttcaagatcatcgaagatctgcgcgcccaaatcttcgctaataccgttgacaacgcaagaatcgtattacaaatcgataatgctcgcttggccgctgatgacttccgtgttaaatacgagactgaattggcgatgagacagtctgtggaaaacgatatccacgggctgcgaaaggtcatagacgacaccaacatcacacggttgcagctcgagacagaaatcgaggccctgaaggaggaactgctcttcatgaagaagaaccatgaagaagaggtgaagggcctccaggctcagattgcttcttctgggctgaccgtagaagttgatgccccaaagagccaggatctcgctaaaattatggccgatatccgagctcagtatgatgagctcgctcgcaagaatcgagaagagctggataagtactggtctcagcaaatcgaggagtcaacaactgtggtgactacacagagcgcagaggtgggcgcggccgaaactaccctcactgaactgaggagaacagttcagtctctggaaatcgacctggattccatgaggaaccttaaggcgtccttggaaaattctctgagagaagtagaggcacgttatgctttgcaaatggagcaattgaacggcatcctgctccacctggagtcagaactagcacagacccgcgctgaggggcaacgccaggcacaagaatacgaagccctgttaaacatcaaggtgaaactggaggctgagattgcaacttaccgaaggcttttagaagacggagaggattttaatttgggagacgcgctggactcctctaattccatgcaaacaattcaaaagaccaccacaaggagaatcgtagatggaaaagtcgtgagtgagaccaacgatacaaaggtgctgcgtcactag

SEQ ID NO: 4653 - DNA, 1293 bp, Artificial Sequence
  derived and/or modified sequence
atgtccttcaccaccaggagcaccttcagcaccaactaccgcagcctgggctctgtgcaggcccccagctatggagcccggcctgtgtcctctgctgcctctgtgtatgctggggccggcggcagcggcagccgcatctctgtgagccgcagcaccagcttccggggcggcatgggcagcggcggcctggccactggaattgctgggggcctggccggcatgggcggcatccagaatgagaaggagaccatgcagagcctgaatgaccggctggccagctacctggacagagtgcgcagcctggagacagagaacagaaggctggagagcaagatccgggagcacctggagaagaagggcccccaggtgcgggactggagccactacttcaagatcatcgaggacctgcgggcccagatctttgccaacacagtggacaatgcccgcatcgtgctgcagattgacaatgcccggctggccgcagatgacttccgggtgaagtatgaaacagagctggccatgaggcagagcgtggagaatgacatccacggcctgaggaaggtgattgatgacaccaacatcacccggctgcagctggagacagaaattgaggccctgaaggaggagctgctcttcatgaagaagaaccacgaggaggaggtgaagggcctgcaggcccagatcgccagcagcggcctgactgtggaggtggatgcccccaagagccaggacctggccaagatcatggctgacatccgggcccagtatgatgagctggccaggaagaaccgggaggagctggacaagtactggagccagcagatcgaggagagcaccaccgtggtgaccacccagagcgctgaggtgggcgctgctgagaccaccctgacagagctgcggaggacagtgcagagcctggagattgacctggacagcatgaggaacctgaaggccagcctggagaacagcctgcgggaggtggaggcccgctatgccctgcagatggagcagctgaatggcatcctgctgcacctggagagcgagctggcccagaccagggctgagggccagaggcaggcccaggagtatgaggccctgctgaacatcaaggtgaagctggaggccgagatcgccacctacagaaggctgctggaggatggagaggacttcaacctgggagatgccctggacagcagcaacagcatgcagaccatccagaagaccaccaccaggagaattgtggatggcaaggtggtgtctgagaccaatgacaccaaggtgctgcggcactag

SEQ ID NO: 4654 - DNA, 1562 bp, Artificial Sequence
  derived and/or modified sequence
cggagggcgcgggggtggggcccggggcggagcggcccggggcggagggcgcgggctccgagccgtccacctgtggctccggcttccgaagcggctccggggcgggggcggggcctcactctgcgatataactcgggtcgcgcggctcgcgcaggccgccaccgtcgtccgcaaagcctgagtcctgtcctttctctctccccggacagcatgagcttcaccactcgctccaccttctccaccaactaccggtccctgggctctgtccaggcgcccagctacggcgcccggccggtcagcagcgcggccagcgtctatgcaggcgctgggggctctggttcccggatctccgtgtcccgctccaccagcttcaggggcggcatggggtccgggggcctggccaccgggatagccgggggtctggcaggaatgggaggcatccagaacgagaaggagaccatgcaaagcctgaacgaccgcctggcctcttacctggacagagtgaggagcctggagaccgagaaccggaggctggagagcaaaatccgggagcacttggagaagaagggaccccaggtcagagactggagccattacttcaagatcatcgaggacctgagggctcagatcttcgcaaatactgtggacaatgcccgcatcgttctgcagattgacaatgcccgtcttgctgctgatgactttagagtcaagtatgagacagagctggccatgcgccagtctgtggagaacgacatccatgggctccgcaaggtcattgatgacaccaatatcacacgactgcagctggagacagagatcgaggctctcaaggaggagctgctcttcatgaagaagaaccacgaagaggaagtaaaaggcctacaagcccagattgccagctctgggttgaccgtggaggtagatgcccccaaatctcaggacctcgccaagatcatggcagacatccgggcccaatatgacgagctggctcggaagaaccgagaggagctagacaagtactggtctcagcagattgaggagagcaccacagtggtcaccacacagtctgctgaggttggagctgctgagacgacgctcacagagctgagacgtacagtccagtccttggagatcgacctggactccatgagaaatctgaaggccagcttggagaacagcctgagggaggtggaggcccgctacgccctacagatggagcagctcaacgggatcctgctgcaccttgagtcagagctggcacagacccgggcagagggacagcgccaggcccaggagtatgaggccctgctgaacatcaaggtcaagctggaggctgagatcgccacctaccgccgcctgctggaagatggcgaggactttaatcttggtgatgccttggacagcagcaactccatgcaaaccatccaaaagaccaccacccgccggatagtggatggcaaagtggtgtctgagaccaatgacaccaaagttctgaggcattaagccagcagaagcagggtaccctttggggagcaggaggccaataaaaagttcagagttca

SEQ ID NO: 4655 - DNA, 1420 bp, Artificial Sequence
  derived and/or modified sequence
gcagcctcgagggccaacaacacctgctgtccgtgtccatgcccggttggccaccccgtttctgggggcatgagcttcaccactcgctccaccttctccaccaactaccggtccctgggctctgtccaggcgcccagctacggcgcccggccggtcagcagcgcggccagcgtctatgcaggcgctgggggctctggttcccggatctccgtgtcccgctccaccagcttcaggggcggcatggggtccgggggcctggccaccgggatagccgggggtctggcaggaatgggaggcatccagaacgagaaggagaccatgcaaagcctgaacgaccgcctggcctcttacctggacagagtgaggagcctggagaccgagaaccggaggctggagagcaaaatccgggagcacttggagaagaagggaccccaggtcagagactggagccattacttcaagatcatcgaggacctgagggctcagatcttcgcaaatactgtggacaatgcccgcatcgttctgcagattgacaatgcccgtcttgctgctgatgactttagagtcaagtatgagacagagctggccatgcgccagtctgtggagaacgacatccatgggctccgcaaggtcattgatgacaccaatatcacacgactgcagctggagacagagatcgaggctctcaaggaggagctgctcttcatgaagaagaaccacgaagaggaagtaaaaggcctacaagcccagattgccagctctgggttgaccgtggaggtagatgcccccaaatctcaggacctcgccaagatcatggcagacatccgggcccaatatgacgagctggctcggaagaaccgagaggagctagacaagtactggtctcagcagattgaggagagcaccacagtggtcaccacacagtctgctgaggttggagctgctgagacgacgctcacagagctgagacgtacagtccagtccttggagatcgacctggactccatgagaaatctgaaggccagcttggagaacagcctgagggaggtggaggcccgctacgccctacagatggagcagctcaacgggatcctgctgcaccttgagtcagagctggcacagacccgggcagagggacagcgccaggcccaggagtatgaggccctgctgaacatcaaggtcaagctggaggctgagatcgccacctaccgccgcctgctggaagatggcgaggactttaatcttggtgatgccttggacagcagcaactccatgcaaaccatccaaaagaccaccacccgccggatagtggatggcaaagtggtgtctgagaccaatgacaccaaagttctgaggcattaagccagcagaagcagggtaccctttggggagcaggaggccaataaaaagttcagagttc

SEQ ID NO: 4656 - DNA, 1293 bp, Artificial Sequence
  derived and/or modified sequence
atgagcttcaccacccggagcaccttcagcaccaactaccggagcctgggttccgtccaggctccatcctatggcgcgagacctgtttcttccgcagcgtcagtgtatgcgggcgccggcggatccggctcacgtattagtgtgtcaagatctacatcctttagaggcggaatggggagtggggggctggctactggcattgcaggcggactagcggggatgggaggtatccagaatgaaaaggagaccatgcaatcactaaacgacagactggccagttacctggatcgagttcggtccctcgaaacagagaaccggcgccttgagagcaaaatccgcgagcacctcgagaagaaaggccctcaagtgcgggactggtcccattactttaagatcattgaagatctgagggcacagatctttgcaaacaccgtagacaacgcaaggatcgtcctgcagatcgataacgcgcgactggccgcagatgattttcgagtaaaatatgaaaccgagcttgccatgcgccagtcagtcgagaacgacatccacggtctgagaaaagtgatcgacgatacaaacatcaccaggctgcagctggaaacggagatcgaagcccttaaggaggagctgttattcatgaagaaaaatcacgaagaagaggtcaaaggtctccaagcccagattgcttccagcgggctgacagtagaagtcgatgcacctaaaagtcaggacctggccaaaattatggcggacatccgagcacaatacgatgagctcgcgcgaaagaatcgggaggaactcgataaatattggagtcagcaaattgaagagtccacaactgtcgtcacgacccagtcagcagaggtgggcgcggccgaaaccactcttaccgagctgaggcggaccgtgcaatcactagagattgacctggatagtatgcgcaacctcaaggcttcactcgagaacagcctgagggaggtggaagctagatatgccctgcagatggagcaattaaatggaattcttctgcacttggagtctgagttggcccagactcgcgctgaaggccagcgccaagctcaggagtacgaggctctgctgaacataaaggtgaagctggaagcagaaattgccacttatcggcgcctgcttgaggacggcgaggattttaatctcggagacgcactggacagctctaattccatgcagaccatccagaagaccactacgaggcgcattgtcgatggtaaggtggtgagcgaaaccaacgacacaaaggtactgcggcattag

SEQ ID NO: 4657 - DNA, 1293 bp, Artificial Sequence
  derived and/or modified sequence
atgagcttcaccacccggagcaccttcagcaccaactaccggagcttggggtcagtacaagcccccagctacggtgcgagacctgtgagtagcgcggcatccgtttacgccggggcaggaggcagcggatccagaatctctgtgtctagatctacctcattccgaggtggcatgggatctggaggcctggctaccggtatcgctggtggactggctggaatgggagggatccaaaatgaaaaagagaccatgcagagcctaaatgatagactagcttcgtacctggatcgggttcgctctctcgagaccgaaaaccgacggttggagagcaagatacgcgagcatttagagaagaagggaccgcaagtgagagactggagccattatttcaagatcattgaggatctgcgggctcaaatctttgcaaacaccgtggacaacgctcgcatcgtactgcaaatcgataacgctagactggcggcagatgacttcagggtaaagtatgaaacggagctcgccatgcgacagtctgtggaaaacgacattcacggattgcggaaagtcatagatgacactaacattacccggctgcaactggagaccgaaatcgaagcgctgaaagaagaactgctgtttatgaagaaaaaccatgaagaggaggttaagggtcttcaggcccagattgcttcaagtggcctgacagttgaggttgatgcgccaaagtcccaggatctggcaaaaataatggcagacatccgagcacagtacgatgagctggctcgcaaaaatcgggaagagctcgacaagtattggtcccaacagatcgaggaatctacaaccgtggtcacaacccaaagcgcagaggtgggcgcagctgagaccacgctgacagagctccgacgcacggttcagtccctggagatagacctggacagcatgcgcaacctcaaggcttcactggagaattctcttcgcgaggttgaagcacgatacgcattacaaatggagcagctcaacgggattctgctgcatttagagtctgagctggctcagacgcgcgcggaggggcagagacaggctcaggagtatgaggccctgttgaatatcaaggtgaagctcgaagcagagatcgctacttataggaggttgctggaggacggtgaagacttcaatctgggagacgccctggatagttctaattctatgcagaccatccagaaaaccacaacaagaaggatcgtggatggcaaagttgtctccgagaccaacgatacgaaggtgttgagacactag

SEQ ID NO: 4658 - DNA, 1293 bp, Artificial Sequence
  derived and/or modified sequence
atgagtttcaccactagaagtactttctccacaaactaccggagtcttggctccgtgcaagcccctagctacggagctcggccagtcagtagtgcagctagcgtttacgcaggagctggcggttccggttcgcgtattagtgtgagccgcagcacctcatttcgcggaggaatgggatccggcggtctcgccaccggtatcgctggcggactcgccggaatggggggtatccaaaatgagaaagaaaccatgcaaagtctgaacgacagactggctagctatttggaccgggtgcggagcctggagactgaaaatagacggctggaatcaaagatcagggagcacctggaaaagaagggtccacaggtgcgtgactggtctcactactttaaaataattgaggacttaagagcccagattttcgctaataccgtggacaacgccagaatcgttctccagatagacaatgctaggcttgcggctgatgatttcagggtcaaatacgagaccgaactcgccatgaggcagtcagtggagaacgacattcatgggctacgaaaggtaattgacgacacaaacataacgcgactgcaactggaaacggaaatagaggccctgaaagaagaattgttgttcatgaagaagaaccacgaggaggaggtaaaggggctccaggcccagatcgcctccagtggcctcactgtggaggtcgacgcccctaaaagtcaggatctcgctaaaatcatggccgacattcgagcccaatacgacgagctcgcacggaagaaccgggaagaactcgacaaatattggtcacagcagatagaagagtccacaaccgtggtgactacacagtcggcagaagtgggcgcagcagaaactacactcacagagctccggaggactgtgcaatctttggaaatcgacttggattccatgagaaatcttaaagccagtctagagaattccctgcgagaagtggaggcgcgatatgctctgcagatggaacagctgaacgggatcctactacacctagagtctgaactggcacagaccagagcagagggacagaggcaggcccaggagtatgaagccctcctgaatatcaaggtaaaactcgaggccgaaatcgcaacatacagaagactcctggaggacggggaggatttcaacctgggcgatgcccttgattccagtaattcgatgcagactattcagaagacgacgaccagacgcattgtggacggcaaggtcgtgtcggaaaccaacgatacaaaagttctgcggcattag

SEQ ID NO: 4659 - DNA, 1293 bp, Artificial Sequence
  derived and/or modified sequence
atgtcttttaccacgcggagcactttctcaactaactatcggtcactgggatctgtgcaggccccatcatacggtgcacggcctgtgagttccgccgctagcgtgtacgccggagcaggcggatctggctcccggatctcagttagcaggagtacttctttcagaggcggtatgggtagcggcggactcgctactggtattgcgggtggactggcgggaatgggcggaattcaaaatgagaaagagactatgcagtcattgaatgatcgtctagccagctatctggatagagtgaggagtctggaaactgagaatcgcagacttgagagcaaaattcgcgaacacctcgaaaaaaaaggccctcaagttcgtgattggtcccactacttcaaaatcattgaggacctccgcgcacagatcttcgccaacactgtcgacaacgctaggatagtccttcagatcgacaatgccaggctggccgctgatgattttcgagtgaaatacgagacagagctagctatgaggcagtccgtcgaaaatgatatacacggtctgaggaaggtaattgatgacacgaacatcactagactgcagttagagaccgaaatcgaggctctgaaggaagaattgctgttcatgaaaaagaaccacgaagaagaggtgaagggactacaggctcaaatcgcttctagcggtctgaccgtggaggtcgatgcgccaaaaagtcaggatctggccaaaatcatggccgacatcagggcacagtacgatgaactcgctcgaaaaaatagagaagagctcgataaatactggagccagcagatcgaagagagcactaccgtggttacgacacagagtgctgaagttggcgctgctgagacaacccttacagaactgagacggaccgtgcagtccctcgaaatcgacctggactcgatgagaaacctcaaggcctccctcgagaattcattaagagaggtggaagcaagatacgcgctgcagatggagcagctgaacggtattctcctgcaccttgaatctgagctggctcagacacgcgctgaaggacagcggcaagcccaagaatacgaagccctacttaatatcaaggtgaaactcgaggccgagattgctacctaccgaaggttgctggaggacggagaagacttcaacttgggagatgcgctggacagctccaattctatgcaaacaattcaaaaaacgaccacccgaagaatagtggatggcaaggtagtgtcagaaacgaacgacaccaaggtcctgaggcactag

SEQ ID NO: 4660 - protein, 623 aa, Artificial Sequence
  derived and/or modified sequence
MSCRQFSSSYLSRSGGGGGGGLGSGGSIRSSYSRFSSSGGGGGGGRFSSSSGYGGGSSRVCGRGGGGSFGYSYGGGSGGGFSASSLGGGFGGGSRGFGGASGGGYSSSGGFGGGFGGGSGGGFGGGYGSGFGGFGGFGGGAGGGDGGILTANEKSTMQELNSRLASYLDKVQALEEANNDLENKIQDWYDKKGPAAIQKNYSPYYNTIDDLKDQIVDLTVGNNKTLLDIDNTRMTLDDFRIKFEMEQNLRQGVDADINGLRQVLDNLTMEKSDLEMQYETLQEELMALKKNHKEEMSQLTGQNSGDVNVEINVAPGKDLTKTLNDMRQEYEQLIAKNRKDIENQYETQITQIEHEVSSSGQEVQSSAKEVTQLRHGVQELEIELQSQLSKKAALEKSLEDTKNRYCGQLQMIQEQISNLEAQITDVRQEIECQNQEYSLLLSIKMRLEKEIETYHNLLEGGQEDFESSGAGKIGLGGRGGSGGSYGRGSRGGSGGSYGGGGSGGGYGGGSGSRGGSGGSYGGGSGSGGGSGGGYGGGSGGGHSGGSGGGHSGGSGGNYGGGSGSGGGSGGGYGGGSGSRGGSGGSHGGGSGFGGESGGSYGGGEEASGSGGGYGGGSGKSSHS

SEQ ID NO: 4661 - DNA, 1872 bp, Artificial Sequence
  derived and/or modified sequence
atgtcatgtcgccagtttagctcttcttaccttagcagatccggcggcggggggggcggaggtctcggaagcgggggctctatcagaagtagttattctcgattcagcagttccggcggtggcgggggtggcggtcgcttctcctccagctctggatatgggggcggaagttctagggtatgtgggcggggcggcggggggtcttttggctatagttacggggggggctcagggggtggctttagtgcaagctcgcttggcgggggattcgggggaggttccagagggttcgggggggcctccggaggtggatatagtagctccggtggctttggcgggggtttcggcggtggaagcggaggagggtttggtggtgggtatggctccgggttcggcgggtttggcggcttcggtggaggagccggcggaggggatggaggcatcctgactgcaaacgaaaagtcaacaatgcaagagttaaactcgcgacttgccagttatctggataaggtgcaagccctcgaagaagcgaataacgatctcgaaaataaaattcaggactggtatgacaaaaagggccccgctgccattcagaagaactactcaccatattataataccattgacgatctgaaggatcagatcgtggacctaacagtgggcaataataagacactgcttgatatagataatactagaatgacattggacgatttccgcattaaatttgagatggagcaaaatctccggcaaggggtcgatgccgacatcaatggtctcagacaagtgctggacaacttaacaatggagaaaagtgacctggagatgcagtacgagactcttcaggaagagcttatggcattgaagaaaaaccacaaggaagagatgagtcagctcactggacagaacagcggtgatgtaaatgtggaaattaacgtcgctccgggcaaggatctaactaagacattgaatgacatgaggcaggaatatgaacaacttatcgcaaagaacagaaaggacatagagaaccagtacgaaacccagattacccagattgagcatgaggtctcctccagtgggcaggaagtgcagagcagtgcaaaagaggttacacagctgcggcacggtgtgcaagaactggaaattgagttacaatcccagttaagtaagaaggctgcccttgagaagagcttggaagacactaagaatcgctattgtggacagctccaaatgattcaggagcaaatttccaatctggaggcccaaatcacagacgtgaggcaggaaatagaatgtcaaaatcaggaatattcgctgctgttgtcaatcaaaatgcggctcgagaaagagattgagacctatcataacctgttagaaggcggacaggaagactttgagtctagcggcgccggcaagataggacttggtggacgagggggaagcggaggaagctacggtagagggtccaggggggggtctggcggcagttacggtggtggtggctctggcggcggctacggcgggggatccggcagcaggggagggagtggcggtagttacgggggaggctctgggagcggcgggggctcgggaggaggctacggaggagggtcaggtgggggacattccgggggatccggtggcggccatagtggtgggtctggcggcaattatgggggcggatcaggaagtggtggcgggtcaggcggaggatatggtggcggatcaggatcccgcggtggcagtggagggtcccatgggggaggaagcggttttgggggcgagtccggcggatcgtacgggggcggcgaggaagcaagcgggagcggggggggatacggaggcgggtctggtaaaagcagccacagttag

SEQ ID NO: 4662 - DNA, 2287 bp, Artificial Sequence
  derived and/or modified sequence
ccctgcacttgggagccggtagcactcctatcactgcttctcaacccgtgagctaccagctgtgtcatgagctgcagacagttctcctcgtcctacttgagccgcagcggcgggggtggcgggggcggcctgggcagcgggggcagcataaggtcttcctacagccgcttcagctcctcagggggcggtggaggagggggccgattcagctcttctagtggctatggtgggggaagctctcgtgtctgtgggaggggaggcggtggcagttttggctacagctacggcggaggatctgggggtggttttagtgccagtagtttaggcggtggctttgggggtggttccagaggttttggtggtgcttctggaggaggctatagtagttctgggggttttggaggtggctttggtggtggttctggaggtggctttggtggtggctatgggagtgggtttggggggtttgggggctttggaggtggtgctggaggaggtgatggtggtattctgactgctaatgagaagagcaccatgcaggaactcaattctcggctggcctcttacttggataaggtgcaggctctagaggaggccaacaacgacctggagaataagatccaggattggtacgacaagaagggacctgctgctatccagaagaactactccccttattataacactattgatgatctcaaggaccagattgtggacctgacagtgggcaacaacaaaactctcctggacattgacaacactcgcatgacactggatgacttcaggataaagtttgagatggagcaaaacctgcggcaaggagtggatgctgacatcaatggcctgcggcaggtgctggacaatctgaccatggagaagtctgacctggagatgcagtatgagactctgcaggaggagctgatggccctcaagaagaatcataaggaggagatgagtcagctgactgggcagaacagtggagatgtcaatgtggagataaacgttgctcctggcaaagatctcaccaagaccctcaatgacatgcgtcaggagtatgagcagctcattgctaagaacagaaaggacatcgagaatcaatatgagactcagataacccagatcgagcatgaggtatccagtagtggtcaggaggtgcagtccagtgccaaggaggtgacccagctccggcacggtgtccaggagttggagattgagctgcagtctcagctcagcaagaaagcagctctggagaagagcttggaagacacgaagaaccgctactgtggccagctgcagatgatccaggagcagatcagtaacttggaggcccagatcactgacgtccggcaagagatcgagtgccagaatcaggaatacagccttctgctcagcattaagatgcggctggagaaggaaatcgagacctaccacaacctccttgagggaggccaggaagactttgaatcctccggagctggaaaaattggccttggaggtcgaggaggaagtggaggcagttatggaagaggatccaggggaggaagtggaggcagctatggtggaggaggaagtggaggtggctatggtggaggaagtgggtccaggggaggaagtggaggcagctacggtggaggaagtggttctggaggaggtagtggaggtggctatggtggaggaagtggaggtggccatagcggaggaagtggaggtggtcatagtggaggaagtgggggcaactatggaggaggaagtggctctggaggaggaagtgggggtggctatggtggaggaagtgggtccaggggaggaagtggaggcagccatggtggaggaagtggttttggaggtgaaagtggaggcagctacggaggcggtgaagaagcgagtggaagtggtggcggctacggaggaggaagcggaaaatcatcccattcctagtcttcttcctcaaaatctggtgaccaagatgagacaaaaggcttcctttcgcgatactagagcctctgtaaacttctcctgcccagccccagctgagcatccccagatgggcagactcccgatgaagcctgcttattggatcctgacatcaggaatagctggcaacaagcccctgtgcccgtttgggactgaactgacttggcatatgtgcctctggctttccattggcttccaaccctgcttggctttgatgccttcagggttggggagacagacctctttcctctctctggcctggggtgctctcacaccctgcacgatcttgactataataaagcttccctactgc

SEQ ID NO: 4663 - DNA, 1872 bp, Artificial Sequence
  derived and/or modified sequence
atgagctgccggcagttcagcagcagctacctgagccgcagcggcggcggcggcggcggcggcctgggcagcggcggcagcatccgcagcagctacagccgcttcagcagcagcggcggcggcggcggcggcggccgcttcagcagcagcagcggctatggaggcggcagcagccgggtgtgtggccggggcggcggcggcagctttggctacagctatggaggcggcagcggcggcggcttcagcgccagcagcctgggcggcggctttggaggcggcagccggggctttggaggagccagcggcggcggctacagcagcagcggcggctttggaggcggctttggaggcggcagcggcggcggctttggaggcggctacggcagcggctttggaggctttggaggctttggaggaggagctggaggaggagatggcggcatcctgacagccaatgagaagagcaccatgcaggagctgaacagccggctggccagctacctggacaaggtgcaggccctggaggaggccaacaatgacctggagaacaagatccaggactggtatgacaagaagggccctgctgccatccagaagaactacagcccctactacaacaccattgatgacctgaaggaccagatcgtggacctgactgtgggcaacaacaagaccctgctggacatcgacaacaccaggatgaccctggatgacttccgcatcaagtttgagatggagcagaacctgcggcagggcgtggatgctgacatcaatggcctgcggcaggtgctggacaacctgaccatggagaagagtgacctggagatgcagtatgagaccctgcaggaggagctgatggccctgaagaagaaccacaaggaggagatgagccagctgaccggccagaacagcggagatgtgaatgtggagatcaacgtggcccctgggaaggacctgaccaagaccctgaatgacatgaggcaggagtatgagcagctgattgccaagaacaggaaggacatcgagaaccagtatgagacccagatcacccagatcgagcacgaggtgagcagcagcggccaggaggtgcagagcagcgccaaggaggtgacccagctgcggcatggagtgcaggagctggagattgagctgcagagccagctgagcaagaaggccgccctggagaagagcctggaggacaccaagaaccgctactgcggccagctgcagatgatccaggagcagatcagcaacctggaggcccagatcacagatgtgcggcaggagattgagtgccagaaccaggagtacagcctgctgctgagcatcaagatgaggctggagaaggagattgagacctaccacaacctgctggagggcggccaggaggactttgagagcagcggggccggcaagattggcctgggcggccggggcggcagcggcggcagctatggccggggcagcagaggaggcagcggcggcagctatggaggcggcggcagcggcggcggctacggcggcggcagcggcagccggggcggcagcggcggcagctatggaggcggcagcggcagcggcggcggcagcggcggcggctacggcggcggcagcggcggcggccacagcggcggcagcggcggcggccacagcggcggcagcggcggcaactacggcggcggcagcggcagcggcggcggcagcggcggcggctacggcggcggcagcggcagccggggcggcagcggcggcagccacggcggcggcagcggctttggaggagagagcggcggcagctatggaggaggagaggaggccagcggcagcggcggcggctatggaggcggcagcggcaagagcagccacagctag

SEQ ID NO: 4664 - DNA, 1872 bp, Artificial Sequence
  derived and/or modified sequence
atgagctgccggcagttcagcagcagctacctgagccggagcggcggggggggcggtgggggcctaggatccgggggaagtattcggtcttcttatagtcggtttagctctagcgggggcggcggcgggggcggtcggtttagttcaagctcggggtatggaggaggaagttccagggtctgtgggcgggggggcggcggatctttcgggtatagttatggaggaggctctggcggcggcttctcagcatcctccctcggaggagggttcggaggcggcagtcgaggattcggaggtgcctcaggcggaggatacagcagttccggaggcttcggaggcggattcggggggggaagtggaggtgggtttggaggcggttatggaagtgggtttggaggtttcggaggattcggcggaggcgcgggtggaggcgatggtggaatcctaacagctaacgagaagagcacgatgcaagagctaaactcccggctggcttcgtatctggataaggttcaggccttggaagaagccaacaatgacctagagaacaagatacaggactggtatgataaaaaaggtccagccgccatacaaaagaattattccccctactacaacactatcgacgatctgaaggaccaaattgttgacctgactgtgggaaacaacaagacccttcttgacatcgacaacacccgcatgacactcgatgactttagaataaagttcgagatggagcagaacctgagacagggagtcgacgccgacatcaacgggctcaggcaagtcctagacaatctgaccatggaaaagtcagacctggagatgcagtacgaaaccctccaggaggagctgatggcactcaaaaagaaccacaaagaggagatgtcacaattgacagggcagaattccggagacgtgaatgtggaaatcaacgttgccccagggaaagacctgaccaagacactcaacgacatgcggcaggaatacgaacaactgattgctaagaatcgaaaggacatcgagaaccaatacgagacgcagattacacagattgagcacgaagtttcatccagcggacaggaggttcaatccagcgccaaggaagtcacccaactgaggcacggagtgcaagagctggagattgaactacagtcccagcttagcaaaaaggctgcacttgagaagagcttggaggacacaaagaatcgctattgcggtcagcttcagatgatccaggaacaaataagtaacctggaggctcaaatcaccgacgttcgtcaggagatcgaatgtcagaaccaggagtacagcctgttgctatccattaagatgcggttagagaaggaaattgagacctaccacaatttgctggaaggagggcaggaagactttgaatcatcgggcgccggaaagattggactcggaggaaggggcggctccggagggtcctacggcaggggcagcaggggtggttctggcggctcctatggcggcggcgggtcaggaggtggctatggcgggggttcgggaagtagagggggctcaggtggcagttacggaggtggttctgggtctggcgggggcagcggagggggatatggggggggcagcgggggtggccatagcggagggtctggtggcggtcactctggaggcagtgggggaaactacggcggtggcagtgggtccgggggcgggtcaggaggaggttacggcggaggctccggctccagggggggcagtgggggatctcatggcggcggctcaggctttggaggcgaatcgggggggtcgtacgggggcggagaggaagctagtggatcaggcggaggatacggagggggatctggaaagtcttcacacagttag

SEQ ID NO: 4665 - DNA, 1872 bp, Artificial Sequence
  derived and/or modified sequence
atgagctgtaggcagttctcttcttcatatctgtcaagatctggagggggtggaggtgggggtctcggctccggcggatccattcgaagcagctacagcagattttcgagttctggaggaggcggtggagggggtcggtttagctcatcctctggctacggaggaggttcaagtagggtgtgcggtaggggaggcggaggttcatttgggtattcctatggaggcggttcagggggaggatttagcgcatctagcttgggaggcggtttcgggggagggtccagaggcttcggcggagctagtggcggaggatactcgagtagcgggggttttggcggaggatttggcggaggtagcgggggaggctttgggggtgggtatggatcaggtttcggtgggttcggaggattcggcggtggtgcaggaggtggcgacggaggcattctgacggctaacgaaaaatctacaatgcaagaacttaatagccgccttgccagttatctggacaaggttcaggcccttgaagaggcaaataacgatctggaaaataaaattcaggattggtatgacaaaaaagggcctgcggctatccagaaaaactactccccatattacaacacgatcgacgatctgaaagaccagattgtggatttaaccgttggcaacaacaaaacgctgctcgatatagataatactagaatgactttggatgactttcggataaaattcgagatggagcaaaacctgcggcagggggtggatgctgacatcaacggcttgcggcaggtgctagacaacctgactatggaaaagagcgacctagaaatgcagtacgagacgctgcaagaggagctgatggctctgaagaaaaaccacaaggaagagatgtctcaattgactggacagaactccggggacgtgaatgtggagattaacgtagccccagggaaggatctcacaaagacgctgaatgatatgcgtcaagagtatgaacagctcatcgctaagaacagaaaggatattgaaaaccagtatgaaactcagatcacacagattgaacacgaagtgtctagttctgggcaggaggtgcagtccagtgccaaggaggttactcagttgagacacggagtccaggagctggagatcgaactgcagtctcagctgtctaagaaggccgctcttgaaaagagcttagaagatactaaaaatcgctactgcggccagctgcagatgatccaagaacagatatctaatctggaggcgcagattaccgacgtgcgtcaggagattgaatgccagaatcaggagtacagtctgcttcttagcattaagatgaggctggagaaagaaattgagacctaccataacctactagaggggggacaggaagactttgaatctagtggggctggtaaaattggcctgggtggtcggggtggttccggcggatcttacgggagggggagtcggggtgggtcaggaggttcttacggtgggggtgggtccgggggtggctatggcggagggtctgggtctcggggtggttcaggaggatcatatggtggcggaagcggaagcgggggaggcagtgggggtggctacggaggcggaagtggtggcggtcactcggggggatcggggggaggtcacagcggcggatctgggggaaactatgggggaggaagcggatcaggcggtggctccggaggcggatatggcggaggctccggcagtcgcggaggcagtgggggatcccacgggggaggtagtggcttcgggggtgaaagcggagggagctacggaggcggtgaagaggcttccggctccggagggggatacgggggaggcagcggaaagtcctcccatagctag

SEQ ID NO: 4666 - DNA, 1872 bp, Artificial Sequence
  derived and/or modified sequence
atgagctgcagacagttcagcagcagctacctgagcagaagcggcggcggcggcggcggcggcctgggcagcggcggcagcatcagaagcagctacagcagattcagcagcagcggcggcggcggcggcggcggcagattcagcagcagcagcggctacggcggcggcagcagcagagtgtgcggcagaggcggcggcggcagcttcggctacagctacggcggcggcagcggcggcggcttcagcgccagcagcctgggcggcggcttcggcggcggcagcagaggcttcggcggcgccagcggcggcggctacagcagcagcggcggcttcggcggcggcttcggcggcggcagcggcggcggcttcggcggcggctacggcagcggcttcggcggcttcggcggcttcggcggcggcgccggcggcggcgacggcggcatcctgaccgccaacgagaagagcaccatgcaggagctgaacagcagactggccagctacctggacaaggtgcaggccctggaggaggccaacaacgacctggagaacaagatccaggactggtacgacaagaagggccccgccgccatccagaagaactacagcccctactacaacaccatcgacgacctgaaggaccagatcgtggacctgaccgtgggcaacaacaagaccctgctggacatcgacaacaccagaatgaccctggacgacttcagaatcaagttcgagatggagcagaacctgagacagggcgtggacgccgacatcaacggcctgagacaggtgctggacaacctgaccatggagaagagcgacctggagatgcagtacgagaccctgcaggaggagctgatggccctgaagaagaaccacaaggaggagatgagccagctgaccggccagaacagcggcgacgtgaacgtggagatcaacgtggcccccggcaaggacctgaccaagaccctgaacgacatgagacaggagtacgagcagctgatcgccaagaacagaaaggacatcgagaaccagtacgagacccagatcacccagatcgagcacgaggtgagcagcagcggccaggaggtgcagagcagcgccaaggaggtgacccagctgagacacggcgtgcaggagctggagatcgagctgcagagccagctgagcaagaaggccgccctggagaagagcctggaggacaccaagaacagatactgcggccagctgcagatgatccaggagcagatcagcaacctggaggcccagatcaccgacgtgagacaggagatcgagtgccagaaccaggagtacagcctgctgctgagcatcaagatgagactggagaaggagatcgagacctaccacaacctgctggagggcggccaggaggacttcgagagcagcggcgccggcaagatcggcctgggcggcagaggcggcagcggcggcagctacggcagaggcagcagaggcggcagcggcggcagctacggcggcggcggcagcggcggcggctacggcggcggcagcggcagcagaggcggcagcggcggcagctacggcggcggcagcggcagcggcggcggcagcggcggcggctacggcggcggcagcggcggcggccacagcggcggcagcggcggcggccacagcggcggcagcggcggcaactacggcggcggcagcggcagcggcggcggcagcggcggcggctacggcggcggcagcggcagcagaggcggcagcggcggcagccacggcggcggcagcggcttcggcggcgagagcggcggcagctacggcggcggcgaggaggccagcggcagcggcggcggctacggcggcggcagcggcaagagcagccacagctag

SEQ ID NO: 4667 - protein, 1724 aa, Artificial Sequence
  derived and/or modified sequence
MPPAVRRSACSMGWLWIFGAALGQCLGYSSQQQRVPFLQPPGQSQLQASYVEFRPSQGCSPGYYRDHKGLYTGRCVPCNCNGHSNQCQDGSGICVNCQHNTAGEHCERCQEGYYGNAVHGSCRACPCPHTNSFATGCVVNGGDVRCSCKAGYTGTQCERCAPGYFGNPQKFGGSCQPCSCNSNGQLGSCHPLTGDCINQEPKDSSPAEECDDCDSCVMTLLNDLATMGEQLRLVKSQLQGLSASAGLLEQMRHMETQAKDLRNQLLNYRSAISNHGSKIEGLERELTDLNQEFETLQEKAQVNSRKAQTLNNNVNRATQSAKELDVKIKNVIRNVHILLKQISGTDGEGNNVPSGDFSREWAEAQRMMRELRNRNFGKHLREAEADKRESQLLLNRIRTWQKTHQGENNGLANSIRDSLNEYEAKLSDLRARLQEAAAQAKQANGLNQENERALGAIQRQVKEINSLQSDFTKYLTTADSSLLQTNIALQLMEKSQKEYEKLAASLNEARQELSDKVRELSRSAGKTSLVEEAEKHARSLQELAKQLEEIKRNASGDELVRCAVDAATAYENILNAIKAAEDAANRAASASESALQTVIKEDLPRKAKTLSSNSDKLLNEAKMTQKKLKQEVSPALNNLQQTLNIVTVQKEVIDTNLTTLRDGLHGIQRGDIDAMISSAKSMVRKANDITDEVLDGLNPIQTDVERIKDTYGRTQNEDFKKALTDADNSVNKLTNKLPDLWRKIESINQQLLPLGNISDNMDRIRELIQQARDAASKVAVPMRFNGKSGVEVRLPNDLEDLKGYTSLSLFLQRPNSRENGGTENMFVMYLGNKDASRDYIGMAVVDGQLTCVYNLGDREAELQVDQILTKSETKEAVMDRVKFQRIYQFARLNYTKGATSSKPETPGVYDMDGRNSNTLLNLDPENVVFYVGGYPPDFKLPSRLSFPPYKGCIELDDLNENVLSLYNFKKTFNLNTTEVEPCRRRKEESDKNYFEGTGYARVPTQPHAPIPTFGQTIQTTVDRGLLFFAENGDRFISLNIEDGKLMVRYKLNSELPKERGVGDAINNGRDHSIQIKIGKLQKRMWINVDVQNTIIDGEVFDFSTYYLGGIPIAIRERFNISTPAFRGCMKNLKKTSGVVRLNDTVGVTKKCSEDWKLVRSASFSRGGQLSFTDLGLPPTDHLQASFGFQTFQPSGILLDHQTWTRNLQVTLEDGYIELSTSDSGSPIFKSPQTYMDGLLHYVSVISDNSGLRLLIDDQLLRNSKRLKHISSSRQSLRLGGSNFEGCISNVFVQRLSLSPEVLDLTSNSLKRDVSLGGCSLNKPPFLMLLKGSTRFNKTKTFRINQLLQDTPVASPRSVKVWQDACSPLPKTQANHGALQFGDIPTSHLLFKLPQELLKPRSQFAVDMQTTSSRGLVFHTGTKNSFMALYLSKGRLVFALGTDGKKLRIKSKEKCNDGKWHTVVFGHDGEKGRLVVDGLRAREGSLPGNSTISIRAPVYLGSPPSGKPKSLPTNSFVGCLKNFQLDSKPLYTPSSSFGVSSCLGGPLEKGIYFSEEGGHVVLAHSVLLGPEFKLVFSIRPRSLTGILIHIGSQPGKHLCVYLEAGKVTASMDSGAGGTSTSVTPKQSLCDGQWHSVAVTIKQHILHLELDTDSSYTAGQIPFPPASTQEPLHLGGAPANLTTLRIPVWKSFFGCLRNIHVNHIPVPVTEALEVQGPVSLNGCPDQ

SEQ ID NO: 4668 - DNA, 5175 bp, Artificial Sequence
  derived and/or modified sequence
atgccacccgctgtcagaagaagcgcttgtagtatggggtggttgtggattttcggcgccgcactgggtcagtgcctgggatacagcagccagcagcagagagtgccattcttgcagcctcccgggcagagtcagctccaagcatcttacgtcgagttcagaccgtctcaggggtgcagccccggctactatcgggaccacaagggcctgtacaccggccggtgcgtaccttgtaattgtaatggccactcaaaccagtgtcaggatggttctgggatttgtgttaactgtcagcacaacactgctggcgaacattgtgaaaggtgtcaggaaggttactatggaaatgccgtgcatggttcgtgtagagcgtgcccctgcccgcacaccaactcatttgcgaccgggtgtgtggttaatggcggagatgtccgatgctcttgcaaggcgggctatacgggcacacagtgcgaaaggtgcgcaccaggttatttcggtaacccccagaagttcggaggttcgtgccagccatgctcctgtaactctaacggtcagctgggctcatgtcatcctcttactggggactgtatcaaccaggagcccaaggatagtagtcctgccgaggaatgcgatgactgtgacagttgtgttatgactcttctgaacgacttagcaacaatgggcgaacagctgcgcctggtgaaaagtcagctgcaggggctgtccgcctccgccggccttctggaacagatgagacacatggaaacccaagcaaaagacctaaggaaccaactgctgaattaccggagcgctattagtaatcatggctcaaagattgagggattagaacgagagctgactgatctgaatcaggaattcgagactcttcaagagaaggctcaggtgaactctcgcaaagcacagactcttaataataatgtcaatcgtgcaacccagagtgctaaggaacttgatgttaagatcaagaatgtgatccgaaatgtccacatactcctgaagcagatctccgggaccgatggggagggcaataacgttccatccggtgacttttcaagggagtgggctgaggcgcagcgaatgatgcgagagctgcgtaatcgtaacttcgggaagcaccttcgggaagccgaggcagacaagcgggaaagtcagctactgctgaaccggatacgcacttggcagaagacccaccagggagaaaacaatgggctggccaattcaatcagggactcgttgaatgagtacgaggctaagctctccgacctgcgagcaaggctacaggaggccgcagcccaggcgaaacaagccaacggcctaaatcaggagaatgagcgggccctcggcgcaatccagagacaggtcaaggagatcaatagcctccaaagcgacttcacaaagtatctgaccacggcagatagttctttactgcagacaaatattgctctacagcttatggagaagtcgcagaaggaatatgagaagctggcagcaagcctcaatgaagctcgtcaggaactgtccgacaaggttcgggagctgagccggtccgctggtaaaaccagcctggtggaggaggctgagaaacacgcgaggagtctgcaggaactggctaaacaacttgaagagatcaagaggaatgcttccggcgacgagctggtcaggtgcgcagttgatgctgctacagcttacgagaacatcctgaatgcaatcaaagccgctgaggatgcagccaatcgcgccgcctctgccagtgaatctgcacttcagacagtaatcaaggaggatctgccccgaaaagctaagactctgagttctaattccgacaagcttcttaacgaggccaaaatgactcagaagaagcttaagcaagaggtttcaccagccctcaacaacctgcagcaaactctcaatatcgttacagttcagaaagaggttatagatactaacttaactacactgcgggatggactccatggcatccaaaggggcgacatagacgccatgatcagcagcgccaagagcatggtgagaaaagcaaacgatatcacggacgaggtattagacgggctgaatcccattcagacagacgttgagcgcatcaaggacacatatgggcggacacaaaacgaggatttcaagaaggccttgaccgatgcggacaattccgtcaataaactcactaacaaactgccagatctgtggagaaagatcgagtcaattaatcagcagttgttgccgctcggcaacatttctgacaatatggatcgcatccgcgaactgatccagcaggccagagatgcagctagcaaggttgcagtgcccatgaggttcaatggcaagtctggcgtagaagtgagactgccaaacgacctggaggatctcaaagggtatacaagcctgagcctgtttctgcagcggccaaatagtagggagaatggtgggaccgagaacatgttcgttatgtaccttggcaacaaggacgctagcagagattacattggaatggcggtggtagacggccagctgacctgcgtgtataacctgggagatagggaggccgagctccaggtggatcagattctgaccaagtcagagacaaaagaagctgttatggatcgcgtgaagttccagcgtatataccagtttgccaggcttaattataccaagggggccacatcatctaaacccgagactcctggcgtgtatgatatggacggccggaactcaaatacgttgctcaacttggatcccgaaaatgtggtcttttacgtcgggggatacccccccgacttcaagctacccagcaggctttcctttcccccctataagggatgtatagaactggatgacttgaacgagaatgttctgtccctgtacaattttaagaagacattcaacctgaacacaaccgaggtggaaccctgccgccggaggaaagaagaatccgacaaaaattatttcgaagggaccggatatgctagggttccaactcagccacacgcccctattcccactttcggacaaaccattcagactacagtcgaccgcggcctgctgttctttgctgagaatggggacaggttcatcagcttgaacattgaagatggcaagctaatggtgcgctataaactcaacagtgaactcccaaaggagcggggagtgggtgacgctatcaataacggccgagatcatagcatccaaattaaaatcgggaagctccagaaaagaatgtggataaatgtagatgtgcagaatacaatcatcgacggagaagtcttcgactttagtacatattacctgggcggcatccccatcgccatcagagagcgctttaacatctccactcctgctttccgcggttgcatgaagaatttgaaaaagacttccggcgttgtgaggctgaatgatactgtgggagttacgaagaagtgttccgaggactggaaactggtgaggtcggctagctttagcaggggaggccagctctcttttaccgacctcggcctgcctccgaccgatcatcttcaggcaagcttcggttttcagacattccagccttctggcatattgctggatcatcaaacatggacccgaaacctccaggtgacgttggaagatggatatatcgagttatccacttctgattcaggctccccgattttcaagagcccccagacttatatggacggactcctccactatgtaagcgtcatatcagacaattctgggttacgcctgctgatcgacgaccaattactccgcaattccaagcgccttaaacacattagtagttccaggcagagcttgcggcttggaggcagtaattttgagggatgtatctcaaacgtgtttgtccagcgcttgagcctatctccagaagtgctggacctcaccagcaacagtctcaaacgggatgtgagcctcggtggatgttcactgaacaagcccccgttccttatgctcctgaagggcagtactcgcttcaataaaacaaagactttccgaatcaaccagctcctccaggataccccggtggcaagcccacggtccgtaaaagtgtggcaggacgcctgttccccgttaccaaagacccaggctaatcatggcgcacttcagtttggcgatattcccacatcacacctcttattcaaattgccacaggagctccttaagcctcgcagtcagttcgcagtggacatgcagactactagtagtcggggccttgttttccataccggcaccaagaatagttttatggccttgtatctgtccaaggggaggttggttttcgcactgggaacagacgggaagaaactgagaatcaagtctaaggagaagtgtaatgacgggaagtggcatacagtggttttcggtcatgacggtgagaagggacggctagtcgttgacggtctgcgagcccgggaaggctccctcccaggtaactcaactatcagcatacgggcacctgtgtacttaggttcacctccttctggcaagcccaaatccttgcctacaaattcgttcgtgggatgcttaaaaaacttccaactcgactctaaacctctgtatacgccctccagtagcttcggagtaagcagttgtctcgggggcccattggaaaagggtatctacttctccgaagagggggggcacgttgtcttggcccactccgttctcctcggaccagaatttaagctcgtgttttcaatccgccccaggtcactgacagggatcctgattcacattggctcccagccggggaaacacctctgcgtgtatttggaggctggaaaggttactgcaagtatggacagcggcgcaggagggacatcgacttccgtcaccccaaaacagagtctctgcgatggacagtggcactcggttgccgtaactatcaagcagcacatcctccaccttgaattggatactgattcctcatatacagcgggacagattccatttcctcccgcttcaactcaggaacctctacacctcggtggcgcccctgcaaatttgaccacactgaggataccagtctggaagagtttcttcggatgtctcaggaatattcatgtcaaccacatcccagtgcctgtaactgaagccctcgaagttcagggtcctgtctctctgaacggctgcccggatcagtag

SEQ ID NO: 4669 - DNA, 5175 bp, Artificial Sequence
  derived and/or modified sequence
atgcctccagcagtgaggcggtcagcctgcagcatgggatggctgtggatctttggggcagccctggggcagtgtctgggctacagttcacagcagcaaagggtgccatttcttcagcctcccggtcaaagtcaactgcaagcgagttatgtggagtttagacccagccagggttgtagccctggatactatcgggatcataaaggcttgtataccggacggtgtgttccctgcaattgcaacggacattcaaatcaatgccaggatggctcaggcatatgtgttaactgtcagcacaacaccgcgggagagcactgtgaacgctgccaggagggctactatggcaacgccgtccacggatcctgcagggcctgcccatgtcctcacactaacagctttgccactggctgtgtggtgaatgggggagacgtgcggtgctcctgcaaagctgggtacacaggaacacagtgtgaaaggtgtgcaccgggatatttcgggaatccccagaaattcggaggtagctgccaaccatgcagttgtaacagcaatggccagctgggcagctgtcatcccctgactggagactgcataaaccaagaacccaaagatagcagccctgcagaagaatgtgatgattgcgacagctgtgtgatgaccctcctgaacgacctggccaccatgggcgagcagctccgcctggtcaagtctcagctgcagggcctgagtgccagcgcagggcttctggagcagatgaggcacatggagacccaggccaaggacctgaggaatcagttgctcaactaccgttctgccatttcaaatcatggatcaaaaatagaaggcctggaaagagaactgactgatttgaatcaagaatttgagactttgcaagaaaaggctcaagtaaattccagaaaagcacaaacattaaacaacaatgttaatcgggcaacacaaagcgcaaaagaactggatgtgaagattaaaaatgtcatccggaatgtgcacattcttttaaagcagatctctgggacagatggagagggaaacaacgtgccttcaggtgacttttccagagagtgggctgaagcccagcgcatgatgagggaactgcggaacaggaactttggaaagcacctcagagaagcagaagctgataaaagggagtcgcagctcttgctgaaccggataaggacctggcagaaaacccaccagggggagaacaatgggcttgctaacagtatccgggattctttaaatgaatacgaagccaaactcagtgaccttcgtgctcggctgcaggaggcagctgcccaagccaagcaggcaaatggcttgaaccaagaaaacgagagagctttgggagccattcagagacaagtgaaagaaataaattccctgcagagtgatttcaccaagtatctaaccactgcagactcatctttgttgcaaaccaacattgcgctgcagctgatggagaaaagccagaaggaatatgaaaaattagctgccagtttaaatgaagcaagacaagaactaagtgacaaagtaagagaactttccagatctgctggcaaaacatcccttgtggaggaggcagaaaagcacgcgcggtccttacaagagctggcaaagcagctggaagagatcaagagaaacgccagcggggatgagctggtgcgctgtgctgtggatgccgccaccgcctacgagaacatcctcaatgccatcaaagcggccgaggacgcagccaacagggctgccagtgcatctgaatctgccctccagacagtgataaaggaagatctgccaagaaaagctaaaaccctgagttccaacagtgataaactgttaaatgaagccaagatgacacaaaagaagctaaagcaagaagtcagtccagctctcaacaacctacagcaaaccctgaatattgtgacagttcagaaagaagtgatagacaccaatctcacaactctccgagatggtcttcatgggatacagagaggtgatattgatgctatgatcagtagtgcaaagagcatggtcagaaaggccaacgacatcacagatgaggttctggatgggctcaaccccatccagacagatgtggaaagaattaaggacacctatgggaggacacagaacgaagacttcaaaaaggctctgactgatgcagataactcggtgaataagttaaccaacaaactacctgatctttggcgcaagattgaaagtatcaaccaacagctgttgcccttgggaaacatctctgacaacatggacagaatacgagaactaattcagcaggccagagatgctgccagtaaggttgctgtccccatgaggttcaatggtaaatctggagtcgaagtccgactgccaaatgacctggaagatttgaaaggatatacatctctgtccttgtttctccaaaggcccaactcaagagaaaatgggggtactgagaatatgtttgtgatgtaccttggaaataaagatgcctcccgggactacatcggcatggcagttgtggatggccagctcacctgtgtctacaacctgggggaccgtgaggctgaactccaagtggaccagatcttgaccaagagtgagactaaggaggcagttatggatcgggtgaaatttcagagaatttatcagtttgcaaggcttaattacaccaaaggagccacatccagtaaaccagaaacacccggagtctatgacatggatggtagaaatagcaatacactccttaatttggatcctgaaaatgttgtattttatgttggaggttacccacctgattttaaacttcccagtcgactaagtttccctccatacaaaggttgtattgaattagatgacctcaatgaaaatgttctgagcttgtacaacttcaaaaaaacattcaatctcaacacaactgaagtggagccttgtagaaggaggaaggaagagtcagacaaaaattattttgaaggtacgggctatgctcgagttccaactcaaccacatgctcccatcccaacctttggacagacaattcagaccaccgtggatagaggcttgctgttctttgcagaaaacggggatcgcttcatatctctaaatatagaagatggcaagctcatggtgagatacaaactgaattcagagctaccaaaagagagaggagttggagacgccataaacaacggcagagaccattcgattcagatcaaaattggaaaactccaaaagcgtatgtggataaatgtggacgttcaaaacactataattgatggtgaagtatttgatttcagcacatattatctgggaggaattccaattgcaatcagggaaagatttaacatttctacgcctgctttccgaggctgcatgaaaaatttgaagaaaaccagtggtgtcgttagattgaatgatactgtgggagtaaccaaaaagtgctcggaagactggaagcttgtgcgatctgcctcattctccagaggaggacaattgagtttcactgatttgggcttaccacctactgaccacctccaggcctcatttggatttcagacctttcaacccagtggcatattattagatcatcagacatggacaaggaacctgcaggtcactctggaagatggttacattgaattgagcaccagcgatagcggcagcccaatttttaaatctccacagacgtatatggatggtttactgcattatgtatctgtaataagcgacaactctggactacggcttctcatcgatgaccagcttctgagaaatagcaaaaggctaaaacacatttcaagttcccggcagtctctgcgtctgggcgggagcaattttgagggttgtattagcaatgtttttgtccagaggttatcactgagtcctgaagtcctagatttgaccagtaactctctcaagagagatgtgtccctgggaggctgcagtttaaacaaaccaccttttctaatgttgcttaaaggttctaccaggtttaacaagaccaagacttttcgtatcaaccagctgttgcaggacacaccagtggcctccccaaggagcgtgaaggtgtggcaagatgcttgctcaccacttcccaagacccaggccaatcatggagccctccagtttggggacattcccaccagccacttgctattcaagcttcctcaggagctgctgaaacccaggtcacagtttgctgtggacatgcagacaacatcctccagaggactggtgtttcacacgggcactaagaactcctttatggctctttatctttcaaaaggacgtctggtctttgcactggggacagatgggaaaaaattgaggatcaaaagcaaggagaaatgcaatgatgggaaatggcacacggtggtgtttggccatgatggggaaaaggggcgcttggttgtggatggactgagggcccgggagggaagtttgcctggaaactccaccatcagcatcagagcgccagtttacctgggatcacctccatcagggaaaccaaagagcctccccacaaacagctttgtgggatgcctgaagaactttcagctggattcaaaacccttgtataccccttcttcaagcttcggggtgtcttcctgcttgggtggtcctttggagaaaggcatttatttctctgaagaaggaggtcatgtcgtcttggctcactctgtattgttggggccagaatttaagcttgttttcagcatccgcccaagaagtctcactgggatcctaatacacatcggaagtcagcccgggaagcacttatgtgtttacctggaggcaggaaaggtcacggcctctatggacagtggggcaggtgggacctcaacgtcggtcacaccaaagcagtctctgtgtgatggacagtggcactcggtggcagtcaccataaaacaacacatcctgcacctggaactggacacagacagtagctacacagctggacagatccccttcccacctgccagcactcaagagccactacaccttggaggtgctccagccaatttgacgacactgaggatccctgtgtggaaatcattctttggctgtctgaggaatattcatgtcaatcacatccctgtccctgtcactgaagccttggaagtccaggggcctgtcagtctgaatggttgtcctgaccagtaa

SEQ ID NO: 4670 - DNA, 5175 bp, Artificial Sequence
  derived and/or modified sequence
atgcccccagctgtgcggcgcagcgcctgcagcatgggctggctgtggatctttggagctgccctgggccagtgcctgggctacagcagccagcagcagagggtgcccttcctgcagcccccaggccagagccagctgcaggccagctatgtggagttccggcccagccagggctgcagccctggctactacagagaccacaagggcctgtacacaggccgctgtgtgccctgcaactgcaatggccacagcaaccagtgccaggacggcagcggcatctgtgtgaactgccagcacaacacagctggggagcactgtgagcgctgccaggagggctactatggaaatgctgtgcacggcagctgccgggcctgcccctgcccccacaccaacagctttgccaccggctgtgtggtgaatggaggagatgtgcgctgcagctgcaaggccggctacacaggcacccagtgtgagcgctgtgcccctggctactttggaaacccccagaagtttggaggcagctgccagccctgcagctgcaacagcaatggccagctgggcagctgccaccccctgactggagactgcatcaaccaggagcccaaggacagcagccctgcagaagaatgtgatgactgtgacagctgtgtgatgaccctgctgaatgacctggccaccatgggagagcagctgcggctggtgaagagccagctgcagggcctgagcgccagcgctggcctgctggagcagatgaggcacatggagacccaggccaaggacctgaggaaccagctgctgaactaccgcagcgccatcagcaaccacggcagcaagattgagggcctggagcgggagctgacagacctgaaccaggagtttgagaccctgcaggagaaggcccaggtgaacagcaggaaggcccagaccctgaacaacaacgtgaacagagccacccagagcgccaaggagctggatgtgaagatcaagaatgtcatcagaaatgtgcacatcctgctgaagcagatctctggaacagatggagagggcaacaacgtgcccagcggggacttcagccgggagtgggccgaggcccagaggatgatgagggagctgaggaacagaaactttgggaagcacctgcgggaggccgaggccgacaagcgggagagccagctgctgctgaaccgcatccgcacctggcagaagacccaccagggagaaaataatggcctggccaacagcatccgggacagcctgaatgaatatgaggccaagctgagtgacctgcgggcccggctgcaggaggccgccgcccaggccaagcaggccaacggcctgaaccaggagaatgaaagagccctgggcgccatccagaggcaggtgaaggagatcaacagcctgcagagcgacttcaccaagtacctgaccacagctgacagcagcctgctgcagaccaacatcgccctgcagctgatggagaagagccagaaggagtatgagaagctggccgccagcctgaatgaggcccggcaggagctgagtgacaaggtgcgggagctgagccgctctgctgggaagaccagcctggtggaggaggccgagaagcacgcccggagcctgcaggagctggccaagcagctggaggagatcaagagaaatgccagcggagatgagctggtgcgctgtgctgtggatgctgccacagcctatgagaacatcctgaatgccatcaaggccgcagaagatgctgccaacagagctgccagcgccagcgagagcgccctgcagaccgtcatcaaggaggacctgcccaggaaggccaagaccctgagcagcaacagcgacaagctgctgaatgaggccaagatgacccagaagaagctgaagcaggaggtgtccccagccctgaacaacctgcagcagaccctgaacatcgtgacagtgcagaaggaggtgattgacaccaacctgaccaccctgagagatggcctgcacggcatccagagaggagacattgatgccatgatcagcagcgccaagtccatggtgaggaaggccaatgacatcacagatgaggtgctggatggcctgaaccccatccagacagatgtggagcgcatcaaggacacctacggccgcacccagaatgaagacttcaagaaggccctgacagatgctgacaacagcgtgaacaagctgaccaacaagctgcctgacctgtggaggaagattgagagcatcaaccagcagctgctgcccctgggcaacatcagtgacaacatggaccgcatccgggagctgatccagcaggccagagatgctgccagcaaggtggccgtgcccatgaggttcaacgggaagagcggcgtggaggtgcggctgcccaatgacctggaggacctgaagggctacaccagcctgagcctcttcctgcagaggcccaacagccgggagaatggaggaacagagaacatgtttgtgatgtacctgggcaacaaggatgccagccgggactacatcggcatggctgtggtggatggccagctgacctgtgtgtacaacctgggggaccgggaggccgagctgcaggtggaccagatcctgaccaagtctgagaccaaggaggccgtgatggacagagtgaagttccagaggatctaccagtttgcccggctgaactacaccaagggggccaccagcagcaagccagagaccccaggagtgtatgacatggatggcaggaacagcaacaccctgctgaacctggaccctgaaaatgtggtgttctacgtgggcggctaccccccagacttcaagctgcccagccggctgtccttccccccctacaagggctgcatcgagctggatgacctgaatgaaaatgtgctgagcctgtacaacttcaagaagaccttcaacctgaacaccacagaggtggagccctgcagaagaaggaaggaggagagtgacaagaactactttgagggcaccggctacgcccgggtgcccacccagccccacgcccccatccccaccttcggccagaccatccagaccaccgtggaccggggcctgctcttctttgctgaaaatggagaccgcttcatcagcctgaacattgaagatggcaagctgatggtgcgctacaagctgaacagcgagctgcccaaggagcggggcgtgggagatgccatcaacaacggccgggaccacagcatccagatcaagattggcaagctgcagaagaggatgtggatcaacgtggatgtgcagaacaccatcattgatggagaggtgtttgacttcagcacctactacctgggcggcatccccatcgccatccgggagcgcttcaacatcagcaccccagccttccggggctgcatgaagaacctgaagaagaccagcggcgtggtgcggctgaatgacacagtgggcgtgaccaagaagtgcagcgaggactggaagctggtgcgcagcgccagcttcagccggggcggccagctgtccttcacagacctgggcctgcccccaacagaccacctgcaggccagctttggcttccagaccttccagcccagcggcatcctgctggaccaccagacctggaccaggaacctgcaggtgaccctggaggatggctacatcgagctgagcaccagtgacagcggcagccccatcttcaagagcccccagacctacatggatggcctgctgcactacgtgtctgtcatcagtgacaacagcggcctgcggctgctgattgatgaccagctgctgaggaacagcaagaggctgaagcacatcagcagcagccggcagagcctgcggctgggcggcagcaactttgagggctgcatcagcaatgtgtttgtgcagaggctgagcctgagccctgaggtgctggacctgaccagcaacagcctgaagagagatgtgtccctgggcggctgcagcctgaacaagccacccttcctgatgctgctgaagggcagcacccgcttcaacaagaccaagaccttccgcatcaaccagctgctgcaggacacccctgtggccagccccaggtctgtgaaggtgtggcaggatgcctgcagccccctgcccaagacccaggccaaccacggggccctgcagtttggagacatccccaccagccacctgctcttcaagctgccccaggagctgctgaagcccaggagccagtttgctgtggacatgcagaccaccagcagccggggcctggtgttccacacaggcaccaagaacagcttcatggccctgtacctgagcaagggccgcctggtgtttgccctgggcacagatggcaagaagctgcgcatcaagagcaaggagaagtgcaatgatggcaagtggcacacagtggtgtttggacatgatggagagaagggccgcctggtggtggatggcctgcgggcccgggagggcagcctgcccggcaacagcaccatcagcatccgggcccctgtgtacctgggcagcccccccagcggcaagcccaagagcctgcccaccaacagctttgtgggctgcctgaagaacttccagctggacagcaagcccctgtacacccccagcagcagctttggagtgagcagctgcctgggcggccccctggagaagggcatctacttcagcgaggagggcggccacgtggtgctggcccacagcgtgctgctgggccctgagttcaagctggtgttcagcatccggcccaggagcctgaccggcatcctgatccacatcggcagccagcccgggaagcacctgtgtgtgtacctggaggccggcaaggtgacagcctccatggacagcggggccggcggcaccagcacctctgtgacccccaagcagagcctgtgtgatggccagtggcacagcgtggccgtgaccatcaagcagcacatcctgcacctggagctggacacagacagcagctacacagctggccagatccccttccccccagccagcacccaggagcccctgcacctgggcggggccccagccaacctgaccaccctgcgcatccctgtgtggaagagcttcttcggctgcctgaggaacatccacgtgaaccacatccctgtgcctgtgacagaggccctggaggtgcagggccctgtgtccctgaatggctgcccagaccagtag

SEQ ID NO: 4671 - DNA, 5175 bp, Artificial Sequence
  derived and/or modified sequence
atgccccccgccgtgcggcggagcgcctgcagcatgggctggctgtggatatttggagcagccttgggtcagtgtctggggtattcgagccagcagcagcgggtgccattccttcagccccccggccagagccagctgcaggcctcttacgtggagtttcgacccagccaaggatgtagcccaggttactaccgggatcacaaaggcctatataccggcagatgcgtaccatgcaactgcaatggacattccaaccaatgtcaggatggatcggggatctgtgtgaattgtcagcataataccgctggcgagcactgtgagagatgccaggagggctactacggcaatgccgtgcacggatcttgtagggcctgcccttgccctcacactaacagtttcgctactggctgcgtcgttaacgggggagatgtgcgctgctcatgcaaggcaggatacaccggcacacagtgcgagcggtgcgctcccggttacttcggcaacccccaaaaattcggtggaagctgccagccctgctcgtgtaacagcaatggccagctgggtagctgtcaccctctgaccggggactgcatcaaccaggaacctaaagactcgagccctgccgaggagtgtgatgactgcgactcctgcgtgatgaccctactcaatgacttggcaacaatgggcgaacagcttcggctggtcaaaagccagctccagggactctcggcttcagcggggctcctggaacagatgcgacatatggagactcaagcgaaagacttaagaaatcagttgctgaactatagaagcgcaatctcaaatcatggatccaagatagagggcctcgaacgggaattgacggatttgaatcaagaatttgagaccctccaggagaaagcgcaggtaaactccagaaaggctcaaactcttaacaacaacgtgaatagggccacccagtcagcaaaagaactggatgttaagattaagaatgttatcagaaacgtgcacatcctgctgaaacagatctctggaactgacggtgaaggaaataatgtcccatccggtgattttagccgggagtgggcggaagcgcagcggatgatgagggaactcaggaatcgaaatttcggcaaacatctgcgggaagccgaggcagataagcgcgagtcccagctcctgctaaatagaatccgcacttggcagaaaacacaccaaggtgaaaacaatggacttgcaaatagcatccgagattcactgaatgaatatgaagcgaagctctccgaccttagagcaaggctgcaggaggcagccgcccaggccaaacaggctaacggcctaaaccaggagaacgagcgagccttaggagccattcagagacaggtgaaagagataaactccctgcagagcgattttacaaagtacttaaccaccgccgactcgagcttgctccagacaaatatcgctcttcaacttatggagaaatcccagaaggagtacgagaagcttgccgcttccctcaatgaagcccgtcaagaactgtctgacaaagtgcgggagctcagtagaagtgccggcaaaacttcgttggtggaagaagccgagaagcatgctcggagcttgcaggagcttgctaagcaacttgaggagattaaacgtaatgcaagcggggacgagctagtcagatgtgccgtggatgctgcaacggcctatgaaaatatcctgaatgcgatcaaagcagcagaggacgctgccaatcgcgctgcatctgcctcggaaagcgctctgcaaactgtcatcaaggaggatttgcctaggaaagctaaaaccctgtccagcaatagcgacaaactactcaacgaagccaagatgacccagaagaaactgaagcaagaggtctctcccgctcttaataacctacagcagaccctgaatatcgtgaccgtgcaaaaagaagtgatcgatacaaatctaaccactctaagagatggcttgcatggaatccagcgcggcgatatcgatgctatgatctctagcgcgaaatcaatggtacggaaagcaaacgatataacagacgaagtcctggatggactaaatcccattcagactgatgtggagcggatcaaagacacatatggacgaacccagaacgaggatttcaaaaaggcactgaccgatgcggacaattctgtaaacaagctaacaaataaactgcccgatctatggcgcaagatagagagcatcaatcagcagcttttacctctgggaaacatcagcgacaatatggaccgaatcagagagctcattcagcaggcccgagatgctgcaagcaaagttgctgtgcccatgcggtttaacggaaagtcaggagtggaggtccggctgcctaatgatttggaggacttgaaaggatacactagcctgagtctgtttttgcagagaccgaactcgagagaaaacggcgggactgaaaacatgttcgtgatgtacttaggcaacaaggacgcctcccgcgactacatcggaatggctgtggtggacgggcaacttacatgcgtatacaatctcggtgaccgggaggctgagctgcaggtggaccagattttaacaaaaagcgagactaaagaagccgtcatggaccgggtaaagtttcagaggatctaccagttcgccagattgaactatacaaagggcgccacgtcatccaaaccagaaaccccgggcgtgtacgatatggacggcagaaactctaacactctgctgaatctcgaccctgaaaacgtagtcttttacgtaggaggctatccccccgactttaaactgccctcaagattgagcttccctccgtataaggggtgtatcgagctggatgacctgaacgaaaacgtgctgagcctctataatttcaaaaagacgttcaaccttaacactactgaagtagaaccctgtcggcggcggaaggaggagtcagacaaaaattacttcgagggaacaggctatgcgcgggttccaacccaaccccatgccccaatcccgacattcggccagaccattcagacgactgtggaccggggcctgctattctttgccgaaaatggcgatagattcatctctctaaacatcgaggacggaaaactgatggtgaggtacaaactgaactcagaacttcccaaagagcggggagttggagatgccataaataatggcagagaccacagtatccagatcaagattggcaaattacagaaaaggatgtggataaacgtggatgttcagaatactatcatcgacggggaggtatttgatttttccacgtactatctgggcgggattccgatcgccatccgagagaggtttaatatctcaactcccgctttccgggggtgcatgaagaacctgaaaaagaccagcggagtcgtgaggctcaacgatactgttggagtgactaagaagtgcagcgaagactggaaattggtccgctccgccagtttttccagggggggacagctgtcatttaccgatttaggactacctccgaccgaccacctccaggcctcttttggcttccagacgtttcagcctagcggcatcttattggatcaccagacttggacccgcaatttgcaagtgactttagaggatggttatatcgagctgagtaccagcgactcaggatctcctatctttaaaagtccccagacctacatggatggacttcttcattatgtctcagtgatttctgacaacagcgggcttaggctgcttattgacgaccaactgctccggaattcgaagcgcctgaagcatataagctcaagcaggcagtccctgcggttgggcggcagcaactttgaggggtgtatatccaatgtatttgtacaacgactgtccctgtccccggaagtcctggacttgaccagtaatagcctcaaacgcgatgtgtcccttggcggatgcagcctcaacaaacctccttttttgatgttacttaaaggctctacacgattcaacaaaacaaagacctttagaatcaatcagttactgcaagatacccctgtggcctccccgagatctgtgaaagtgtggcaggatgcctgttcgccgctaccaaaaacccaggccaatcatggggctcttcagttcggtgatatccccacctcacacttgcttttcaaacttccccaggagctgcttaagcccaggagccagtttgctgttgatatgcagacaacaagttccagggggctggtgttccacaccgggactaagaatagcttcatggcgctttacctcagtaagggcaggcttgtgtttgccctgggtacagacggtaagaaactgcgaatcaagagcaaagagaagtgtaacgatggaaagtggcatacagtcgtctttggccacgacggagaaaaggggagattagtcgttgacggactgcgagctagagaggggagtttacccggaaacagtaccattagtataagagcaccggtttacctgggttctcctcccagtgggaaacctaaatcactccctaccaattccttcgttggctgcctcaaaaacttccaattagattctaaacctctctataccccatcatctagctttggggtatcctcctgcctcggaggccccctggagaaaggaatatacttctctgaggagggaggacatgtagttttagcccacagcgtcctgctgggacctgagttcaaactcgtgttcagcattcggcctcgctcgctgaccggcatcctgattcatatcggttctcagcctggtaaacatctatgcgtgtatctcgaagccgggaaagtgactgcttcaatggacagtggcgcaggcgggacttcgacctccgttacaccaaaacaatcactttgtgacggtcagtggcactcagttgcggtgaccattaagcaacacattctccacctggagctggacaccgacagttcatacacagcagggcagatcccattcccaccagccagcacccaagagccgctccacctgggcggggcgcccgcaaacctgacaaccttaagaattcctgtgtggaagagcttttttggttgcctgcggaacattcatgttaaccatattccagtcccagtgaccgaggccttggaggtacaggggcctgtgagtctgaacggttgccccgaccagtag

SEQ ID NO: 4672 - DNA, 5174 bp, Artificial Sequence
  derived and/or modified sequence
atgccccctgcagtcaggaggtctgcatgttctatgggatggctttggatcttcggcgcagcgttagggcagtgtctcggctacagctcacagcagcagagggtaccttttctgcaacctcccggacagtctcaactgcaggccagctatgtggaattccggcctagccaggggtgtagtcctggttactacagggatcataaaggcttatatactggacggtgcgttccctgtaactgcaatggccactcgaatcagtgtcaggacggttcgggcatctgcgtcaattgtcaacacaacacagcaggggaacattgtgagcgatgccaggagggatattatggcaacgcagtgcacggcagttgccgtgcgtgcccgtgcccacacacgaactcgttcgccaccggctgcgtcgtgaacggtggagacgtgcggtgttcttgcaaagcagggtatacaggtactcagtgtgaacgctgcgcccctggatactttggtaatccgcagaaattcggcggttcatgccagccttgctcctgtaattcaaatggccagctcgggtcttgccacccactaacgggcgattgtattaaccaggaaccgaaggactcatcacccgctgaggaatgcgacgactgcgactcttgcgtgatgacacttttgaatgacttggcaaccatgggtgagcagttgcggcttgttaagagtcagctgcagggcctgagcgccagcgctggactgctggagcagatgaggcacatggagactcaggcaaaagacctgcgcaatcagttgcttaactataggtctgccatttcaaatcacggatcaaagatagagggcttagagcgcgaactgaccgacctgaaccaggagtttgagacccttcaggagaaagcccaggtaaacagtcgcaaggcgcagaccctcaataacaacgtgaacagggccacgcaatctgcaaaagaattagacgttaagatcaaaaacgttattcggaacgtgcacattctgcttaagcaaataagcggcaccgatggggaggggaataatgtgcccagcggagatttctccagggagtgggcagaagcccaaagaatgatgagggaattaaggaaccgcaacttcggcaagcatcttcgggaagccgaggctgataagcgcgagagccagctcctccttaatagaatcaggacctggcagaagacacatcagggagagaataacggactggccaactcaattcgggattccctaaatgagtatgaggcgaaattgtcagacctacgagctcgcctccaagaggctgctgctcaggccaagcaggccaatggactcaatcaggagaatgagcgagccctgggggcaatccagcgtcaggttaaggaaattaacagtctgcagagtgatttcactaaatacctgactacagccgatagtagtctgctgcagacgaatatagccctgcagcttatggagaagagtcaaaaggagtacgaaaaactagctgcaagtttgaacgaggctcgtcaggagttgtcggataaagtccgcgaacttagccgcagtgcaggaaaaaccagtctggtggaggaagcagagaaacacgctagaagtttgcaggagctggcgaaacagctggaggaaattaaacggaacgcctccggcgacgaattggtgcgatgtgcagttgacgcagcaacagcctacgaaaacatcctgaacgcaataaaagctgcggaagatgcagcaaatcgagcagcctcagcatccgaaagcgcactgcaaactgtcattaaagaagacctgcctaggaaagctaagacactgtcaagcaacagcgataagttgctgaatgaagcaaaaatgacgcagaagaaattgaaacaagaggtttctccagccctcaataacctgcaacagacgctgaatatagttaccgtgcagaaggaggtcatcgataccaatctgacaacccttagggatggactacatggcattcaaaggggcgatattgatgcaatgatctcttctgctaaaagcatggtgcgcaaagccaatgacattaccgacgaagtcctggatgggcttaatccgatccagactgacgtcgaaagaatcaaggatacctatggacgaacccagaacgaggactttaagaaggcgttgacagatgcggataactctgtgaacaaattaactaacaaactgcctgatctttggcgaaagatcgagagcattaaccaacagctgctgcctttgggtaacatttccgataacatggaccgcatccgggagcttattcaacaggccagagacgcagccagtaaggtggctgtgcctatgcggttcaacggcaagtccggagtcgaagttcgactccccaacgacctggaagacttgaaaggctatacttccctgtccctgttccttcagcgccctaactccagagagaatggagggacagaaaatatgttcgtgatgtacctggggaacaaagacgcatcacgcgactacattggaatggccgtggtggacgggcagctgacatgcgtttacaacctgggagatcgcgaggcagagcttcaagtggaccagatccttactaagtctgaaactaaagaggccgtcatggacagagtgaagttccagagaatctaccagtttgcaaggctcaactacactaaaggtgccacctcaagtaagccagagacgcctggggtttacgacatggatgggcgaaactccaacacgctgttgaaccttgacccagagaacgtggttttctacgtggggggttatcccccagactttaaactaccttcgaggctctcttttcccccatacaagggctgtatcgagcttgacgacttgaacgaaaatgtgctctccctttataatttcaagaaaacatttaatcttaacaccacagaggtggaaccgtgcaggcggcgtaaagaggagagtgataagaattacttcgaggggacaggttacgctagagtgccaacacagccgcacgcgccaattccaaccttcggccaaacgattcaaactactgtcgataggggcctgctattctttgctgagaacggagacagattcatcagcctgaatatagaggatggcaagcttatggtgcgctataagttgaacagtgagctacccaaggagcgcggagtaggggatgctataaataatggacgagaccacagcatccagattaagatcggaaagctgcagaagaggatgtggataaatgttgatgtgcagaatacgatcattgacggggaggtgttcgattttagcacttattaccttgggggtatccctattgctattagggagcgttttaacatttctactcccgcatttcgcggttgcatgaaaaaccttaaaaagacatcaggtgtggtgcgactcaatgataccgtgggtgttacaaagaagtgcagcgaagactggaaattagtgaggtccgctagcttttcacgtggtggtcagctctcctttactgacttgggactcccaccaaccgaccaccttcaggcctctttcggattccagacattccaaccaagcggaatactcctcgatcaccagacatggacacgcaatctgcaggtgacccttgaggacggatacatcgagttaagtacaagcgactccggctcaccgatctttaagtcgccacagacgtatatggacggactgctccattacgtgtctgtaattagtgacaatagtggattacgattgctgatcgatgaccagctccttcgtaattctaagcgacttaagcatatttcatcctcccgccagtccctcagactggggggatctaacttcgagggatgcatttctaatgttttcgtccagagactctccttgtccccagaagttctggatctgacttccaacagcttaaagcgggacgtctctctggggggatgtagcctcaataaacccccatttctgatgttgctgaagggatccacccggtttaataagactaagacctttagaattaaccagctgctccaggatacgccagtcgccagtccacggagcgttaaggtctggcaagacgcctgctcaccgctcccgaagacacaggcgaaccatggagccctgcagtttggggatatcccaactagtcatctgttatttaagctcccacaagagttgcttaagcctagatctcagtttgccgttgatatgcagactacctccagccgaggactggtgtttcacactgggaccaagaattctttcatggcactgtatctctctaagggcaggcttgtgttcgcactcgggactgacggcaagaagttgcgcatcaaatccaaggagaagtgtaacgatggcaagtggcacactgtggtctttggccacgacggagaaaagggaagactggtggtggatggtcttagggctcgggaaggcagcttgccaggtaactcaactatctcaatccgagccccagtttacttgggcagcccaccgtctggtaaacccaagagcctccctacaaacagtttcgtcgggtgcctgaaaaacttccagctcgactcaaaacctctctatactccctcttctagctttggcgtgagctcgtgcctggggggacctctcgagaagggaatctattttagtgaggaggggggacatgtggtgttagcgcattccgtgctgctgggcccagagttcaaactagtttttagcatacgaccgaggagcctgaccggcattctaatccacatagggagtcagcccggaaaacatctgtgcgtgtatttagaagctggcaaggtgacggcatctatggattctggcgcaggtggaacatctactagcgtgacaccaaaacagagcttgtgcgacggccagtggcattccgttgcagtcactatcaaacagcacatcttacaccttgagctggatacggactcctcctacactgccggacaaatccctttccctcctgcctctactcaagaacctctccatcttggcggagcaccagccaacctcacgactctgcgcatacccgtgtggaagagtttctttggatgcctgaggaatatccatgtgaatcatatccccgtccctgtgacagaagccctggaggtccagggccctgtcagcctcaacggttgtcctgatcaata

SEQ ID NO: 4673 - DNA, 5175 bp, Artificial Sequence
  derived and/or modified sequence
atgccccccgccgtgagaagaagcgcctgcagcatgggctggctgtggatcttcggcgccgccctgggccagtgcctgggctacagcagccagcagcagagagtgcccttcctgcagccccccggccagagccagctgcaggccagctacgtggagttcagacccagccagggctgcagccccggctactacagagaccacaagggcctgtacaccggcagatgcgtgccctgcaactgcaacggccacagcaaccagtgccaggacggcagcggcatctgcgtgaactgccagcacaacaccgccggcgagcactgcgagagatgccaggagggctactacggcaacgccgtgcacggcagctgcagagcctgcccctgcccccacaccaacagcttcgccaccggctgcgtggtgaacggcggcgacgtgagatgcagctgcaaggccggctacaccggcacccagtgcgagagatgcgcccccggctacttcggcaacccccagaagttcggcggcagctgccagccctgcagctgcaacagcaacggccagctgggcagctgccaccccctgaccggcgactgcatcaaccaggagcccaaggacagcagccccgccgaggagtgcgacgactgcgacagctgcgtgatgaccctgctgaacgacctggccaccatgggcgagcagctgagactggtgaagagccagctgcagggcctgagcgccagcgccggcctgctggagcagatgagacacatggagacccaggccaaggacctgagaaaccagctgctgaactacagaagcgccatcagcaaccacggcagcaagatcgagggcctggagagagagctgaccgacctgaaccaggagttcgagaccctgcaggagaaggcccaggtgaacagcagaaaggcccagaccctgaacaacaacgtgaacagagccacccagagcgccaaggagctggacgtgaagatcaagaacgtgatcagaaacgtgcacatcctgctgaagcagatcagcggcaccgacggcgagggcaacaacgtgcccagcggcgacttcagcagagagtgggccgaggcccagagaatgatgagagagctgagaaacagaaacttcggcaagcacctgagagaggccgaggccgacaagagagagagccagctgctgctgaacagaatcagaacctggcagaagacccaccagggcgagaacaacggcctggccaacagcatcagagacagcctgaacgagtacgaggccaagctgagcgacctgagagccagactgcaggaggccgccgcccaggccaagcaggccaacggcctgaaccaggagaacgagagagccctgggcgccatccagagacaggtgaaggagatcaacagcctgcagagcgacttcaccaagtacctgaccaccgccgacagcagcctgctgcagaccaacatcgccctgcagctgatggagaagagccagaaggagtacgagaagctggccgccagcctgaacgaggccagacaggagctgagcgacaaggtgagagagctgagcagaagcgccggcaagaccagcctggtggaggaggccgagaagcacgccagaagcctgcaggagctggccaagcagctggaggagatcaagagaaacgccagcggcgacgagctggtgagatgcgccgtggacgccgccaccgcctacgagaacatcctgaacgccatcaaggccgccgaggacgccgccaacagagccgccagcgccagcgagagcgccctgcagaccgtgatcaaggaggacctgcccagaaaggccaagaccctgagcagcaacagcgacaagctgctgaacgaggccaagatgacccagaagaagctgaagcaggaggtgagccccgccctgaacaacctgcagcagaccctgaacatcgtgaccgtgcagaaggaggtgatcgacaccaacctgaccaccctgagagacggcctgcacggcatccagagaggcgacatcgacgccatgatcagcagcgccaagagcatggtgagaaaggccaacgacatcaccgacgaggtgctggacggcctgaaccccatccagaccgacgtggagagaatcaaggacacctacggcagaacccagaacgaggacttcaagaaggccctgaccgacgccgacaacagcgtgaacaagctgaccaacaagctgcccgacctgtggagaaagatcgagagcatcaaccagcagctgctgcccctgggcaacatcagcgacaacatggacagaatcagagagctgatccagcaggccagagacgccgccagcaaggtggccgtgcccatgagattcaacggcaagagcggcgtggaggtgagactgcccaacgacctggaggacctgaagggctacaccagcctgagcctgttcctgcagagacccaacagcagagagaacggcggcaccgagaacatgttcgtgatgtacctgggcaacaaggacgccagcagagactacatcggcatggccgtggtggacggccagctgacctgcgtgtacaacctgggcgacagagaggccgagctgcaggtggaccagatcctgaccaagagcgagaccaaggaggccgtgatggacagagtgaagttccagagaatctaccagttcgccagactgaactacaccaagggcgccaccagcagcaagcccgagacccccggcgtgtacgacatggacggcagaaacagcaacaccctgctgaacctggaccccgagaacgtggtgttctacgtgggcggctacccccccgacttcaagctgcccagcagactgagcttccccccctacaagggctgcatcgagctggacgacctgaacgagaacgtgctgagcctgtacaacttcaagaagaccttcaacctgaacaccaccgaggtggagccctgcagaagaagaaaggaggagagcgacaagaactacttcgagggcaccggctacgccagagtgcccacccagccccacgcccccatccccaccttcggccagaccatccagaccaccgtggacagaggcctgctgttcttcgccgagaacggcgacagattcatcagcctgaacatcgaggacggcaagctgatggtgagatacaagctgaacagcgagctgcccaaggagagaggcgtgggcgacgccatcaacaacggcagagaccacagcatccagatcaagatcggcaagctgcagaagagaatgtggatcaacgtggacgtgcagaacaccatcatcgacggcgaggtgttcgacttcagcacctactacctgggcggcatccccatcgccatcagagagagattcaacatcagcacccccgccttcagaggctgcatgaagaacctgaagaagaccagcggcgtggtgagactgaacgacaccgtgggcgtgaccaagaagtgcagcgaggactggaagctggtgagaagcgccagcttcagcagaggcggccagctgagcttcaccgacctgggcctgccccccaccgaccacctgcaggccagcttcggcttccagaccttccagcccagcggcatcctgctggaccaccagacctggaccagaaacctgcaggtgaccctggaggacggctacatcgagctgagcaccagcgacagcggcagccccatcttcaagagcccccagacctacatggacggcctgctgcactacgtgagcgtgatcagcgacaacagcggcctgagactgctgatcgacgaccagctgctgagaaacagcaagagactgaagcacatcagcagcagcagacagagcctgagactgggcggcagcaacttcgagggctgcatcagcaacgtgttcgtgcagagactgagcctgagccccgaggtgctggacctgaccagcaacagcctgaagagagacgtgagcctgggcggctgcagcctgaacaagccccccttcctgatgctgctgaagggcagcaccagattcaacaagaccaagaccttcagaatcaaccagctgctgcaggacacccccgtggccagccccagaagcgtgaaggtgtggcaggacgcctgcagccccctgcccaagacccaggccaaccacggcgccctgcagttcggcgacatccccaccagccacctgctgttcaagctgccccaggagctgctgaagcccagaagccagttcgccgtggacatgcagaccaccagcagcagaggcctggtgttccacaccggcaccaagaacagcttcatggccctgtacctgagcaagggcagactggtgttcgccctgggcaccgacggcaagaagctgagaatcaagagcaaggagaagtgcaacgacggcaagtggcacaccgtggtgttcggccacgacggcgagaagggcagactggtggtggacggcctgagagccagagagggcagcctgcccggcaacagcaccatcagcatcagagcccccgtgtacctgggcagcccccccagcggcaagcccaagagcctgcccaccaacagcttcgtgggctgcctgaagaacttccagctggacagcaagcccctgtacacccccagcagcagcttcggcgtgagcagctgcctgggcggccccctggagaagggcatctacttcagcgaggagggcggccacgtggtgctggcccacagcgtgctgctgggccccgagttcaagctggtgttcagcatcagacccagaagcctgaccggcatcctgatccacatcggcagccagcccggcaagcacctgtgcgtgtacctggaggccggcaaggtgaccgccagcatggacagcggcgccggcggcaccagcaccagcgtgacccccaagcagagcctgtgcgacggccagtggcacagcgtggccgtgaccatcaagcagcacatcctgcacctggagctggacaccgacagcagctacaccgccggccagatccccttcccccccgccagcacccaggagcccctgcacctgggcggcgcccccgccaacctgaccaccctgagaatccccgtgtggaagagcttcttcggctgcctgagaaacatccacgtgaaccacatccccgtgcccgtgaccgaggccctggaggtgcagggccccgtgagcctgaacggctgccccgaccagtag

SEQ ID NO: 4674 - protein, 440 aa, Artificial Sequence
  derived and/or modified sequence
MGPPGSPWQWVTLLLGLLLPPAAPFWLLNVLFPPHTTPKAELSNHTRPVILVPGCLGNQLEAKLDKPDVVNWMCYRKTEDFFTIWLDLNMFLPLGVDCWIDNTRVVYNRSSGLVSNAPGVQIRVPGFGKTYSVEYLDSSKLAGYLHTLVQNLVNNGYVRDETVRAAPYDWRLEPGQQEEYYRKLAGLVEEMHAAYGKPVFLIGHSLGCLHLLYFLLRQPQAWKDRFIDGFISLGAPWGGSIKPMLVLASGDNQGIPIMSSIKLKEEQRITTTSPWMFPSRMAWPEDHVFISTPSFNYTGRDFQRFFADLHFEEGWYMWLQSRDLLAGLPAPGVEVYCLYGVGLPTPRTYIYDHGFPYTDPVGVLYEDGDDTVATRSTELCGLWQGRQPQPVHLLPLHGIQHLNMVFSNLTLEHINAILLGAYRQGPPASPTASPEPPPPE

SEQ ID NO: 4675 - protein, 13 aa, Artificial Sequence
  derived and/or modified sequence
LDKPDVVNWMCYR

SEQ ID NO: 4676 - protein, 14 aa, Artificial Sequence
  derived and/or modified sequence
SSGLVSNAPGVQIR

SEQ ID NO: 4677 - DNA, 1320 bp, Artificial Sequence
  derived and/or modified sequence
atgggcccccccggcagcccctggcagtgggtgaccctgctgctgggcctgctgctgccccccgccgcccccttctggctgctgaacgtgctgttccccccccacaccacccccaaggccgagctgagcaaccacacccgccccgtgatcctggtgcccggctgcctgggcaaccagctggaggccaagctggacaagcccgacgtggtgaactggatgtgctaccgcaagaccgaggacttcttcaccatctggctggacctgaacatgttcctgcccctgggcgtggactgctggatcgacaacacccgcgtggtgtacaaccgcagcagcggcctggtgagcaacgcccccggcgtgcagatccgcgtgcccggcttcggcaagacctacagcgtggagtacctggacagcagcaagctggccggctacctgcacaccctggtgcagaacctggtgaacaacggctacgtgcgcgacgagaccgtgcgcgccgccccctacgactggcgcctggagcccggccagcaggaggagtactaccgcaagctggccggcctggtggaggagatgcacgccgcctacggcaagcccgtgttcctgatcggccacagcctgggctgcctgcacctgctgtacttcctgctgcgccagccccaggcctggaaggaccgcttcatcgacggcttcatcagcctgggcgccccctggggcggcagcatcaagcccatgctggtgctggccagcggcgacaaccagggcatccccatcatgagcagcatcaagctgaaggaggagcagcgcatcaccaccaccagcccctggatgttccccagccgcatggcctggcccgaggaccacgtgttcatcagcacccccagcttcaactacaccggccgcgacttccagcgcttcttcgccgacctgcacttcgaggagggctggtacatgtggctgcagagccgcgacctgctggccggcctgcccgcccccggcgtggaggtgtactgcctgtacggcgtgggcctgcccaccccccgcacctacatctacgaccacggcttcccctacaccgaccccgtgggcgtgctgtacgaggacggcgacgacaccgtggccacccgcagcaccgagctgtgcggcctgtggcagggccgccagccccagcccgtgcacctgctgcccctgcacggcatccagcacctgaacatggtgttcagcaacctgaccctggagcacatcaacgccatcctgctgggcgcctaccgccagggcccccccgccagccccaccgccagccccgagccccccccccccgag

SEQ ID NO: 4678 - DNA, 1320 bp, Artificial Sequence
  derived and/or modified sequence
atgggacccccaggatccccctggcagtgggtcactctgctgctgggactgctactgccaccagctgcccctttctggctcttgaacgtgttgttccctcctcacactacccccaaagccgaactgtccaatcatactcggccagtgatcttagtgccgggctgcctcggaaaccagctggaggcgaaactggataagcctgatgtggtgaattggatgtgctaccgcaaaacagaggacttttttacaatatggctcgatctcaatatgtttctgccacttggagtcgactgctggatcgataacacacgggttgtgtacaaccgctcttccggactggtgtctaacgcccctggggtgcaaattagggtccccggctttggtaagacctattctgtcgagtacctggacagcagcaaattggccggatacctgcataccctggttcaaaacctcgtgaacaacggctacgtcagagacgagacagtcagagccgctccatacgactggcgcctcgaaccgggacagcaagaggaatactatagaaagctcgctggtctggtggaggagatgcatgcggcctacggtaaacctgtcttcctgattggacactccttgggatgtctccatctgctgtacttcttactccgacagccacaagcatggaaagatcggtttattgacggatttataagtctgggtgccccatggggcggcagcatcaaaccaatgttggtgttggcatcaggagacaaccaaggcataccaataatgtcctcgatcaagttaaaagaagaacaacggattacgacgacatcgccttggatgtttccctcccggatggcgtggcctgaagaccacgtgttcatatcaacacccagttttaattacactggaagagacttccagaggttcttcgctgacttgcacttcgaggagggttggtacatgtggctgcagtcaagagatctactagctggccttcctgcccccggagtcgaggtgtattgtctctatggtgtcggcctgcctacaccacgaacatacatatatgatcacggttttccatacacagatcctgtcggtgttctttatgaagacggggatgatactgtggctacacggtccaccgagctgtgtggcctgtggcaggggcggcaaccccaacccgtccacctgcttcccttgcatggcattcaacatctcaacatggtattttcaaatctcactttggaacacataaacgctattcttctcggagcctaccgccaggggcctcccgcaagtcccacagcaagtcccgaaccacccccccctgaa

SEQ ID NO: 4679 - DNA, 1320 bp, Artificial Sequence
  derived and/or modified sequence
atgggaccgcctggaagcccttggcagtgggtgactcttcttctgggccttcttctgccgcccgcagcacctttctggctgcttaacgtcctttttcctcctcacacgacccctaaggcagaactgtcgaatcatactcgaccggtgattctggtgccgggatgtttgggcaaccaactcgaggccaagctggacaagcccgatgtggtgaactggatgtgctatcgtaagaccgaggacttctttactatctggctggaccttaacatgttccttcctcttggagttgattgttggattgataacactagagtcgtgtataatcgctcatctggcttggtcagcaacgctcctggtgtgcaaattcgagtgccgggctttggtaagacttactcggtggaatacctggactcctcaaaactggccgggtacctgcatactctggtccaaaatctggtgaacaacggttacgtgcgggacgaaactgtccgcgcggcgccatacgattggcgtctggaaccaggtcagcaagaagaatactatcgaaagctggcaggcctggtggaggagatgcatgccgcctacgggaagcccgtgtttcttattgggcattccctgggctgcctgcatctcctctactttctgcttagacagcctcaggcctggaaggatcggttcattgatggcttcatttctcttggagccccatggggagggtcgataaaaccaatgctggtccttgcgtcgggagacaatcagggcatccctatcatgtcatcgatcaagctgaaggaggagcaaaggattaccaccactagcccatggatgtttccgtcccggatggcatggcctgaggatcatgtattcatctcaactccttcgtttaactacactggccgtgattttcaaagatttttcgcagatcttcacttcgaagaggggtggtacatgtggctgcagagcagggacctgctcgcaggtctgcccgcacccggggtcgaagtgtattgtctttacggagtcggactccctaccccacggacctacatctacgatcatggatttccctatactgatccagtcggagtgctctacgaagatggagatgataccgtggcaactagatcgactgaactgtgtggtctttggcaagggaggcagccacagcctgtgcatcttctgcctctccatggcattcagcacctgaacatggtgttctcaaacctcaccctcgaacatatcaacgcgattcttttgggtgcttaccggcaaggaccccccgcctcgcccaccgcatcacccgaaccgcccccacctgaa

SEQ ID NO: 4680 - DNA, 1320 bp, Artificial Sequence
  derived and/or modified sequence
atggggccccctggaagcccgtggcaatgggttacacttctcctgggtttgctgcttcctccggcagctcctttctggctcctgaacgtactctttcccccgcacaccacccccaaggccgagctgagcaatcatacgcgccctgtgattctggtcccggggtgtctgggaaatcagctagaggccaagctggacaagcctgacgtggtgaattggatgtgctacaggaagaccgaggacttctttactatttggctggacctgaacatgttcctgccactgggtgttgactgctggatagataacaccagggtggtatacaaccggtccagcggcttagtctctaacgcccctggagtccagatcagggtgccaggtttcggtaagacctatagtgtagagtatcttgatagcagcaaattagctgggtacctgcataccctggtgcagaatcttgtcaataacgggtatgtccgagacgaaacagtgagagcagccccctatgactggagactcgaacccggccagcaggaagaatactatagaaaactggccgggctagtcgaagagatgcacgcagcttatgggaaacccgtgtttctgattggacatagtttggggtgtctgcatcttctgtacttcctcctccggcagccgcaagcctggaaggatcgttttatcgacggcttcatttcactgggcgctccctggggaggcagcattaagcctatgctcgtactggccagtggtgacaaccagggaattcccattatgtcgtcaattaaactgaaggaagagcaacgtattactactacaagcccgtggatgttcccaagccgcatggcctggcctgaggaccacgtgttcatcagtacgccctcttttaattataccgggcgggactttcagcgcttcttcgctgatctccatttcgaggaaggttggtacatgtggctgcagagtagagatctgctggcgggcctgccagcaccgggcgttgaagtctattgcttatatggagtcggtctacccacccctagaacctatatttacgaccatggcttcccctacacagacccagtaggtgtcctgtacgaagacggagacgatacagtggctactcggtccactgagctttgcggtctttggcaaggccgtcagcctcaacccgtccacctgttgccgttgcacggaattcagcatctgaacatggtctttagcaaccttacactcgagcacattaacgcgatcctgctgggggcttatcgacagggcccccccgctagcccaacggcgtctcctgagcctcctccacctgag

SEQ ID NO: 4681 - DNA, 1320 bp, Artificial Sequence
  derived and/or modified sequence
atgggacctcccggcagtccgtggcagtgggtgaccctgctacttggactgctgctccctcctgcagcacccttctggctcctcaacgtcctgtttccccctcacacgacccctaaggccgagctctctaaccacacgcggccagtcatcctcgtgccgggatgtctcggcaaccagctggaggcaaagctcgacaaaccagatgtggtcaattggatgtgttatcggaaaacagaggactttttcaccatttggctggatctgaatatgtttctccccctgggcgtcgattgctggatcgacaatacacgagtggtttataaccgctcctcaggcctcgtgtcgaatgcaccaggggtgcaaattagggtgcctggctttggaaaaacttatagtgtcgagtacctagattctagtaaacttgccggatatctccatacactggtgcaaaacctagtgaacaacggttatgtgagagacgagactgttcgcgctgccccttatgattggcgcctggagccaggtcagcaggaggagtactacagaaaactcgccggtttggtcgaagagatgcatgctgcgtacggaaagccggtgttcctgattggccacagcttggggtgcctgcatttattatacttcttgctaaggcagcctcaggcatggaaggacaggttcatagacggattcatctccctcggcgcaccctgggggggcagcatcaagccaatgctggtgctggcctccggcgataatcaagggattcctataatgtcatccataaagctaaaggaagagcaaagaattacaacaacctccccatggatgtttcccagccggatggcttggccagaggatcatgtattcataagcaccccctcctttaattatacgggacgagatttccaacgttttttcgcggacctgcatttcgaggaaggctggtatatgtggcttcagtcgcgcgacctcctcgctggtctcccagccccaggagtggaagtatactgtctgtacggcgtgggtctcccgactcctcggacctatatctatgaccacgggtttccatataccgacccagttggggtgctttacgaagacggtgacgacaccgtggctactaggagtaccgaactctgcggtctttggcaaggccgccaaccacagccagttcatctcttacccctgcacggtatccaacatctgaacatggtattctctaacctcactctggaacatattaatgccattttgcttggggcttataggcaaggcccacctgctagtcctacagcatctcccgagcccccccctcccgaa

SEQ ID NO: 4682 - DNA, 1320 bp, Artificial Sequence
  derived and/or modified sequence
atgggcccaccaggcagcccatggcaatgggtcaccctgttgcttggccttctgctgccccccgctgctccattctggttgctgaatgtgctgtttccaccccacacaacccccaaggccgagctctctaatcacacaagacctgtaatcctggtgccagggtgcctggggaaccaactggaggcaaagcttgacaagcccgacgtggttaactggatgtgttaccgcaagacggaagatttcttcaccatctggctggatctgaacatgtttctgcctcttggcgttgactgctggatcgacaacacacgagtggtgtacaacaggagctcgggtctcgtgagtaatgctcccggcgtgcagatccgggtcccagggttcgggaaaacatacagcgtggaatacctggactccagcaagctggcagggtacttgcacacactggtccagaatctcgtgaataacggctatgtgcgggacgaaacagtgcgagccgccccctacgattggcgactggaacccggccagcaggaggaatactatcgcaagcttgcgggcttggtggaggaaatgcatgccgcctacgggaaacccgtgttcctgatcggacacagcctgggatgccttcatctcctgtatttcttattacggcagccccaggcctggaaggatcgtttcattgatggattcatctccttgggggccccatggggcggatctatcaaacccatgctcgtcctggcctctggggataaccagggcatacctataatgtcatccatcaaattaaaagaggagcagcggattactactaccagcccatggatgtttcctagccgcatggcctggccagaggaccacgttttcataagcactcccagtttcaattacactgggcgagacttccagcgcttcttcgccgacctgcatttcgaggaaggttggtacatgtggctgcagtcccgagaccttttggcgggattgccagcccccggcgtcgaggtgtattgcctttatggtgtcggcttgccaacaccgcgcacctacatatatgatcatggctttccctacaccgaccccgtcggggtgctctatgaggatggtgatgacacagtcgctacaagaagcaccgagctatgcggtttgtggcagggcaggcagccccagcctgtgcacctgctccccctgcatggaattcaacatctgaacatggtgttcagcaacctgactcttgagcacattaacgcgattcttctgggtgcttaccgccaggggccccccgcgtctcctacagcttcgcccgaacctcccccaccagaa

SEQ ID NO: 4683 - DNA, 1320 bp, Artificial Sequence
  derived and/or modified sequence
atggggcctccaggctccccgtggcaatgggtgacgttgctcctcggactgctgctcccacctgctgccccattctggttgctgaacgtcctgttcccaccccataccactccgaaagcagagctgtcgaaccatactcgtcccgtcattctggtcccgggatgcctgggcaaccagctcgaggccaagctcgacaagccggatgtcgtgaactggatgtgctaccggaaaactgaggatttctttaccatctggttggaccttaacatgtttctgccattgggagtggattgctggatcgacaacactagagttgtgtacaaccgatcttcagggcttgtgtccaatgcacctggagtccaaattcgcgtgccgggattcggaaaaacttattctgtcgagtacctggactcatctaagctggccgggtacctccacacgcttgtgcagaatctcgtgaataacggatacgttagagacgagactgtgcgggcagcgccatatgactggagactcgaacctggacagcaagaagaatactacagaaagctggcggggttggttgaagaaatgcacgctgcgtacgggaagccggtgttcttgatcggacatagcttgggttgcctgcacttgctgtactttctccttcgccaaccccaagcgtggaaggaccggtttatcgacggtttcatcagccttggagccccgtggggaggatcgatcaagcctatgctggtgctcgcttccggggacaaccagggtatcccgataatgagctccattaaactcaaggaagaacagcgcatcaccaccaccagcccttggatgtttccatcccggatggcttggcccgaggaccacgtgttcatctcaaccccttcgttcaactacactggacgggacttccaaaggttcttcgcagacctgcacttcgaagaaggatggtacatgtggctccagagccgcgatctgctcgcagggctgccagctccgggagtcgaagtgtactgcttgtacggtgtcgggcttccaactccccgcacgtacatctatgaccatggttttccgtatactgatcccgtgggcgtcctgtacgaggatggagacgatactgtcgcgacccgctcaacggagctctgcggactctggcagggccgccagcctcaacctgtgcacctgcttccgctgcacggaatccagcacctcaatatggtgttctcgaaccttactctcgagcatatcaatgcaattctcctgggagcctaccgccagggtccacctgcctcacccacggctagcccggaaccacctccaccggaa

SEQ ID NO: 4684 - DNA, 1320 bp, Artificial Sequence
  derived and/or modified sequence
atgggtccacctggttcgccatggcaatgggttaccctgcttctggggctcctgctgcctccagcagcaccattttggctcctcaatgtcctgtttcctcctcatactaccccaaaagccgaactgtcgaaccatactcgtcctgtcatcttggtccccggttgtctcggaaatcagttggaagcgaagctggacaaaccagacgtggtgaattggatgtgttaccgtaagaccgaggatttctttaccatttggctcgacctgaatatgttccttcctcttggggtggactgttggattgacaatacgcgcgtggtgtacaatcgatcgagcgggcttgtttccaacgcccccggagtgcagattcgtgtaccaggttttggaaagacttactcggtggaatacctggatagctcaaagttggcggggtacttgcataccctggtgcaaaatcttgttaacaacggttacgtgagagacgaaacggtgcgtgcagcaccgtacgattggcgcctcgaaccaggacagcaagaagaatactaccgaaaactggctggccttgtggaagagatgcacgcagcatacggcaagccggtgtttctcatcggtcacagcctgggatgcctgcatcttctttactttctccttagacagccacaggcttggaaagaccggtttatcgatggattcatttcacttggagcgccatggggtggttcgattaaacccatgcttgtcctggcgagcggcgacaaccaagggatccccatcatgtcctccattaagttgaaagaagaacagagaataactaccacctcgccttggatgtttccatctcgaatggcctggccagaggatcatgtctttatctcaaccccctccttcaattacaccggcagggattttcaacggttcttcgcagatcttcattttgaagaaggctggtatatgtggctgcagtcgcgtgatctcctggcgggtttgcctgcacctggagtggaagtgtactgtttgtatggtgtggggcttcctacccctcgcacctacatttacgatcatggtttcccatacaccgaccccgtgggggtcctgtacgaagatggagacgacaccgtcgcgactagaagcacggagctgtgtggactgtggcaagggagacaacctcagccagtgcatctcctgcctctccatggaatacaacaccttaacatggtcttttccaaccttaccctggaacacataaacgcaatcctgctgggagcctacagacagggcccaccggcatcgcctactgcttcgcctgaacctcctcccccggag

SEQ ID NO: 4685 - DNA, 1320 bp, Artificial Sequence
  derived and/or modified sequence
atgggaccgccgggatcgccctggcagtgggtcactttgctgctgggattgctgcttcctccggcagcgccgttctggttgcttaacgtcctgtttcctcctcatacgactcccaaggcggagctgtcgaaccataccaggccggtgatcctcgttccaggctgcctgggcaaccagctggaggcgaagctggataaaccggacgtggttaactggatgtgttacagaaagactgaagatttcttcactatctggctcgacctcaacatgttcctgcctctgggtgtggactgctggatcgataatacgagagtggtgtataaccgcagctcgggactcgtgtcaaacgctccgggcgttcagattagagtcccaggattcggaaagacctactccgtagagtatctcgattcgtccaagctggcaggatatctccacactctggtgcagaaccttgtgaataacgggtacgtccgggacgagactgtgcgcgcagcgccgtacgattggcgcctcgaacccgggcaacaggaagaatactaccggaagctggccggactggtcgaggaaatgcatgctgcgtacggaaagccggtctttctgatcggacatagccttggttgtctgcacctgctgtatttcctgctgcgccagccacaggcctggaaagatcgcttcatcgatggtttcatatcactgggagctccgtggggcggatccatcaaaccgatgctggtgctcgcttcgggtgataaccagggcatcccgatcatgtcgagcattaaactgaaggaagaacaacgcatcactaccacctccccgtggatgttcccgtctcgcatggcatggccggaggaccacgtgttcatttccactcctagctttaactacaccggtagggacttccagagattctttgccgatctgcatttcgaggagggctggtacatgtggcttcagtcgcgggacctgctcgcgggcctccccgcgcccggagtcgaagtgtactgcctgtacggggtcggcttgcctacgccgcggacttacatttacgaccacggatttccgtacactgacccggtgggagttctgtacgaggacggagatgatacggtggcgacgagatcaaccgaactttgcggactgtggcaaggccgccaaccgcaaccagtgcatctgctgcctctgcatgggatccagcatctgaacatggtgttctctaacttgaccctggagcatatcaacgcgatcctgttgggagcttacaggcaggggccaccagcctccccgaccgcctcgccggagcctccaccacctgaa

SEQ ID NO: 4686 - DNA, 1320 bp, Artificial Sequence
  derived and/or modified sequence
atggggccgcccggtagtccatggcaatgggtgacacttctcctgggacttctgttgccacctgcagcccccttctggctgctcaatgtgctgttcccaccgcacactacccctaaagccgaacttagtaaccacacccgcccagtaattcttgttcctgggtgcctgggcaatcaactcgaggccaaactggacaaaccggacgtagtgaactggatgtgttatcggaagacggaagatttcttcacaatttggcttgatctcaacatgtttctcccgttgggggtggactgctggattgacaacactcgcgtggtgtataatagaagcagcggactggttagtaacgcgccaggtgtacagattcgggtgcccggcttcggaaagacctactccgtggagtaccttgacagcagcaaactggctggttacttgcacaccctggtgcaaaatctggtgaacaacggatatgtgcgggatgagacagttcgcgccgcgccctacgattggaggctcgagcctggccaacaggaggagtactacaggaagcttgcagggctggttgaggagatgcacgccgcgtatggcaaacccgtgttcctcatcggccacagcctaggctgcctccatctgctctactttctcctgaggcaaccgcaggcctggaaagataggttcatcgatggttttatctcacttggagccccctggggcggaagcattaaacccatgttggttctggcgagcggagataaccaagggattcccattatgtcctccattaaactgaaagaggagcagagaattaccaccacctcaccttggatgtttccatcaagaatggcctggccagaggatcacgtgttcatctcaacccccagcttcaattataccgggagagatttccaacgcttctttgctgatctgcattttgaagaaggttggtacatgtggttgcagtccagagatcttctggccgggctccctgctcccggagtcgaagtttactgtctgtatggagtcgggctacctactccgagaacctacatttacgaccatgggttcccatataccgatcccgttggtgtcttgtacgaggacggagatgacactgttgcgactagatctaccgaactgtgtgggttgtggcagggaagacagccacaacctgttcatctgctgccattacatgggatccagcaccttaacatggtcttctctaatctgaccctggaacatatcaacgccattcttctgggggcataccgccaaggaccgccggcgagcccaactgccagtcccgaaccaccaccacccgaa

SEQ ID NO: 4687 - DNA, 1320 bp, Artificial Sequence
  derived and/or modified sequence
atggggccccctggcagtccgtggcagtgggtcactcttctgcttggtctgcttcttccacctgccgcccctttttggcttcttaacgtgctcttcccccctcatactacacccaaagccgaattgtcaaatcataccagacctgtaatcttggttccaggttgtttgggtaaccagcttgaggctaagctagataaacctgatgttgtgaactggatgtgctatagaaagacagaggactttttcaccatctggttagacttaaacatgttcctgcctcttggggttgattgctggatcgacaatacacgagtggtctacaaccgaagcagtgggctagtcagcaatgcaccgggggtgcagatccgcgtgcccggcttcggtaagacgtattccgtcgagtacctggatagctctaaactcgctggatacttgcatacattggtacagaacctggtaaataacgggtacgtaagggacgagacagtacgggcggcaccttacgattggcgcctggaacccggccagcaggaagagtactacaggaaacttgccggcttggtggaggagatgcacgccgcttatgggaaacctgtcttcctgattgggcacagcctgggatgtttgcatctgctctatttcctgctgaggcagcctcaggcctggaaggatcggttcattgatggattcataagcctaggggctccttggggggggtcaattaaacctatgcttgttttggcatcaggcgacaatcagggcatccctatcatgtctagtataaaattaaaagaggagcagcggataaccacaacaagcccatggatgtttccatctcgcatggcctggcctgaagaccacgtctttatcagcacaccatctttcaactataccggccgagatttccaacgcttttttgctgatctccactttgaagagggatggtatatgtggctgcaatccagagatcttctggccggcctaccggcaccaggagtcgaggtgtattgtttgtatggcgtgggactgcccacaccgcgtacatatatatacgaccacggatttccatacacagatcctgtaggcgtgctttacgaggacggagacgatacggtagccaccaggtcgactgagttatgtggtctctggcagggacgacagccccagcccgtgcatttgctcccgctgcatggtatccaacatttgaatatggtcttctccaacctgaccctggaacacattaatgcaatactgcttggagcatatcgccagggaccgccagcctccccaaccgcctcaccggagccaccccctcctgag

SEQ ID NO: 4688 - DNA, 1320 bp, Artificial Sequence
  derived and/or modified sequence
atgggacctccaggtagcccttggcagtgggtgactctccttcttggactcctgcttcctcccgcagcaccattttggctgctgaatgtgctttttcctcctcataccactcctaaggcggaactgtctaaccatacccggccagtgattcttgtgccaggttgccttggcaaccagcttgaagcgaagctggataaaccggacgtcgttaattggatgtgctaccgtaaaactgaagatttctttaccatttggctggatttgaacatgtttttgccgctcggagtggactgttggattgataacacccgggtcgtgtacaaccgatcttccggtctggtgagcaatgcccctggagtccagattcgcgtgccaggattcggcaaaacttactcggtcgaatacctggattcctcaaagctggctggctaccttcatactctggtgcaaaatcttgtgaataacggatacgtgcgagatgagacggtcagggcagcgccttacgattggagactggaaccaggacagcaagaggaatactaccgcaaactggcaggacttgtggaagagatgcatgcagcctacggaaagcctgtgtttctcattggacattccctgggctgtctccatctgctgtactttctcctgaggcaaccgcaagcctggaaggatcggtttattgatggtttcattagcctgggggccccgtggggtggttcaatcaagcccatgctggtgctggcatccggtgataaccagggcattccaataatgtcgtccatcaaattgaaggaggaacagagaatcactaccacctcaccttggatgttcccttccaggatggcctggccggaagatcatgtgttcatcagcactccttcgtttaactatactggaagggactttcagcgtttctttgcggatctgcattttgaagaaggctggtacatgtggctccagagtagagatctccttgcagggctccccgcaccaggtgtggaagtgtactgcctctacggcgtcggactccctacgccacgcacctacatctacgatcatggattcccttacactgaccctgtgggcgtgctgtacgaggatggcgatgatactgtggcaaccaggtccaccgaactttgtggcctgtggcagggacggcagcctcaacctgtgcacctgctgccacttcacggaatccagcatctcaatatggtcttttcgaatcttactctggaacacataaatgcgatccttttgggtgcatacagacaaggaccacccgcaagccctactgccagcccagaaccacccccgcccgaa

SEQ ID NO: 4689 - DNA, 1320 bp, Artificial Sequence
  derived and/or modified sequence
atgggaccaccaggatccccttggcaatgggtgaccctgctccttgggctgctgctgccgccagcggccccgttctggctgctgaatgtgctctttccaccgcacacgacccctaaggccgaattgtcgaaccatacccggccagtgattctggtgcccgggtgcctgggaaaccagctcgaggcaaagctcgacaaaccggacgtcgtcaactggatgtgctaccgcaagactgaggatttctttaccatttggctggatctgaacatgttcctgccactgggtgtcgactgttggatcgataacacgcgggtggtgtacaaccgctcgtcaggattggtgtcaaacgcaccaggagtgcagattcgagtgccgggttttggcaagacgtactcggtggaataccttgactccagcaaactggcgggatacctgcacactctggtgcagaatctcgtgaataacggttatgtgcgggatgaaactgtgagggccgcgccctacgactggcgcctggagccgggacagcaagaggagtactaccgcaaactggcaggactggttgaagaaatgcatgcggcctatggaaaacccgtattcctgatcggacactccctgggttgcctgcatctcctctacttccttctgcggcaaccgcaggcgtggaaggaccggttcattgacggattcatctccctgggcgccccgtggggaggatcaatcaagccgatgctcgtgctggcatccggtgacaaccagggaatcccgatcatgtcgagcatcaagctgaaggaggaacaacggatcactactacgtccccgtggatgttcccgagccgcatggcctggccggaggaccacgtgttcatctcaactccttcgttcaattacaccggacgcgactttcagcgcttttttgcagatctccactttgaagaaggttggtacatgtggctgcagagccgggacctcctggcaggattgccggctccgggagtggaggtgtactgcctgtacggcgtcggtttgccgacccctcggacctacatctacgatcacggcttcccgtacactgatccagtgggcgtcctctacgaggatggcgatgacaccgtggccactagatcaaccgagttgtgcggattgtggcagggacgccagccgcaacctgtccacctgctcccactccatggcatccaacacctgaacatggtgttctcaaacctgactctggagcacatcaacgccatcctcctgggagcctaccgccaaggaccaccggcttcgccgactgcatccccagaacccccgccaccagaa

SEQ ID NO: 4690 - DNA, 1320 bp, Artificial Sequence
  derived and/or modified sequence
atgggtcccccaggatcaccctggcagtgggtcaccctgctgctcgggctgctgcttcctccggcggccccgttctggctgttgaacgtgctgttcccgccgcataccaccccgaaggcagagttgtccaaccacactcgcccggtgattctggtgccggggtgtctgggaaaccaactggaagcaaagctggacaagcctgacgtggtgaattggatgtgttaccgcaagaccgaagatttcttcactatctggctggacctgaacatgtttctccctctgggagtggactgctggatcgacaatacgagagtggtgtacaaccgctcgtcagggctggtgtcaaatgcgccgggcgtccagatccgcgtgccaggtttcgggaaaacctactccgtcgagtaccttgattcctccaagctggctggatatctgcacactcttgtgcagaatctggtcaacaacggatacgtgcgcgatgaaactgtccgagccgctccctacgactggcggctggaaccaggacagcaggaggaatactatcggaagctcgcaggactcgtcgaggaaatgcacgccgcgtacgggaaaccggttttcctgatcggacactcgctggggtgcttgcacctcctctacttcctgctgcggcaaccgcaagcctggaaggataggttcatcgacgggttcatctcgctgggagctccgtggggagggtcgatcaagcccatgctcgtgttggcatcgggagacaaccagggcatccccattatgtcatcaatcaaactgaaggaggaacagcggatcaccaccaccagcccgtggatgttcccgtcacgcatggcgtggccggaggaccacgtgttcatttcgacgccgagctttaactacaccgggcgagatttccaacggttcttcgcagacctccatttcgaagagggttggtacatgtggctccaatcacgggaccttctggcgggactgccggcgccaggagtggaagtgtactgcctgtacggtgtgggtttgccaactccacggacgtacatctacgatcacggtttcccatacaccgatccggtgggcgtgttgtacgaggatggagacgataccgtggcaaccaggtccactgaactgtgcggcctgtggcaaggccggcagcctcaaccggtgcacctcctccctctgcatgggatccagcacctgaacatggtgttctcgaacctgactctcgaacacatcaacgcgatcctcctcggagcctaccgccaaggaccaccggcctcacccaccgcctcaccggaaccgccgcctccggaa

SEQ ID NO: 4691 - DNA, 1320 bp, Artificial Sequence
  derived and/or modified sequence
atgggacctccaggatctccctggcagtgggtgactctgctccttggtctgctcctgccgccagcagcccctttctggttgctgaatgttttgtttccaccgcacacgaccccgaaagccgagctcagcaaccacactagaccagtgattctggtgccgggctgtcttggaaaccagttggaggccaaactcgacaaacctgatgtggtgaactggatgtgctacagaaaaaccgaggatttctttaccatttggctcgacctgaacatgttcctgcctctcggggtggactgctggattgataatactcgcgtggtgtacaatcggtcatcaggccttgtcagcaacgcgccgggagtccagatccgggtgccagggttcgggaaaacgtactcagtcgaatacctcgattccagcaaattggcaggctacctccacactctggtgcagaatctggtgaacaacggttacgtgcgggacgaaaccgtgcgcgcagctccatacgactggaggctggagcccggccagcaagaggagtactacagaaagttggctggactggtggaagaaatgcatgctgcttacggaaagccggtgtttctgatcggtcactcgttgggctgcttgcatctcctttactttctgctccggcaaccgcaagcgtggaaggatcggttcatcgacggctttatctcccttggcgccccatggggaggtagcattaagcctatgctggtgttggcgtccggagacaatcaggggatcccaattatgtcgtcgatcaagctgaaggaagagcagcgcatcaccactaccagcccgtggatgttcccgagccgcatggcctggcctgaagatcacgtctttatctcgaccccttcattcaactacaccggtcgggacttccaaaggttcttcgctgacctgcatttcgaggagggttggtacatgtggcttcagtcgcgggacctgttggccgggttgccagccccgggtgttgaagtgtactgcttgtatggtgtcggattgcccacgccgcgtacctatatctacgaccatggtttcccgtacactgatcccgtcggcgtgctgtacgaggatggcgacgacactgtggcaaccaggtccactgagttgtgcggactctggcagggccggcaaccacagcctgtccatcttctcccactccacggcatccagcatctgaatatggtgtttagcaacctgaccctggaacatatcaacgccatcctcctgggagcctacagacaaggcccgcctgcatcgccgactgcttccccggagccgccgccgccggaa

SEQ ID NO: 4692 - DNA, 1320 bp, Artificial Sequence
  derived and/or modified sequence
atggggcctcccggaagtccgtggcagtgggtgacgctactgctggggctcttactgccaccggctgcaccattctggctcttgaatgtgctcttcccaccacataccacgcccaaagcagagctttctaatcatactaggcctgtgattcttgtgcccggctgcctgggaaaccagctggaagcgaaactggacaagcccgacgtggtgaattggatgtgctataggaaaactgaagactttttcaccatatggctggacttaaatatgtttctgcccttgggcgtggactgttggattgataacacaagagtggtgtacaatcgcagctccggactggtgagcaatgcccctggtgttcaaatccgcgtgcctggattcggaaagacatactccgtggaatatctggactcatcaaagcttgctgggtatctgcacactctcgtgcagaacttggttaacaatggctatgtgcgagacgagacagtgagagctgcaccttacgattggcgcctcgagccgggccagcaagaagaatactatcgcaagttagccggtttggtagaggagatgcacgccgcatatggaaagccagtgtttctgatcggacactctctaggttgcctgcatctcctgtactttctcctgcgccagccccaggcttggaaggaccgctttattgatggctttatctcactaggcgccccatggggagggtcaatcaagccaatgctggtcctggccagtggggacaatcagggtataccaatcatgagctcgattaagcttaaagaggagcagaggataactacaacatctccatggatgttcccctctcggatggcttggccagaagaccacgtgttcatcagcactccttccttcaattacaccggacgggatttccagcgtttctttgccgatcttcacttcgaggagggctggtacatgtggcttcagtctcgtgatctgctggccggcctgccggcaccaggagtagaggtttattgcctgtatggcgtcggccttcccacacccaggacctatatctacgatcatggctttccatatacagatcccgtgggcgtcctgtacgaagacggggacgatacagttgccacacggtctaccgaactttgcggcctgtggcagggaaggcagcctcagcctgtacatttgttgcccttgcacgggatccagcatctcaatatggtgttcagtaacctaacgctagagcatatcaacgccatcctccttggcgcataccggcaggggcctcctgcatcacccaccgctagcccagaaccccctccgccagaa

SEQ ID NO: 4693 - DNA, 1320 bp, Artificial Sequence
  derived and/or modified sequence
atgggacctccaggctccccctggcagtgggtaacactgctgttgggccttctcctgccacccgctgctcctttctggctacttaacgtattattccccccccacacaaccccaaaagccgagctttctaaccacactaggcctgttatccttgtccccggctgtcttgggaatcagctggaggccaagctcgataagcctgatgtcgtcaactggatgtgctatcgtaaaactgaagacttttttacaatctggctggacctgaacatgttcctccctttgggcgtggattgctggattgacaacacgcgcgtagtatataaccgcagctcaggtcttgtttcaaatgctccgggggtccagatccgcgttccgggcttcggcaagacatatagcgtggaatatttggactcctctaaactggccggctacctgcataccctggtccagaacctcgtgaataatggttacgtgcgagacgagaccgtgcgggccgcgccgtatgattggaggctggagcctggacagcaggaggagtattatcggaagctggccggtctggtggaggagatgcatgcggcttatggaaagcccgtcttcttaattggacatagtctgggctgtttgcatttgctatattttctattgcgtcagccccaggcctggaaagaccgctttattgatggcttcatctctcttggcgcaccttggggcgggtccattaaacccatgctcgtgctggcctcaggggataaccaggggataccaattatgagcagcattaaactgaaggaggagcagcgcatcaccacgacctctccatggatgtttccatctaggatggcatggccggaagaccatgtcttcattagcacgccttccttcaactataccggaagagacttccagaggttttttgccgatctgcatttcgaagagggttggtatatgtggctgcagagtagggacctgctggcggggctcccagctcccggagttgaagtctactgcttgtacggggtggggctacccacgcctagaacgtatatctacgatcacgggttcccatacaccgaccccgtcggtgtgctctacgaggacggcgatgacacagtggcaacccgatccaccgagttgtgcgggctgtggcagggtagacagcctcagccggtacatctcctgcccctacatgggatccagcacctcaatatggtgttcagtaacctgacacttgaacatatcaacgcaatcctgttgggagcctaccggcaggggccgcccgcaagtccaaccgcatcgccagagccaccaccccctgaa

SEQ ID NO: 4694 - DNA, 1320 bp, Artificial Sequence
  derived and/or modified sequence
atgggaccccctgggtccccttggcaatgggtcaccctccttctgggactcctccttcctcctgcagccccattttggcttctcaacgtgctgttccctccgcataccactccaaaagcagaacttagtaaccatactaggccggtgatcttggtgccagggtgtctgggcaaccagcttgaagccaagttggacaaaccagatgtggtcaactggatgtgttacaggaaaacggaggatttctttaccatttggctggatctgaacatgtttctgccgctgggagtggattgctggattgataatacgagagtcgtctacaaccgttcatcagggctggtgtccaatgcgcctggagtgcagatccgggttcctggctttggtaaaacctactccgtcgaatatctggattcttcaaaactggcagggtaccttcatactctggtgcaaaacctggtcaataacgggtacgtgcgcgacgagactgtccgtgcagcaccttacgattggcgcctcgaaccaggccagcaagaagaatactatcgtaagctggcaggccttgtggaagaaatgcatgccgcttatggcaagcccgtgtttctcatcggccatagccttggatgtctgcatctcttgtactttttgctcagacagcctcaggcctggaaggatcgattcattgatggtttcatcagcctcggggcgccttggggaggctcgattaagccaatgcttgtgctggcatccggggataatcagggcattcctattatgtcgtcgattaagctgaaagaagagcaacggattactacgacttccccctggatgtttccttcgagaatggcgtggcctgaagatcatgttttcattagcaccccctccttcaattacactggacgggattttcaaaggttctttgcagatttgcactttgaagaaggatggtacatgtggctccaatcgcgtgaccttctggcagggcttcctgcccctggagtggaagtgtactgcctgtacggagtgggactgcctactcctagaacttacatttatgaccatggattcccgtacaccgatcccgtcggagtgctgtacgaggatggtgatgacacggtggcaacccgatcaactgagctctgcggactctggcaaggtcggcagccacagcctgtgcatcttcttcctctccatgggattcaacacttgaatatggtgttttccaacctgactcttgagcacattaacgcaatacttctcggagcatatagacagggacccccagcatcccctaccgccagcccggagcctccacccccagag

SEQ ID NO: 4695 - DNA, 1320 bp, Artificial Sequence
  derived and/or modified sequence
atgggcccaccaggctccccctggcaatgggtgactttgctcctgggactgctcctgccgcccgcggcgcctttctggctgctcaacgtgctgttcccaccgcacaccactccaaaggccgagctctccaatcatacccgacctgtcatcctggtgcctggctgtctgggaaatcagctcgaagcgaaactggataaacctgatgtggtgaactggatgtgctaccgcaagactgaggactttttcacgatctggctcgatctcaatatgtttttgccgctcggagtcgactgctggatagacaatacgcgcgtggtgtacaacagaagcagcgggctcgtctcgaacgcacccggagtgcaaatcagagtgccggggtttggcaaaacctactcagtggaatacctggatagctcgaagctcgctggctacctgcacaccctggtgcaaaatctggtgaacaacggatacgtgagggacgaaacggtgcgggcggccccatacgactggcgcctggagcccggacagcaggaggagtattatcgcaaattggccggactggtggaagaaatgcacgcagcctacggcaaaccagtttttctgatcgggcactccttggggtgcttgcatttgctgtactttctgctccgtcaaccccaggcctggaaggataggttcattgatggattcatctccctcggagcaccttggggaggtagcatcaagccgatgctggtgttggcctcaggtgataaccagggcatcccaatcatgtcgtccatcaagctgaaagaggagcagcggatcactactacctccccgtggatgttcccatcccgcatggcctggcctgaggaccacgttttcatctcgaccccgtcatttaactacaccgggcgtgattttcagcggttctttgctgatctccattttgaagaaggatggtacatgtggctgcagtcccgagatcttctcgctggacttcccgcgccgggggtggaggtctactgcctgtacggtgtgggcctcccaactccgcggacctacatttacgaccacggattcccgtacaccgacccggttggcgtgctgtacgaagatggtgacgacactgtggcgacccggtctaccgagctctgtggcctgtggcagggccgccagccccagccggtgcacctgttgccgcttcacggaatccagcacctgaatatggtgttctcaaacctcactctcgagcacatcaatgctattctgctgggtgcatacaggcaggggccgccggcctccccgaccgcttccccggagccgccacctccagaa

SEQ ID NO: 4696 - DNA, 1320 bp, Artificial Sequence
  derived and/or modified sequence
atgggtcccccaggctccccctggcagtgggttaccctgctccttggattgttgctcccacccgctgctcccttttggcttctgaacgtgctgttcccacctcacaccaccccaaaggccgagcttagcaaccacaccagaccagtgatccttgtacccggctgcctgggcaaccagttggaggccaagctggacaagcccgatgttgttaattggatgtgctatagaaaaacagaagatttctttactatctggttggacctgaacatgtttcttcccctgggagttgactgttggattgataacacacgtgtggtctacaacaggtcttccggacttgtcagtaacgctcccggtgtccaaattagagtgcccggatttggtaaaacctattctgttgagtacctggattcttctaagctggccggctatttgcacactttggtgcagaacctggtgaacaatggctatgtaagagacgagaccgtccgcgcagctccttacgattggagactcgagcccggtcaacaagaggagtactaccgtaaattggctggtttggtcgaggagatgcatgccgcttatggaaaacccgtctttctgatcggccattctctcggttgtctccaccttttgtattttctgcttaggcaaccccaggcttggaaggaccgtttcatcgatggcttcataagtttgggtgccccctggggtggatctatcaagccaatgctcgtcctcgcatctggagacaaccaaggcatccctattatgtcctccattaagctcaaggaggagcaaagaatcaccaccacctcaccttggatgttcccatcacgcatggcctggcctgaggaccatgtattcatctccacaccatcctttaactacaccggtagggatttccagaggtttttcgcagacctgcacttcgaagaaggttggtacatgtggttgcaatcacgcgacctgctcgcaggccttcccgccccaggtgtggaagtttattgcctttatggcgtcggcctgcctacaccccgtacttacatctatgatcatggctttccctacaccgaccccgtcggcgtcctctatgaagatggtgacgatacagtcgctactagatccactgaactctgtggcctctggcagggaaggcagcctcaacctgtccacttgctcccattgcacggtatccaacacctcaacatggtcttctctaacctgaccctggaacacataaatgcaattcttctgggtgcttataggcagggccctcctgcttctcctaccgcttctcctgagcctcctcccccagaa

SEQ ID NO: 4697 - DNA, 1320 bp, Artificial Sequence
  derived and/or modified sequence
atgggtcctccaggatccccctggcaatgggttacattgttgctcggcttgctgctgccccctgccgccccgttctggctgttaaacgtcctgttccctcctcacacgacccccaaagctgaattaagtaaccacacccgacctgtgatcttggtgcctggatgtctcgggaatcagctcgaggcaaaactcgacaagcccgacgtagtgaattggatgtgttaccggaaaaccgaagacttttttacaatctggctggacttaaacatgtttctgcctctgggcgtggattgttggatagacaacacgagggtggtctacaacaggtccagcggtctggtgtcaaatgccccgggcgtccagattcgtgtccccggattcgggaagacatacagcgttgagtacctggacagtagcaagttggctggatacctccacacactggttcagaacctagtgaataatggatacgtgcgggatgaaacagtacgcgccgccccttacgactggagactagagccagggcagcaagaagagtactaccggaagctagccggcctggtggaagagatgcacgctgcgtacgggaaacccgtcttccttataggccactcgctaggctgcctccacctgctatatttcctactcaggcagccacaggcatggaaagacaggttcattgacggcttcatctcactgggcgccccatggggtggctcgatcaagccgatgctggtgctggcctccggagataaccaaggcataccaataatgagcagtatcaagctgaaggaggagcagcggattactacaacaagcccgtggatgttcccaagcagaatggcatggcctgaggaccatgtgtttatctctaccccatcttttaactacaccgggagggactttcagcgcttctttgccgacttacacttcgaggaaggatggtacatgtggctgcagagcagggatctgctcgccgggttacctgctcctggtgtagaagtgtattgcctttacggcgtcgggctgcctactccaaggacctacatttatgaccacggatttccctacaccgatcctgttggcgttctgtacgaagacggcgatgatacggtggccacccgatccaccgagctgtgcggactgtggcaggggagacaaccacaacctgtccacttactgcctcttcacggtatacagcaccttaacatggtcttctcgaacttaacactggaacacattaacgccattctcctgggagcctataggcagggtcctccagcctcgcccactgcctcgcccgagccacctccgcccgaa

SEQ ID NO: 4698 - DNA, 1320 bp, Artificial Sequence
  derived and/or modified sequence
atgggcccccccggatccccctggcagtgggtcactctcctcctcggtcttctgctccccccggccgccccgttttggctactcaatgtcttgttccccccccacacaacacctaaagcagagctgagtaaccacactaggcctgtgattctggtgccaggctgtttagggaaccaactcgaagccaagttggacaagcccgatgttgtgaattggatgtgttatagaaagactgaggacttcttcactatctggctggacctgaatatgtttctccccctcggagtagattgctggatcgataacacaagggtggtgtacaatcgaagctccggtttggtatccaatgctcctggggtgcaaatccgcgtgccgggtttcggcaagacctattcggtggagtatctggactcgtcgaagctggccgggtatttacatacactggtccagaatctggtcaataacggctacgtacgagatgagactgtgagggctgcaccctatgattggcgccttgaacccgggcagcaggaagagtattataggaaattggccggcctggtggaggagatgcacgcggcatacggtaagcccgtgttcttaatcgggcatagcctgggatgcctacatttgctttactttctgctgcgacagccacaagcctggaaggatcgattcatcgacggatttatctctctgggcgcgccttggggcggctcgatcaagcccatgctcgtgttggcttcaggagataatcaggggattcctatcatgagctccataaagctcaaggaggaacagaggataaccaccaccagcccttggatgtttccgtccagaatggcttggccagaggaccatgtgttcatttcgacaccatcctttaactacaccggacgtgactttcagcgattctttgcagacctccactttgaggagggttggtacatgtggcttcagtctagggacctcctggctggcctcccagcacctggagtagaggtgtattgtttgtatggagtgggactgccaacacctcgaacctacatctatgaccacggttttccgtacacggatcccgttggcgtcctgtacgaagatggcgatgatactgtggccaccaggtcaaccgaactgtgtggactgtggcagggacgccagcctcagcccgtccaccttttaccactgcacggaattcaacacctgaatatggtgttcagcaatctgaccctggagcacatcaatgctatcctccttggcgcctacaggcagggccctccagccagccccacagcctcccccgagccacctcccccagaa

SEQ ID NO: 4699 - DNA, 1320 bp, Artificial Sequence
  derived and/or modified sequence
atgggaccccccggaagtccatggcaatgggtgactttactgttaggcctgttgttgcctccagccgcccccttctggctgctcaatgtgctgtttccccctcatactacaccgaaagccgaactcagtaatcacactcgaccagttatccttgtgccaggctgcctaggcaatcagttagaagctaagctggataaacctgacgtggtaaactggatgtgctataggaaaactgaagatttctttaccatttggctcgacttaaatatgtttctcccactgggcgtggattgttggatcgacaacacacgagtggtatataacagatcatctggacttgtctccaatgcacccggggtccagatcagagtgcccggatttggcaagacatattccgtggaatacctggactctagcaaactcgccgggtacctgcacactcttgtgcagaacctggtaaacaatggctacgttcgagatgaaaccgtgcgagctgcaccctacgattggaggttagagccggggcagcaggaagagtattacaggaagttggcggggctggtggaggagatgcacgccgcctacgggaagcctgtctttctcattgggcattcactcggatgcctgcatttgctctatttccttcttcgtcagcctcaggcttggaaggacagatttatcgatggttttatctctcttggtgcaccatggggaggctccatcaaaccaatgctggtgctggcaagtggcgacaatcaagggatccctatcatgtcctcaattaagctcaaagaggaacagcgcatcacaaccacctccccctggatgttcccgtcccgaatggcatggcctgaggaccatgtgtttatctccactcctagctttaactacaccggccgtgatttccagcgattcttcgccgacctgcactttgaagagggatggtacatgtggctgcagtccagggacctgctggcaggactgcccgctcctggggttgaagtgtattgcctttatggggtggggctgcctaccccaaggacctacatatacgatcatggcttcccgtatactgatcccgtaggagtgttgtacgaggatggtgacgatactgtggctacccgcagcaccgaattgtgcggactgtggcagggcaggcaaccacagccggttcacttactcccccttcacgggatccaacacctgaacatggtgttcagtaatcttacattagaacacatcaatgccattctgttgggtgcttaccgccaaggcccacctgctagtccaacagcctcacccgagccacccccgcctgaa

SEQ ID NO: 4700 - DNA, 1320 bp, Artificial Sequence
  derived and/or modified sequence
atgggacctcctggatccccgtggcagtgggtgacccttctgttggggctgctccttccaccggcagcgccgttttggttgctgaacgtgcttttccctcctcataccacgcccaaggccgagctgtcgaaccatactcgccccgtcatacttgtgcctggctgtttgggtaatcaattggaggcaaagctggacaagccagatgtggtgaattggatgtgctaccgtaagaccgaagatttctttacgatttggcttgacctgaatatgttcctgccccttggagtcgactgttggatcgataacaccagggtggtttacaatcgctcgtcgggtctggtatccaacgcccccggtgtgcaaatacgcgtcccaggttttggcaagacctactcggtagaatatctggattcatcgaaactcgcaggatatctgcacacccttgtccagaacctggtgaacaatggttacgttcgcgatgaaaccgtgcgggctgcaccatacgattggcggcttgaaccaggccagcaggaggaatactacagaaaactcgcaggtcttgtcgaagaaatgcatgcagcttacggcaagcccgtatttcttattggccactccctgggttgtttgcatctcctgtactttctgctcagacagcctcaggcttggaaagataggtttatcgatggcttcatttcactcggcgccccttggggaggatctatcaagcccatgctcgtgttggcatctggagacaaccagggtattccgattatgtcctcaatcaaattgaaggaggagcaaagaatcactactactagcccatggatgttccccagcagaatggcatggcctgaggaccacgtgttcatttcgaccccatcatttaactacaccgggcgggacttccaaaggttttttgccgaccttcattttgaagaaggttggtacatgtggcttcaatcgcgggaccttcttgcgggactcccagcacctggcgttgaagtgtattgtctgtacggagtgggacttccaactcctaggacttacatctacgatcatggtttcccctacactgatcctgtgggggtgctctacgaggatggggatgacactgtcgcaacccgttcgaccgaactttgcgggctctggcaaggaaggcaacctcagcctgtgcacctcctgccgcttcatgggatacaacatctgaatatggtgttttcgaaccttactctcgaacacattaacgcgatactcttgggagcgtaccgccaaggacctcctgcttctccaaccgcgtccccagaacctcctcctccggaa

SEQ ID NO: 4701 - DNA, 1320 bp, Artificial Sequence
  derived and/or modified sequence
atgggcccacccggttctccttggcaatgggtgactctgctgcttgggctacttctcccaccggcagctccattctggctcctcaacgtgttgtttccccctcacacgactccaaaggccgaactgtccaaccatactcgacctgtgattttagtgcccggatgccttgggaaccagctggaggcaaaattagataagcccgatgtcgtcaactggatgtgttaccgaaagactgaggatttttttaccatatggcttgacctgaatatgtttttgcctcttggagttgattgttggatcgataatactagagtggtgtacaatagaagttcgggcctggtatctaacgccccaggtgtacaaattagggtgcccggttttggtaagacctacagtgtggagtacctggatagcagtaagcttgccggctacctgcacactctcgtgcagaacctcgtaaacaacgggtatgtgagagatgagacagtgcgggcggccccctatgactggcgcttggaacccggccagcaggaggagtattatagaaagttggcagggcttgtggaggagatgcatgctgcatacgggaagcccgtgtttctaatcgggcactccctcggttgcttgcatcttctgtattttctcttgaggcagccccaagcctggaaggaccggttcatcgatgggtttatctccttaggggcaccctggggcggctctattaagcccatgttagtgctagcctcaggtgacaatcagggtatcccgattatgtcttcaatcaagctgaaagaggagcagaggatcaccacgacatccccttggatgttcccctccagaatggcttggcctgaggaccacgtttttatatccactccatcgttcaactatactggccgggacttccagagattcttcgcagacttacacttcgaggaaggctggtacatgtggctgcagagtagagacttgctcgccgggctgccggcccctggcgtcgaggtgtattgcctgtacggggtgggactgcccacaccacggacctacatctatgaccatggtttcccttataccgaccccgtgggcgtgctttatgaggatggtgatgacacagtggcaacaaggagtacggaactgtgcggactatggcaaggcaggcagccgcaaccggtccatcttcttcctctgcatgggatacagcatctgaatatggtgttttctaatctgactcttgagcatataaacgcaatcttactcggagcctaccggcaggggcctccggccagccccaccgcaagtccagaacctcctccacctgag

SEQ ID NO: 4702 - DNA, 1320 bp, Artificial Sequence
  derived and/or modified sequence
atgggcccgccaggaagcccgtggcaatgggtcaccctgctcctcggactcttgctcccgccagccgccccgttttggctgctcaacgtgttgttcccgccgcacaccacccctaaggcagaattgtccaaccacaccaggccggtgattttggtcccgggctgcctgggcaatcagcttgaagccaaacttgacaagccagatgtcgtgaattggatgtgttatagaaagacggaagatttcttcaccatctggttggacctgaacatgttcctgcctttgggcgtggactgctggatcgacaataccagagtcgtctacaaccggtcgtccggtctggtcagcaatgcaccgggagtgcagatacgggtgccaggattcggaaagacttacagcgtcgagtacctcgactcatcgaagctggcgggttaccttcacactttggttcaaaacctggtcaataacggatacgtcagagacgaaaccgtgcgggccgcaccctacgattggcggctggagccgggccagcaggaagaatactaccgcaaactggcgggtctggtcgaagaaatgcacgcggcttacggcaagccagtgtttcttatcggccactcgctcggatgcctgcacctgctgtacttcctgctgcgccagccacaagcgtggaaggaccggttcatcgatggattcatctcactcggagccccgtggggaggctcgatcaagccgatgcttgtcctggcctccggtgataaccagggaattcctattatgtcatctattaagctgaaagaagaacaaagaattaccactacctccccctggatgtttccctcgaggatggcgtggccggaggaccacgtgtttatcagcactccatcattcaattacactggacgggatttccagaggttcttcgccgatctgcattttgaagaaggctggtacatgtggctccagtcgcgcgatctgttggctggtttgccggccccgggggtggaagtgtactgcctttacggggtcggtttgcccaccccgagaacttacatctatgaccacgggttcccgtatactgaccccgtgggagtgctgtatgaggatggagacgataccgtggcgacccgatccacggagctctgcggcctgtggcaagggagacaaccacaaccagtgcatctgctgcccctgcacggaatccagcaccttaacatggtcttttcaaatcttactctggaacatatcaacgccatcctcttgggagcataccgccagggaccgccggcctcgcctaccgcttccccggagcctccacccccggaa

SEQ ID NO: 4703 - DNA, 1320 bp, Artificial Sequence
  derived and/or modified sequence
atgggtcctccaggatccccctggcagtgggtgactcttctgctgggcctgctactgcctcccgcggcccccttctggctattgaacgtgctcttccctccacacacaaccccaaaggccgagctgtcgaatcatactagacccgtcatcctggtgccgggctgtctcggaaaccagttggaggccaagctagataagccggacgtagtgaactggatgtgttacagaaagacggaggacttcttcaccatctggctcgatttgaacatgttcctgccgctgggcgtggattgctggatcgacaatacacgagtcgtctacaatcgcagcagtggccttgttagcaacgcccccggtgtgcaaatacgtgttcccgggtttggcaaaacctacagtgtcgagtacctagacagtagcaagctcgccggctacctacataccctcgtgcaaaatctagtgaataacgggtacgtccgagacgaaacagtacgcgctgctccctacgattggcggttggaaccgggccagcaggaagagtattaccgtaagctggccggcctggtcgaggagatgcacgccgcctacggtaagcccgttttcttaattggtcactccctcggatgcctccaccttctttatttcctgttgcgccagccgcaggcttggaaggataggtttatcgacggctttatcagcctcggtgccccctggggaggaagtatcaagccaatgctggtcctggccagcggggataaccaaggaataccaatcatgtcctcaataaagctaaaggaggagcagcgaattaccaccacgtccccctggatgttcccctcacggatggcttggccagaggaccacgtgtttatatcgactcccagttttaattacacgggacgagactttcagcgattcttcgccgatttgcacttcgaggaaggctggtacatgtggctgcagtcccgggacctcctggctggcttgcccgcacctggcgtggaggtctactgtctgtacggtgtgggcttgcctactccgcgcacctacatctatgaccatggctttccttatacggacccggttggagtgctgtatgaggatggcgatgatacggtagccacacgcagcacagagctgtgcgggctgtggcaaggtcgccagccccagcccgtgcacctactgcccctgcatgggatccagcacctgaacatggttttcagcaacctgacgctcgagcacatcaacgctattttgcttggagcctaccgacagggtccgccggctagtcccaccgcgtccccggagcctcctccccctgaa

SEQ ID NO: 4704 - DNA, 1320 bp, Artificial Sequence
  derived and/or modified sequence
atggggccccccggctcaccctggcaatgggttaccttgctcctcgggttgctgctgcctccagccgccccgttctggctgcttaacgtgctcttcccaccgcacaccacacccaaggctgagctgtcaaatcatacaaggcccgtgatcttggttcctggctgcctgggcaatcagcttgaagccaagctcgacaaaccggatgttgttaactggatgtgctacagaaaaactgaggattttttcacaatttggctggacttgaatatgtttctgcctcttggtgttgactgttggattgataacacaagagtcgtgtacaaccggagttcaggactggtgtcaaacgccccaggtgtgcagatcagggtgccgggtttcggtaaaacctattcagtggaatatctggacagctcaaagctcgccggatatctacacacactggttcaaaacttggtgaacaatggctatgtacgagatgagaccgtgagagcagccccatacgactggaggttggagcctggacagcaggaagagtactacagaaagctcgccggactggtggaggaaatgcacgctgcctacggcaaacccgtcttcctcatcggacattcattaggctgccttcatctcttatattttctgctgcgccaaccccaggcctggaaagatcgcttcattgacggcttcatttccctgggggctccttggggaggctctataaagcctatgcttgttctggcttctggagataatcaaggaatccctatcatgagctctatcaaactaaaggaggaacagagaatcaccacaacgagcccatggatgtttccttctcgcatggcgtggcccgaggaccacgtgtttatctcaactccttcgttcaactatacaggacgggactttcaacgattttttgccgaccttcacttcgaggaggggtggtatatgtggctgcagtcgcgagacttgttggctgggctgcctgcccctggagtggaagtttactgcctgtatggcgtggggcttcctactccaagaacttatatctatgatcatgggttcccatacacagacccagttggtgtgctctatgaggacggtgacgacactgtggcgaccagatccaccgaactctgcgggctatggcaaggcaggcagccccagcctgtccacctgctgccactgcacggcatccagcacctgaatatggttttcagtaacctgacactagagcacatcaacgctattctactgggcgcgtacagacagggccccccagcaagccctaccgcttctccagagcctcctccccctgaa

SEQ ID NO: 4705 - DNA, 1320 bp, Artificial Sequence
  derived and/or modified sequence
atgggaccacctgggtcgccttggcaatgggttactctcctgctgggtctgttgcttccgccagcagctccgttctggcttctgaacgtgctgttccctccgcataccaccccaaaggcggaactctccaaccacacgcgaccggtcattcttgtgccggggtgtctcggtaaccagcttgaagcaaagctcgataaacctgatgtggtcaactggatgtgttatcgcaagactgaggactttttcaccatatggctcgacctgaatatgttcttgccccttggagtggactgctggatcgataacacccgtgtggtctacaaccgatcgtccggccttgtctcaaatgcaccaggggtgcagatcagggtccctgggtttggaaaaacttactcggtagagtaccttgactcaagcaagttggcaggctacctccacacccttgtgcagaatcttgtgaacaacggatacgtgcgggacgaaaccgtgcgagcagctccctacgattggagacttgaaccaggacagcaagaggaatactacagaaaacttgcgggactggtggaggagatgcacgcagcatacggaaagcctgtgttcctgattggccattcccttggttgccttcatctcttgtactttcttcttcggcaaccacaagcgtggaaggatcgattcattgacggcttcatttccctcggagccccttggggaggatcgatcaaaccaatgcttgtgctcgcatccggtgataaccaaggtattcccataatgtcgtcaattaagctcaaggaggaacagagaatcaccacgacctcaccatggatgttcccctccaggatggcgtggcccgaagatcacgtctttatctctactcctagctttaactatactggtagagatttccaacgctttttcgcagaccttcactttgaggagggctggtacatgtggctgcagtccagagatttgctcgcgggactccctgcacctggcgtggaggtgtactgtctctacggcgtcgggcttccaactcctaggacttatatctatgatcacggctttccgtacactgaccctgtgggtgtcctgtatgaagatggtgatgacactgtggcgacccgttcgaccgaactgtgtggactgtggcaaggacgccaacctcaaccagtgcacctgcttcccctccatggcattcaacacctcaatatggtgttctccaatctgacccttgagcatatcaacgcaatcctcctcggagcatacagacaaggtcctccggcgtcgccaactgcaagccccgaaccacctcctccagaa

SEQ ID NO: 4706 - DNA, 1320 bp, Artificial Sequence
  derived and/or modified sequence
atgggacctcctgggagcccgtggcagtgggtgacgctgctgctcggactgctccttccgccggctgctcccttctggctgcttaacgtgctgttccctccccacactaccccaaaggcagagctgtcgaatcacacccggcctgtcatacttgtgccgggttgcctgggcaaccagttggaagccaagctcgataagcctgatgtcgtgaattggatgtgctacagaaaaactgaggacttctttaccatctggcttgatttgaatatgtttctgccattgggagtggactgctggattgacaacacccgtgtggtgtataatcgctcttccgggctcgtgagcaacgcccccggcgtccagatcagggtaccgggattcggcaagacctactccgttgaatacctggactcctcgaagctcgcaggctacctgcatacgctggtccagaatctggtcaataatggctacgtccgcgacgaaaccgtcagggcggctccttacgattggcgcctcgaacccgggcagcaagaagaatactatcggaagctggcggggcttgtggaggaaatgcatgcggcctacggtaagccggtattcctgattggccactcgcttggatgtctccacctcctgtactttctccttcgtcagcctcaggcctggaaagaccgcttcatcgacggatttatctcactgggagccccatggggaggaagcatcaagccaatgttggtcctggcgagtggcgacaaccaaggaatcccaattatgagctcaatcaaactcaaggaagaacagagaatcaccacgactagcccctggatgttcccgagccggatggcatggccggaggatcacgtgttcatctcaaccccgtcgttcaactacactgggcgggacttccagcggtttttcgctgacctgcattttgaagaggggtggtacatgtggcttcaatcacgcgacctgctggccggccttccggcgcctggcgtggaagtctactgcctgtacggcgtgggactgccgactcctcgcacctacatttacgatcacggcttcccgtatactgaccctgtgggtgtgctctacgaggacggggatgataccgtggctacccgatcgaccgagctgtgtggactttggcagggacgccagccgcagccggtgcatctcctgccgctgcacggaatccaacatctgaacatggtgttcagcaacttgactctggagcacatcaacgcgatcctcctcggagcgtacagacaagggccccccgcctcaccaactgcctccccagaacccccgccgccggag

SEQ ID NO: 4707 - DNA, 1320 bp, Artificial Sequence
  derived and/or modified sequence
atgggaccgccagggtccccttggcaatgggtcactctgctcctcggactgctgctcccgccagctgccccgttttggctcttgaacgtcttgttcccgccgcataccaccccaaaggcggagttgtcgaatcatactcggcctgtgatcctcgtgccgggatgtctgggaaaccaactcgaggcaaaactggataagccagacgtcgtgaactggatgtgctataggaaaactgaagatttcttcacgatctggctggatctcaatatgtttctgccgctgggagttgattgctggatcgacaatacccgcgtcgtgtacaaccggtcctccggcttggtgtcgaacgcgcctggcgtgcagatcagagtgccggggtttggaaagacttacagcgtcgaatacctggattcaagcaagctggcgggctacctgcacaccctggtccagaaccttgtgaacaacggatacgtgcgcgatgagactgtcagggccgcgccgtacgattggagattggagccgggtcagcaggaagaatactaccgcaaactggcagggctcgtggaagagatgcacgctgcatacggcaagcccgtgtttctgatcggccatagccttggatgccttcacctcctgtactttctgctgcgccaacctcaggcgtggaaggaccggttcatcgacggattcatctcacttggcgcaccctggggcggcagcatcaagcccatgcttgtgctggcgtccggggacaatcagggaatccctatcatgtcctcgattaaactcaaggaagaacagagaatcaccaccacctccccctggatgttcccaagcagaatggcatggccggaagatcatgtgttcatatcaactccttcctttaactacactggaagagatttccagagatttttcgcggatctgcacttcgaggaaggatggtacatgtggcttcaatcaagggacctcctggcgggactcccggccccgggagtggaagtgtactgcctttacggcgtcggcctccccaccccgcggacctacatctatgaccatggatttccgtacactgacccggtgggcgtgctctacgaggacggcgacgataccgtggcaacccgctccaccgaactctgcggcctgtggcagggaaggcagccgcaacctgtccatttgctgccgctgcatggcattcaacacctcaatatggtcttttccaacctgacccttgagcacatcaacgctatcctgctgggggcgtaccgccagggacctccggcttcacctacggcttcgccggaaccccctccacctgag

SEQ ID NO: 4708 - DNA, 1320 bp, Artificial Sequence
  derived and/or modified sequence
atgggaccccctggctctccttggcagtgggtaactctgctgctgggattgctgctgccccccgcagcacccttttggctgttgaacgtactctttccacctcacacgacacctaaagctgagctgtctaatcatacccgcccagtgatcctcgtaccaggttgtttgggcaatcaactggaagccaaactggacaagccggatgtggtaaactggatgtgttatcgcaagacggaagacttctttactatttggctggacctgaatatgtttctccctctcggggtagattgctggatcgacaataccagggtggtctacaatagatccagcggtcttgtcagcaatgcgccaggagtccagatcagagtccctggtttcggaaagacgtactctgtagagtatttggattcaagtaaacttgccggctatttgcatacactcgtgcagaatctggtgaacaatgggtacgtccgggatgagacggttcgagccgccccttacgactggaggctggagcccggtcagcaggaggagtactacaggaagctggctgggctcgttgaggagatgcacgctgcctatggaaaacctgtgttcctcatcggccacagccttggatgtcttcacctgctctattttctgctgcggcaaccgcaggcctggaaggaccgattcattgatggattcattagcctcggggcgccatggggcggcagtatcaaacccatgcttgtgctcgcatctggagacaatcaaggaatacctatcatgtcttctattaagcttaaggaggagcaaagaatcaccaccacctcaccgtggatgttcccttcacgaatggcttggccagaagaccatgtattcatttctacccccagcttcaactacactggccgagatttccaacgattttttgctgacctccatttcgaggaaggctggtatatgtggcttcagtctcgcgatcttctcgcaggacttccagcccccggagtagaggtttattgcctttacggagttggcctgcccaccccaagaacatatatctacgatcacggattcccttacactgatccagtgggggtcctgtacgaagacggcgacgataccgttgccacccggagtaccgagctgtgtggtctgtggcagggccgccaacctcaacccgtgcacctgcttcctctccacgggatccaacacctgaatatggtgttttcaaacctgacactcgaacacattaatgcgatcctcctgggcgcttacagacaggggccccctgccagcccaacagctagtcccgaacctccaccgcccgag

SEQ ID NO: 4709 - DNA, 1320 bp, Artificial Sequence
  derived and/or modified sequence
atgggaccgccgggcagcccatggcagtgggtgaccctgttgctgggccttctcctgcccccagcggcccctttctggctgttgaatgtactgttccctccacatacgacgccaaaagctgagctgtcgaatcacactagacctgtgatactggtacctggttgcctgggcaaccagctggaggccaagctcgacaaacccgacgtcgtgaactggatgtgttacaggaaaactgaagatttcttcactatctggttggatctgaatatgttcctgcccctgggggtggactgttggatcgacaacaccagagtcgtctacaaccggtcatcaggcctggtgtcgaacgcgccgggtgtccagatccgcgtgcctggattcggaaaaacctactcggtcgagtacctggactcgtcgaagctggccggctatctccacacgctcgtgcagaacctggtgaacaatggttatgtgcgggacgagactgtgagagctgccccgtacgattggcgcctcgagcccggacaacaagaagagtactaccgaaagttggcgggacttgtggaagaaatgcacgcggcctacggaaagccagtctttctgattggacactctttgggctgccttcacctcctgtactttctgctcagacagccgcaggcatggaaggatcgctttattgacggctttatctccctgggggccccatggggaggatcgatcaaacctatgttggtccttgcttccggtgataaccagggaatcccgatcatgtcaagcatcaagctgaaggaagaacaacgcatcaccactacgagcccgtggatgtttccgagccggatggcctggccggaagatcatgttttcatctccactccgtcgttcaactatactggaagggacttccaacgttttttcgcagacctgcatttcgaggaaggatggtacatgtggctccagtccagagatcttctggcaggcctcccagctccgggggtcgaagtgtactgcctctacggagtgggcctccccacccctcgtacttacatctacgatcacggattcccgtacaccgacccagtgggtgttctctacgaggacggagatgacaccgtggctactaggtctaccgagctttgcggcttgtggcaaggacgccaacctcagccggtccatttgcttccgctgcacggaattcagcatctcaacatggtgttttcgaatctgaccctggaacacatcaatgcgattctcctcggtgcttatcggcaggggccccctgcctcccccactgcgagccctgagccacctccgccggag

SEQ ID NO: 4710 - DNA, 1320 bp, Artificial Sequence
  derived and/or modified sequence
atgggacctcccgggtccccatggcagtgggtgacactactgctgggcctactgttgcctcctgccgctcccttttggctgttgaacgtgctcttccccccccacaccaccccaaaggccgaattatcaaaccacacacggcccgttatcctcgttcctggctgcctaggcaatcagctagaggctaagctggacaaaccagacgtggtaaactggatgtgttaccggaaaacagaagacttctttactatttggttggacttgaacatgttcctccctctgggggtcgactgttggattgataatactcgagtcgtatacaatcgctcgtcgggtcttgtgagtaacgcccctggggtccagatccgggtaccaggcttcggcaaaacgtattctgtggagtatctggactcctcaaagctggcaggttacctgcacactctggtgcagaatctagtgaacaatggatatgtgagagacgagaccgtgcgagccgccccctatgattggagacttgaacctgggcagcaggaggagtactataggaaactggccgggctggtagaggagatgcacgccgcttacggcaagccggtttttctgattgggcatagtcttggatgtcttcacttactctatttcttactccgccaacctcaagcatggaaggacagattcatagatggattcatcagcctaggtgccccctggggggggtcaatcaaacctatgctggtgctggcctccggcgataaccaaggcatcccaatcatgtcttctatcaagctcaaggaggaacagagaattacaacgacctctccttggatgttccctagccggatggcatggccagaagaccatgtgttcattagtactccctcatttaactacacaggcagagacttccagcgcttcttcgcagatctgcacttcgaagaggggtggtacatgtggttacagtctcgcgacctgctcgccggactccccgcgcctggagtggaggtgtactgcctatacggcgtgggactgccgacaccaaggacttatatctatgatcatgggttcccctacacagaccccgttggcgtcctgtacgaagatggcgatgataccgtcgcgacaagatcaactgaactgtgcggcctatggcaggggagacagccccagcccgtccacctgctgcccctgcacgggattcagcacttgaacatggtgtttagcaaccttactctagagcacatcaacgccatactcctgggggcataccggcagggcccccctgccagcccaaccgcctcccccgagccaccaccaccggaa

SEQ ID NO: 4711 - DNA, 1320 bp, Artificial Sequence
  derived and/or modified sequence
atgggcccgccaggcagcccatggcaatgggtcaccctgctactgggtctgctgttgccaccggccgcgccgttctggctgctgaacgtgctgttccctccgcatactacccctaaggctgagctgagcaaccatacccgcccggtgatcctggtgccgggctgtcttggcaatcagctggaggcaaagctggacaagccagacgtcgtgaactggatgtgttaccgtaaaaccgaggatttcttcactatatggcttgacctcaacatgtttctgccgctgggtgtcgactgttggatcgacaatactcgcgttgtgtacaataggtcctccggcctggtcagcaacgcccccggtgtccagatcagagttccgggtttcggaaagacgtacagtgttgaatatctggatagctcgaagctagcgggttacctccacactctggttcaaaacctggtgaataatggctacgtgagggacgagaccgtgcgagccgccccgtatgactggcgtctggagcctggccagcaagaagagtattaccgcaagctggcggggctcgtagaagaaatgcatgcagcttacggaaagccggtcttcctgattggtcatagcctgggttgcctgcatctcttgtatttcctgctgcgccagcctcaggcatggaaagaccgatttatcgatggctttatttctctgggggcaccatgggggggatccattaagccaatgctggtcctggctagcggggacaaccagggcattccgattatgagctccattaagctgaaagaagagcagcgcattaccaccacgtccccgtggatgttccctagccgcatggcttggccggaggatcacgttttcatttctacccctagctttaattataccggcagggatttccagcgcttcttcgcggacctacacttcgaggaaggatggtacatgtggttgcagagccgcgaccttctggctggcttaccggcgccgggtgttgaggtgtactgtttatatggcgtgggcctgccgactcctaggacctatatctacgaccacggcttcccttacaccgacccagtgggtgtcctctacgaagacggcgatgatactgttgctacgagatctaccgaactgtgcggcctgtggcagggtcgccaaccgcagccggttcacttgctgcctctgcacggcatccagcacctgaacatggtgtttagcaaccttacccttgagcatattaatgcaatcctgttgggggcataccgtcaaggccctccggcaagccccactgcctcccctgagccgccgccaccggag

SEQ ID NO: 4712 - DNA, 1320 bp, Artificial Sequence
  derived and/or modified sequence
atgggtcctcctggttctccctggcagtgggtgactttgttgctgggcctgctgctgcccccggccgcaccgttctggcttctgaacgtgctcttccccccacacaccactccgaaagctgagctgtcgaaccatactcgtccagttatcctggtgccgggatgtctggggaaccaactcgaagccaaactggataagccggacgtcgtgaactggatgtgttaccgtaagaccgaagatttcttcaccatctggctcgatctgaatatgtttctgcccctgggagtggactgctggatcgacaacactcgggtcgtttacaaccgctcttcgggcctggtgtcaaatgcgccgggagtccagattcgggttcccggatttggcaaaacctactcggtcgaatacctcgatagcagtaagctggcgggttacctccacaccctcgtgcagaatctggtaaacaatggttacgtccgagacgaaaccgtgcgggcagccccctatgactggcgcttggagccaggacagcaagaggagtactatcgcaagctggccggcctcgtggaagagatgcatgcggcctacgggaaacccgtgttccttatcggacactcactcggttgcctccacttgctctacttcctgttgcgccaaccgcaggcctggaaggatcggttcatcgacggattcatctcgctgggggctccttggggaggcagcatcaagcctatgttggtgcttgccagcggagacaatcagggaattccgatcatgagctccatcaagctgaaggaagagcagcggatcaccactacttccccttggatgttcccatcccgcatggcttggccagaggatcatgttttcatctccactccgagctttaactacacggggagggactttcaacgatttttcgcggacctgcatttcgaagaaggatggtacatgtggctgcagtcgcgcgatttgctggcaggattgccagcacctggagtggaagtctactgcctctacggggtcggactgccgacgccaaggacctacatatacgatcacggcttcccttatactgatcccgtcggggtgctttacgaggacggagacgacacggtggccacgcgttccactgaactgtgcgggctttggcaggggcgccaacctcaaccggtgcacctgctcccattgcatggcatccagcaccttaacatggtgttttcgaacctcaccctggagcacatcaatgcgattctgctgggcgcctaccggcagggcccgccggcgtcaccgactgcgtcgccggagcctccgccgccagaa

SEQ ID NO: 4713 - DNA, 1320 bp, Artificial Sequence
  derived and/or modified sequence
atgggcccacccggcagcccctggcagtgggtgacgttgctgcttggtttgctgctgcctccagccgcacccttctggctcctgaacgtattgtttccaccccatacaacaccaaaggcagagctgtcaaaccacactagacctgtcattctcgtgcccggctgtttggggaaccaactggaagccaagttggataaacccgatgttgtgaattggatgtgttaccggaagacagaggactttttcaccatctggctggaccttaacatgttcctgcctctcggggttgactgttggatcgataacacccgggtcgtttacaacagatcttcaggactcgtatcaaatgcccctggagtgcagattcgggttcccggttttggtaagacctactctgttgaatacctcgactcctcaaaactcgcgggctatctgcacacacttgttcagaatctggtgaacaacggctacgtgcgggatgagacagtccgagctgcaccttacgactggagactggagccggggcagcaagaagagtattatcgcaagttggcaggcctggtggaggagatgcacgctgcctacgggaaacccgtgttcctgatcggccatagcctgggttgcctgcacctgctgtatttcctcctgagacagccacaagcttggaaagatcggtttattgacggtttcatttcactcggcgcaccctggggcggctctattaagccaatgctggtcctggccagcggcgataaccagggcatccccattatgagttctattaagctcaaagaggagcaaaggattactactacaagtccgtggatgttcccctcaaggatggcatggcccgaggatcatgtctttatctctaccccgagcttcaactataccggcagagacttccagcggttctttgccgatctccactttgaggagggttggtatatgtggctgcagagccgggaccttctcgctggactgccagcccccggagtagaagtgtactgcctttacggcgtggggctgccaaccccccgcacatacatctatgaccatggcttcccttacaccgaccctgttggagtgttgtacgaagacggcgacgacaccgtggccaccaggtccacggaattgtgcgggctgtggcagggtaggcagccccagccagtccatctgctgccgctgcatgggattcagcacttgaatatggtgttctctaatctgacccttgagcatattaacgctattctgcttggtgcataccggcaggggcctcccgctagcccgactgccagcccagaaccgcctcctcctgag

SEQ ID NO: 4714 - DNA, 1320 bp, Artificial Sequence
  derived and/or modified sequence
atgggaccaccaggatcaccttggcagtgggtgactctcttgcttggcctcttgcttcccccagccgccccgttctggcttctgaatgtgctcttccctccgcataccacgccgaaggccgagctgagcaaccacaccagacctgtgatcctcgtgccaggatgcctcgggaaccagctggaggccaaactcgacaaaccggatgtcgtgaattggatgtgctaccgcaaaactgaagacttctttactatctggctcgaccttaatatgtttctcccgttgggcgtcgactgctggatcgataacacccgggtggtgtacaaccgctctagcggactggtgtccaacgcccccggggtccagatccgcgtccccggcttcggaaaaacttactcggtggagtacctcgactccagcaaactggcaggatacctgcacaccctggtgcaaaatctggtgaacaacggctacgtgcgggacgaaaccgtgagagcggctccgtacgactggcgcctggaaccgggacagcaagaggaatattaccgcaagctggccggactggtggaggagatgcacgctgcttacggaaagcccgtgttcctgatcggacattcactgggatgtctccatctgctgtattttctgctgcgccagccgcaagcctggaaagaccggttcattgacggattcatctccttgggagcgccgtggggaggatccatcaaaccgatgcttgtgctggcgagcggagacaaccagggcatcccgatcatgtcctccatcaagctcaaggaggaacagagaatcacgaccacttcgccgtggatgtttccatcaagaatggcttggcctgaggaccacgtgtttatctcgaccccatccttcaactacaccgggagggatttccaacgctttttcgccgatctgcacttcgaggaaggatggtacatgtggctgcaatcgcgggatctcctcgccggactgccggctccaggtgtcgaagtgtactgtctgtacggagtcggactgccgactcctcgcacgtacatttacgaccacggattcccatacaccgatccggtcggggtgctctacgaggacggagacgacactgtggctacccggtctactgaactgtgcggactctggcagggccggcaaccgcaacccgttcaccttctgccgctgcacggtatccagcacctcaacatggtgttctcgaaccttacccttgagcacattaacgccatcctgctgggcgcatacagacaagggcctccggcgtcacctaccgcgtcgcctgaaccgccaccacccgag

SEQ ID NO: 4715 - DNA, 1320 bp, Artificial Sequence
  derived and/or modified sequence
atgggcccgcctgggagcccctggcaatgggtgacattgcttctgggtctcctcctgcctccagccgcccccttctggctcctcaacgtcctctttccgccccatacgacccccaaagccgagctgtctaaccatactcgcccagtcatcctggtgcccggttgcctaggtaaccaacttgaagcaaaacttgataagccggacgtcgtgaattggatgtgttaccgaaagacagaagatttcttcacgatttggttggatttgaacatgttcttgccgcttggtgtcgactgttggattgataacactcgagttgtgtacaatcgctccagcggtcttgtctctaatgcgccaggcgtccagatcagagttcccgggttcgggaagacctactccgtcgagtatctggactcctctaagctcgctggttacttacataccctcgtgcagaatcttgtcaacaatggatatgtcagagatgagactgttcgggcagcaccttatgactggcgattggagccggggcagcaagaggaatactacaggaaactcgcgggactcgtcgaggagatgcacgctgcatacgggaagccagtttttttgattgggcacagtctgggatgcttgcatttgttgtacttcctcctccgccaaccccaggcatggaaggaccgtttcattgatggatttatttctttgggcgcgccatggggagggtcgattaaacctatgctggtgttggcgtctggagacaaccaaggtattcccatcatgtcgtccatcaagctgaaggaagagcaaagaataacaaccactagcccttggatgttcccgtcacgtatggcgtggccagaagatcatgtattcatctcaaccccatcattcaactatactggtcgggactttcaacgtttcttcgctgatctgcatttcgaggagggatggtatatgtggttgcagagccgcgatctcctagccggcctaccagccccaggagttgaggtctactgtctgtatggtgtaggcctcccgacgcctcgtacttacatctacgaccatggcttcccttatactgatccagttggagttctctatgaggacggtgatgacactgtcgctacacgctctaccgagctgtgcggactctggcagggccgccaacctcagccggttcatctgctgcccctgcatgggatccagcaccttaatatggtgttctcaaacttgacactagagcacattaacgcaatcttactcggtgcatatcgccaaggccccccggcttctcctaccgcttcacctgagcccccaccacccgaa

SEQ ID NO: 4716 - DNA, 1320 bp, Artificial Sequence
  derived and/or modified sequence
atgggcccacctggttccccttggcaatgggtgaccctgttgctggggttacttctgcctcctgctgctcctttctggctcctgaatgtcctctttccccctcatactacccctaaagcagaactgtccaaccacactaggcccgtcatcttagtgcccggctgcctcggcaaccaattggaggctaaactggacaagcctgacgttgtgaattggatgtgctacagaaagactgaggacttctttacgatatggcttgatcttaacatgttcctcccccttggggtcgattgttggatcgataataccagagtggtctacaataggtctagtggcctagtgagcaacgcacccggcgtccagatccgggtccccggctttgggaaaacctacagcgttgagtatttagatagctcaaaactcgctggctatttgcacacactcgtgcagaatctggtaaacaacgggtatgtgagagatgaaacagtgagggccgctccttatgactggcgccttgaacctggccagcaggaggagtattaccgaaaattggccggactggttgaggagatgcatgccgcgtacggtaagccggttttcctgatcgggcatagtttggggtgcctgcatcttctgtattttcttcttagacagccacaagcttggaaagacagatttattgatggatttatttcattgggagctccctggggcggaagtatcaaaccaatgctcgtcctggccagcggagataaccagggcatacccatcatgagctcaatcaagttgaaagaggaacagcgcatcaccaccacttccccttggatgtttcccagtcgtatggcctggcctgaggaccacgtcttcatttcaaccccttcttttaactacacaggaagggactttcagagattttttgctgacttgcactttgaagagggctggtatatgtggctccaatcccgcgaccttttggcaggcctgcctgcacctggcgtggaagtgtattgtttgtatggcgtcggcttgccgaccccccggacctacatctatgaccatggattcccttataccgaccccgtgggcgtgctctacgaagatggcgacgacaccgtggccacaagatcaacggaactctgcggcctttggcaaggcagacaacctcaacctgttcacctgctgcctttgcacggcatccaacacctcaacatggtgttttccaatctgactctggagcacatcaacgctatcctcctgggggcttataggcagggccctccggcaagtccaactgccagccctgaaccgccacctccagag

SEQ ID NO: 4717 - DNA, 1320 bp, Artificial Sequence
  derived and/or modified sequence
atgggacctccggggtcgccttggcagtgggtgaccctgctcttgggacttctcctgccaccggcagctcccttctggctgcttaatgtcctgttccccccgcataccaccccgaaggcggagctctcgaaccacactcggccggtgatcctggtgccgggatgtctcggcaaccaactggaagccaagctggataagccagacgtggtgaattggatgtgctacagaaagaccgaggactttttcacgatctggctcgatctcaatatgttcctgcctctcggagtggactgttggatcgacaatactcgcgtggtgtacaaccgaagctcaggactggtgtccaacgctccaggtgtccagattcgcgtcccgggttttggtaagacctacagcgtggagtacctcgactcctccaagctggcgggatacctgcatactctggtgcagaacctcgtgaacaacggttacgtgcgggatgaaactgtcagggcagccccgtacgattggcggctggagccgggacaacaggaagaatactaccggaagctggcaggactggtcgaggaaatgcatgcggcctacgggaaaccggtgttcctcattggccactccctcggatgtctgcacctgctctactttctgctccgccaaccacaggcttggaaggatagattcatcgacggttttatctcacttggcgcgccttggggaggatcaatcaaaccaatgctcgttcttgcctccggcgacaaccaaggaatcccaattatgtcctcgatcaaactgaaagaagaacaacggattaccactacttcaccttggatgtttcccagccggatggcctggccggaggatcacgtctttatctcgactccatcgttcaactatactgggagggatttccagagattcttcgcagacctgcacttcgaggaagggtggtacatgtggctgcagtccagagacttgcttgccgggctgccagctccaggggtggaggtctactgcctgtatggggtgggactcccgaccccgcggacctacatttacgaccacgggtttccctacaccgaccccgtcggagtgctctacgaggatggtgacgacactgtggcaaccagatccactgagctgtgcggcctgtggcagggacgccagcctcaaccggtgcatctgctgcctctccacggaatccagcacttgaacatggtgttttcaaacctgactttggaacacatcaatgccatcctgcttggagcgtaccgccagggaccacctgccagcccgaccgcgtcccccgaaccaccaccgccggag

SEQ ID NO: 4718 - DNA, 1320 bp, Artificial Sequence
  derived and/or modified sequence
atgggaccgccaggttcaccctggcaatgggtgacgcttctgcttggtctgcttcttcccccagctgcccctttttggctgttgaatgtgctgtttccaccccataccacccccaaagccgaactgtctaatcacacgaggccggtcatcttggtgcctggttgtcttggcaaccagctggaggcaaaactagacaagcctgatgtggtgaactggatgtgttaccggaaaacagaagatttttttaccatatggctagacctaaatatgtttttgcccctaggcgttgattgttggattgataatacccgcgtggtgtataatcgctcctcaggcctagtgtcaaatgctccaggcgttcagattagagtacctggtttcggaaagacctattctgttgaatatctggactcatccaagttggcaggttatctacacaccttagtgcaaaacttggtgaataacggatacgttcgagatgaaaccgttcgagctgcaccttacgactggaggctggaacctggccagcaggaagaatattatagaaagcttgctgggctggtggaagagatgcatgccgcttatggaaagccagtgtttctcataggacactcactgggttgcctccacctactgtactttctattgaggcagccgcaagcctggaaggacagatttatcgatggattcatatctcttggagccccctggggggggtcgataaagccaatgctcgtccttgcatcaggcgataatcaaggaattcctataatgagcagcattaagctgaaggaggaacagcggatcaccacgacgagcccctggatgttcccctctagaatggcttggcctgaggatcacgtcttcatcagcactccctcttttaactacaccgggagggacttccagaggttcttcgctgatcttcatttcgaagaggggtggtacatgtggttgcagagtagggatctgctcgctgggctgcccgccccaggcgtggaagtgtattgtctgtacggggtcggcctgccaaccccaaggacatacatttacgaccacggatttccttatacggatcccgtaggcgtgctctatgaggatggcgatgacacggtcgctaccaggtctacagagctgtgcggtctgtggcaaggccgccaacctcaaccagttcatctgctgcctctccacggtattcagcatctcaatatggtattttcaaatttaaccctggaacacatcaatgctatcctcctgggtgcttaccgacagggccccccagcctcacctaccgcctcccccgagccccctccccccgaa

SEQ ID NO: 4719 - DNA, 1320 bp, Artificial Sequence
  derived and/or modified sequence
atggggcctccgggctccccttggcagtgggttacgcttctcctgggcctccttctgcctcccgcggcaccgttttggctgctgaacgtgttgttcccgccacacaccaccccgaaagctgaactcagcaatcatacccgtcccgtgatcttggtgcccgggtgcctgggaaatcaacttgaggcaaagctggataagcccgacgtggtcaactggatgtgttaccggaaaaccgaggactttttcaccatttggcttgatctgaacatgtttctgcctcttggtgtggattgttggattgataacactagagtggtttacaaccggagcagcggactggtgtcaaacgcacccggagtgcaaatcagagtgcccggttttggtaagacttacagcgtcgagtacctggacagcagcaaactggcaggttacctccatactctggtgcaaaatctcgtgaacaacggatacgtcagggacgaaaccgtgcgggcagcaccatacgattggagactggaaccagggcaacaggaagaatactacagaaaacttgcaggtcttgtggaagaaatgcatgcagcatacggaaagcctgtctttctgattggtcattcactcggatgtctccacctgctttacttcctgttgcgccagcctcaggcctggaaggatcggttcatagatggctttatctcactcggagcaccatggggcggttcgattaagcctatgctcgtgctggcatcgggcgataaccaaggcatcccaattatgtcatcgatcaagctcaaggaagaacaacgcatcaccaccacttcaccctggatgttcccgagcagaatggcatggccagaggaccacgtgtttatctctacccctagctttaactatacgggccgcgattttcagcgtttctttgcggacttgcactttgaagaggggtggtatatgtggcttcagtcccgagatctgctcgccggactgcctgccccaggcgtggaggtgtactgcctgtacggagtggggcttcctactccacgcacctacatttatgaccatggatttccatacacggacccagtgggagtgctgtacgaagatggagatgacactgtggccacccgctcaactgagctctgcggtctttggcaggggaggcagccccaaccagtgcatctccttcctctgcacggcatccaacaccttaacatggtgttttcgaaccttacccttgaacacattaacgccattctgcttggtgcatacaggcagggacctcctgcaagcccaactgcatccccggaacctccaccacctgag

SEQ ID NO: 4720 - DNA, 1320 bp, Artificial Sequence
  derived and/or modified sequence
atgggtccgcccgggagtccatggcagtgggtgaccctgctcctgggcctcttgctgcctcccgcagcgcctttctggctgctcaatgtgctgtttccaccgcacacaacccccaaggccgagttgagcaatcacacaagacccgtcattctggttccaggttgcctagggaaccagcttgaagcaaaactggataaaccggatgtcgtcaactggatgtgttatagaaagactgaggacttttttaccatatggctggacctgaacatgttcctaccactaggggtggactgttggattgataatacacgagtggtgtacaatagatcgtctggcctcgttagcaatgctccaggggtccagattagagttcccgggttcgggaagacatattctgtggagtatttggacagttcgaaattggccgggtaccttcacacgctcgttcagaatctagtaaacaacggttatgtgagagacgaaaccgttcgcgcagcaccctacgactggagactggagccagggcaacaggaggagtattacagaaaactcgcgggacttgtggaggaaatgcatgccgcctacgggaaacccgttttcttgattggccacagtctcgggtgtctgcatctcttatactttctcttgagacagccacaggcctggaaagataggtttatagatgggttcattagtttgggggccccatggggcggttccatcaaacctatgctggtgctggcgagtggcgataaccaaggcatcccaataatgagcagcattaaactgaaggaggagcagcgcattaccaccacaagcccttggatgttcccatcgagaatggcctggccggaagaccatgtgtttatctctacaccttccttcaactataccggccgcgactttcagagattcttcgccgacctgcactttgaggaaggttggtatatgtggctccagagtcgcgacttgctggcgggattgcccgcaccaggagtcgaggtgtactgcttgtatggagtcggcttgccaacacccaggacttacatctatgatcacggttttccgtacacggaccctgttggcgtactttatgaggatggggacgatacagttgccacacgatcaacagagctatgcggcctgtggcaaggccggcagcctcagcccgtgcacctactgcctttgcacgggattcaacacctgaacatggtatttagcaacctgacgctggagcacatcaatgctatcctgctgggcgcttatagacagggcccccctgcctcaccgactgccagcccggaaccacctccacctgag

SEQ ID NO: 4721 - DNA, 1320 bp, Artificial Sequence
  derived and/or modified sequence
atggggcccccagggagcccgtggcagtgggtcacgctgctcctgggattgctccttccgccagcagcaccattttggctgcttaacgtcttgtttccacctcataccactcctaaggctgaacttagcaaccacaccaggcctgtgatacttgtcccagggtgtcttggaaaccaacttgaggcaaaacttgataaacccgatgtcgtgaactggatgtgctaccgcaagactgaagatttcttcactatttggttggatctgaacatgttcctcccacttggcgttgattgttggattgataacacgcgtgtcgtgtacaaccgctcatcaggcttggtatccaacgcaccaggcgtgcagataagagtcccaggatttggaaaaacttactccgtcgagtacctggattcctcaaagctggcaggttacctccacaccctggtgcaaaatctcgtgaacaacggttacgttcgggatgagactgtcagagccgccccttacgactggcgactggaacctggtcaacaggaagaatactaccgcaagctggcggggctggtggaggaaatgcatgcggcttatggaaaacctgtttttcttatcggacattcgcttggatgtctgcatcttctttactttcttcttcgtcagcctcaagcatggaaggatcgtttcatcgacgggttcatttcactgggagctccttggggaggttccattaagccaatgctcgtgttggcatccggggataatcaaggcattcctattatgtcgtcgattaagctgaaggaagaacagcgaatcaccactaccagtccatggatgtttccatcgcgaatggcatggcctgaagatcatgttttcataagcaccccttcgttcaactacaccggcagggactttcaacgcttttttgcagacttgcatttcgaggagggatggtacatgtggttgcaaagcagggacctgcttgccggacttcctgcacccggcgtcgaagtgtactgcctttacggggtgggacttcctacccctcgcacgtacatctacgatcacggttttccctacactgacccagtgggagtcctgtacgaggacggagatgacaccgtggcaactaggtcaaccgaactttgcggactttggcaagggcgtcagccacaacctgtgcatctgctgcctttgcatggcatacaacacctcaatatggtgtttagcaacctgactcttgagcacattaatgcaattctcctcggtgcatatagacagggaccacccgcaagccctaccgcctcgcctgaaccgccccctccagaa

SEQ ID NO: 4722 - DNA, 1320 bp, Artificial Sequence
  derived and/or modified sequence
atgggcccccccggctcgccatggcagtgggtaaccctgttgttgggacttcttctgccaccggccgcaccattctggttgctcaacgtcctgtttcccccccatactacaccaaaggccgagttgtctaaccacactcgaccagtaattttggtcccaggatgtctcgggaaccagctggaagccaaattggataaacccgacgttgtgaactggatgtgttataggaaaacggaggactttttcacaatatggctagacctgaatatgtttcttcccctgggcgtggactgctggatcgataacactcgtgtagtgtataatcgctccagcggcctggtctccaatgctcctggcgtacagatccgggtgcccgggttcggcaaaacgtacagcgttgaatatctcgactcctctaagctggccggctacctccatacgctggtgcaaaaccttgtgaacaacggatatgtgcgggatgagacagtcagagcagccccttacgactggcggctggagccaggacagcaagaagaatattacagaaagcttgctgggttagttgaagagatgcacgctgcatatgggaagccagtcttccttatcgggcattcattgggctgtctgcatctcctctatttcctattgcggcaacctcaagcctggaaggacaggttcattgatgggtttatatcactcggggccccctgggggggaagcataaaacccatgttagtactagcctctggtgacaaccagggtataccaatcatgtcatccattaaattgaaggaagagcagcggataacaaccacaagtccatggatgtttcctagccgcatggcctggcccgaggaccatgtcttcatttctactccatcctttaactatactgggcgggactttcagaggtttttcgctgacctgcacttcgaggagggctggtacatgtggctgcagtccagggatctgctagctggactccctgcccccggagttgaggtctactgtctctacggggtaggactgcctacccctcgcacctacatatacgatcatggcttcccttatactgaccccgttggggtcctgtacgaagacggggacgatacagttgccactagatctacggagctctgtgggctgtggcagggacgccagccacagcccgtgcacctcttgcctttgcatggtatccaacatctcaacatggtgttcagcaacttaactctggagcacatcaatgccatcctcctgggagcttaccgtcaagggccgccagcctcacctacagcatccccggaacccccgcctcctgaa

SEQ ID NO: 4723 - DNA, 1320 bp, Artificial Sequence
  derived and/or modified sequence
atgggtccacctggatcgccctggcagtgggtgaccctcctgcttggactgctgctgccgccagcagcgcctttttggcttctgaatgtgctgtttcctccacatactaccccaaaggcagaactctcgaaccacactagaccagtgatccttgtgcctggctgtctgggcaaccaactggaagcgaaacttgacaaacctgacgtggtgaactggatgtgttacagaaagaccgaggactttttcactatctggctcgatctcaacatgtttctgccacttggggtggactgctggattgacaatactcgcgtggtctacaaccgctcgtccggtcttgtgtcaaacgcgcccggcgtccaaattagagtccctggctttggcaagacctactcagtggagtacctcgatagcagcaagctggcgggctaccttcatacccttgtgcagaacctggtgaataacggttacgtccgggatgaaacggtccgggccgcaccttacgattggcgcctggagcccggacaacaggaagaatactatagaaagttggcgggattggtggaagaaatgcatgcggcctacggaaagcccgtctttctgattggacactcgcttggatgtctccatctgctgtactttctgctgcgtcaacctcaagcctggaaggatcgcttcattgacgggttcatctcgctcggagccccttggggaggaagcataaagcctatgcttgtcttggcctcgggagacaaccagggtattccgattatgtcctcgataaagctgaaggaagagcaaagaattaccactacttcgccttggatgtttccttcacgaatggcatggccagaagatcacgttttcatctcgactcctagctttaactacaccggaagagattttcagaggttcttcgcagatctgcattttgaagaaggttggtacatgtggttgcagtctcgcgatcttctggcaggacttcctgctcctggggtggaagtgtactgtctgtacggggtcggtctgccaactccacgtacctacatctacgatcatgggttcccttataccgatccagtcggagtgctctacgaggacggggatgacacggtcgcaacccgatcgaccgagctttgcggcctctggcagggccgtcagccccagccagtccatcttcttcccctgcacgggatccaacacttgaacatggtgtttagcaacctcaccctcgagcacattaacgccattctcttgggagcgtaccggcaagggccaccggcgagtcccaccgccagccctgagcctcccccaccagag

SEQ ID NO: 4724 - DNA, 1320 bp, Artificial Sequence
  derived and/or modified sequence
atggggccacccggatctccttggcagtgggtcacgctgctgctgggactgctgctccctcccgcggctccattttggctactcaacgtactgtttcccccccacactactcccaaagccgagcttagcaatcatacccgtcctgtgatcctggtgcctgggtgtttggggaaccagctggaagccaagctggataaacccgatgtggtcaactggatgtgttaccgaaagactgaagatttctttacaatatggttagatctgaatatgtttctccctttaggcgtcgattgttggatcgacaacacccgcgtcgtgtacaatcgatcctccggcctggtgtctaatgctcctggtgtccagatcagggtcccagggttcggcaagacctacagcgttgaatatctggacagctcaaaattggcagggtatttgcacaccctagtccagaacctcgtcaataatggctacgtgagggacgaaacagtacgggcagcaccttatgactggaggctggaacctgggcagcaggaagaatactaccggaagctcgctgggttggtggaagagatgcacgccgcctacggcaaaccggtgtttctgatcggacattccctcgggtgcctacacctcctgtattttcttctccggcaaccacaggcctggaaggaccgatttatcgatggtttcatttcactgggcgcaccatggggaggctcaattaaacccatgctagtcctcgccagcggagacaaccaggggatccccataatgtcctcgataaagctcaaggaggagcagcgaataaccaccacaagcccttggatgttccccagcaggatggcttggcccgaggatcatgtttttatctccaccccctccttcaactataccggcagggactttcagcgatttttcgcggacctgcactttgaggagggatggtatatgtggttgcagtccagagacctgctcgccggtctcccagccccaggtgtggaggtatactgtctctacggggttgggctccctactccgcgaacctatatctacgaccatggctttccgtacactgaccccgtcggtgtgctctacgaagatggagacgataccgttgctacacggtccacagagctgtgcgggctttggcaggggcgtcagcctcaacccgtgcacctgctgcctctgcatggaattcagcatcttaacatggtattctcaaacctcactttggagcacatcaacgccattcttctcggtgcttaccgacagggccctcccgcatcgccaacggcctctccagaacccccccccccagag

SEQ ID NO: 4725 - DNA, 1320 bp, Artificial Sequence
  derived and/or modified sequence
atgggtccgccaggaagtccatggcaatgggtgacattactattgggcctgctcctaccaccagctgcaccgttttggttgcttaatgtcttgttcccaccccacaccacgccaaaggcagaactctccaatcataccagaccggttattttggtcccaggttgtcttggcaatcaacttgaagccaaactcgataagccagacgtggttaactggatgtgctaccgaaagacagaggattttttcacgatttggcttgatctcaatatgttccttccacttggagtggactgctggattgataacacgcgagttgtgtacaatcgatcgtcgggacttgtgtcaaatgctccaggcgtccaaatcagagtaccgggattcggaaagacctactccgtcgaatacttggattccagcaagctcgcgggatatctgcacacacttgttcagaacttggtgaataacggatatgtccgtgacgaaacagttcgggctgctccttacgactggaggcttgagccaggacaacaagaagagtactacagaaagctcgctggacttgttgaggagatgcacgctgcatatggaaaaccagtgtttcttatcggacattcgctaggctgtctacacttgctttattttttgcttcgacaaccgcaagcttggaaggacagatttattgatggattcattagccttggagcaccatggggtggatccattaaacctatgctggttctagccagtggggataatcaaggaattccgatcatgtccagcatcaaacttaaagaagagcagcgaatcactactacatctccctggatgttccctagtagaatggcctggcctgaagaccatgtctttattagtactccatccttcaattatacaggaagagatttccagcgattttttgcggatcttcatttcgaggaaggatggtacatgtggttacagtcaagagacttgcttgcgggattgcctgcaccgggagttgaggtctactgtctttacggagtaggtcttcctacccctcgtacatacatatatgatcatggatttccatacaccgatcctgtcggggttctttatgaggatggtgacgatacagtagcgaccagatctacagagctctgcggattgtggcaaggtcgccaaccccaaccagtccatttgttgccactccatggtattcagcatttgaacatggttttcagtaatcttaccctagaacacataaacgcgatcctcctgggagcatacagacagggtcctcccgcatctcctactgcttctccagaaccgccaccgccagag

SEQ ID NO: 4726 - DNA, 1320 bp, Artificial Sequence
  derived and/or modified sequence
atgggccctccaggtagtccatggcagtgggtaaccctgttgcttggactgctccttccccccgcagccccattctggctcttgaacgtgttgttccctccacacacgaccccaaaagccgagctgtccaaccataccagaccagtgattctcgtgccaggctgtctgggcaaccagctcgaagctaaactggataaaccagatgtcgttaactggatgtgttacaggaagacagaggacttcttcaccatatggcttgatctgaatatgttccttcctctgggcgttgattgctggatagataacaccagggtcgtttacaataggagcagcggactggtctccaacgcgccgggagttcagattagggtgccgggattcggtaagacgtatagcgtggagtacctggattcctctaagctcgctggctatctgcatactctggtgcagaaccttgttaataatggctacgtgagagacgaaactgttagggccgccccgtacgactggaggttggagccaggccagcaagaggagtactaccgcaaactggccggtcttgttgaggaaatgcatgccgcctacggaaagccagtgttccttataggtcactcactcggctgtttgcatcttctctactttctcctgaggcagccccaggcttggaaggatagatttatcgacggctttatatccctcggagcaccatggggaggaagcattaagccaatgctggtgctggcctctggcgataatcaaggaattcctatcatgtcttccataaagctcaaggaggaacagaggatcacgacgacgagcccgtggatgtttcccagcagaatggcctggcctgaagaccatgtctttatctccaccccgtcctttaattacacaggccgcgatttccaacgcttctttgcagacctgcattttgaagaaggttggtacatgtggctccagagtcgcgatttgctcgccggcctcccagcgcccggtgtggaagtttattgtctgtacggagtaggtttgcctactccaaggacatacatatatgaccatggttttccatacacagaccccgtgggagtgctttacgaggacggagacgacactgtcgcaactaggtccacggagctctgtggcctttggcagggccgccagccccaacccgtccacctgctgcctctccacggcatacagcacctgaacatggttttctccaacctgactttggagcacattaacgccatccttctgggcgcttacaggcaaggacctcctgcttctccaacagcctctcccgaaccaccaccacccgaa

SEQ ID NO: 4727 - DNA, 1320 bp, Artificial Sequence
  derived and/or modified sequence
atggggcctcccggcagtccctggcagtgggtcaccctgctcttaggcttgctgctccctcccgcggcgccattttggctgctgaacgtgctcttcccacctcacacaacacctaaggctgaactgagcaatcacacgcggcctgttattctggtcccaggctgtctgggcaaccagttggaggctaagctcgacaaacctgatgtggtgaattggatgtgttatagaaagacggaagatttcttcactatctggctcgacttgaatatgtttctccctctcggcgtggactgttggatagacaatacccgcgtggtttataatagaagcagcggcctcgtatctaacgcccctggggtgcaaattcgggtacccggcttcggtaaaacgtattctgtggagtatctggattcatccaaattagccggctacctacacaccctggtacagaacctggttaacaacggatacgttcgcgacgagacggtcagggctgctccatatgattggcgcctggaacccggccagcaggaagaatactataggaagctggcggggctggtggaggaaatgcatgccgcttatggaaaaccagtgttcttgatcggacatagcctgggttgcttgcatttgctgtatttcctgcttcggcagcctcaggcttggaaagaccgcttcattgacggctttatctcgctaggagccccctggggtggatctatcaaaccaatgctggtgttggcctcgggagacaatcaaggcattccaataatgagttccatcaaacttaaagaagaacagaggatcaccaccacttctccatggatgtttccttcgcggatggcctggccggaagatcacgtgtttatttcaactccttcattcaattacacaggcagagacttccaacggtttttcgctgacttgcatttcgaagaaggctggtatatgtggctgcaatctcgggatctactggcgggacttcctgccccaggcgtagaggtttactgcctgtatggggtgggactccctacaccccgaacgtacatatatgatcatgggtttccatacacagatccagtgggcgttctgtacgaggatggcgatgatacagtagccacaagaagcactgaactttgcggactgtggcagggccgtcaaccccagccagtgcacctactgcccctccacggcatccagcatttgaatatggtcttctctaacctaactctcgaacatatcaatgcaatcctcctgggcgcttaccgacaggggcctcccgccagtccaacggcttctccagagcctccacctcctgag

SEQ ID NO: 4728 - DNA, 1320 bp, Artificial Sequence
  derived and/or modified sequence
atgggacctccaggttctccttggcaatgggtgactcttcttctcgggctgctgcttcctcctgcagcaccattttggctgctcaacgtcctttttcctccccacaccactcctaaggctgaacttagcaatcatacccgccccgtgattcttgttcctggatgtctcgggaaccaactcgaagcaaagctggacaaacctgacgtggtgaactggatgtgttacagaaagactgaggactttttcaccatttggctggatttgaacatgtttcttccccttggagtggactgttggatcgataatacgagggtcgtgtataaccggagttcgggactcgtctccaatgcacctggagtccagattagagtgcctgggtttggtaaaacctattccgtggaatacttggatagtagcaagttggcgggttacctccatacccttgtgcagaaccttgtgaacaatggttacgtgcgcgacgagactgtgcgcgcggctccgtacgattggagacttgagccgggccagcaagaagaatactacaggaagttggcaggcctcgtggaagagatgcatgctgcttacggaaaacccgtgtttctcattggtcactcccttggatgcctgcatttgctttacttccttctgcggcagccacaggcctggaaggatcggttcattgatggattcataagccttggtgcaccgtggggcggctcaatcaagcccatgctggtgctcgcatccggtgacaatcaaggaatccctatcatgagctcgataaaactgaaggaagaacaacggattaccaccaccagcccctggatgtttccttcgagaatggcatggccagaggaccatgtctttatctccacgcctagctttaactacactggacgggattttcagagatttttcgctgatcttcactttgaggagggatggtatatgtggcttcaatcgcgagatctcctggccggcctcccggccccaggagtggaggtttactgtctctacggtgtgggacttccgaccccgaggacctacatttacgatcacggcttcccctatactgatcctgtgggagtcctttacgaagatggagatgataccgtggcaactagatcgactgaattgtgtggtctttggcagggacgccaacctcaaccagtgcatttgctgccgcttcatggtattcaacatctgaacatggtgttctcgaatctcacgctggagcacattaacgcaatcctcttgggcgcttacagacaggggcctccggcgtcaccaaccgcatcaccagaaccgcccccacccgag

SEQ ID NO: 4729 - DNA, 1320 bp, Artificial Sequence
  derived and/or modified sequence
atggggccaccaggaagtccctggcagtgggttacattgctccttggactcctcctcccaccagccgcgccattctggctgctgaatgttctctttccccctcacacaacacccaaagccgagcttagtaaccacacacggccagtgatcctggtcccagggtgtctgggaaaccagcttgaagcaaaattagataaaccagatgtcgtcaactggatgtgttatcgcaagacagaagatttcttcacaatatggctggacctcaatatgttcctcccactgggggtggactgctggattgataatacaagagtggtgtataaccggtcctcagggctagtgtctaacgccccaggggtgcagataagggtgcccggattcgggaaaacatattcagttgaatatcttgattcctccaaacttgcaggatatctacacactttggtacagaatctagtaaataacggatacgtcagggatgaaacagtgagggccgcaccctatgactggagattagagcctggacagcaggaagaatattaccggaaactagctggattagttgaagagatgcatgccgcctacggaaaacctgtgttcttaatcgggcattccctcggatgccttcatcttctatacttcctcctccggcagccacaggcatggaaagatcgttttatcgatggatttatctccttgggagcaccctggggagggtctattaaacctatgctagttctagctagtggggacaaccaagggatccctataatgtccagtataaaacttaaagaagaacaaaggattactacaacttcgccttggatgttcccctcaaggatggcatggcctgaagaccatgtgttcatctcaacaccaagtttcaattatacagggagagattttcagcggttcttcgccgatcttcatttcgaagaaggatggtacatgtggttacagtcaagagatctgctagccggactccctgcccctggagtggaagtatactgcctctacggagtgggacttcctacaccacgaacatacatatacgatcacgggttcccctatactgatccagtcggggtgttatacgaagatggggacgatacagtggctacacggagtactgaactatgcggactgtggcagggacgccagccccagccagttcatcttcttccactccacggaatacagcaccttaatatggttttttctaacctcacactcgaacacataaacgccatcctccttggggcatatcgccagggaccccctgcttctcctacagccagtcctgagccaccacctccagaa

SEQ ID NO: 4730 - DNA, 1320 bp, Artificial Sequence
  derived and/or modified sequence
atgggaccgcccggctcgccgtggcaatgggtgaccctgctgctggggctgctcctcccgccggcggcccccttctggctgctcaatgtgctgttccctccgcacaccacccccaaagcggaactctccaatcatactaggccggtgattctcgtgccaggatgcttgggcaaccagctcgaggcaaagctcgacaagccggacgtggtcaactggatgtgctaccgcaagaccgaagatttcttcactatctggctcgatctcaatatgtttctcccgttgggagtcgattgttggattgacaatacccgggtggtctacaatcgcagctcaggactggtgagtaacgcgccgggggtgcagatccgcgtgccgggcttcggaaagacctactccgtggagtacttggactcgtcgaaacttgcgggttacctccatactcttgtgcagaacctcgtgaacaacggatacgtgcgcgacgaaactgttcgcgctgccccgtacgactggcgcctcgagccgggacaacaggaagagtactacagaaaactcgccggtctggtcgaggaaatgcacgcagcttacggaaagccggtgttcctcatcggacattcattggggtgcctccatctgttgtacttcttgctgcggcaacctcaggcctggaaggacagattcatcgatgggttcattagcctcggtgccccgtggggagggtcaatcaagccaatgctcgtgctggcctcgggagataaccaaggtattccgatcatgtcctccatcaaactgaaggaagagcaacgcatcaccaccacgtcaccatggatgttccccagcagaatggcgtggccggaagatcacgtctttatcagcacgccatcctttaactacactgggagagacttccagagattcttcgcagacctgcacttcgaagaagggtggtacatgtggttgcagtcgcgtgatctgctcgcaggcctcccagcgcctggagtcgaagtgtactgtctgtatggggtgggtctgccgaccccgaggacctacatttacgaccacggcttcccatacactgatcccgtgggagtcctgtacgaagatggagatgatacggtggctactcggagcaccgagctgtgtggactctggcagggtcgacagccgcagccggtgcacctcctgccgctgcatgggatccagcatctgaacatggtgttctcaaatctgaccctggaacacatcaatgctatcctgctgggagcctaccgccagggaccccctgcttccccgactgcctcaccagaaccgccgcctcccgaa

SEQ ID NO: 4731 - DNA, 1320 bp, Artificial Sequence
  derived and/or modified sequence
atgggaccaccgggttctccatggcagtgggtgacgttactgttgggactcctcctgcctcctgctgcccccttctggctcctgaatgtgttattccctccgcatacaacacccaaagcagagcttagtaatcacacccggcctgttattctcgtgccagggtgcttgggtaaccagttagaagccaaactggataagcctgatgtcgtgaattggatgtgctataggaagacagaagattttttcacgatctggctggacctgaatatgttcctgcccctgggggtcgactgttggattgacaatacgcgagtggtctacaatcgatcgtcaggccttgtcagtaatgcaccgggggtacagattcgggtgccgggctttggcaagacctactcagttgagtacctggactccagtaagcttgccggatatctgcatacactcgtccagaatttggtgaacaatggatatgtgagagacgagaccgtgcgggccgccccttacgattggcgcctggaaccagggcagcaggaggaatattaccgcaagctggccggccttgtcgaggaaatgcatgccgcctacggaaagcctgtcttcctgattggacattctctgggctgtctgcacctgttatactttctgctgcgacagccacaggcttggaaggacagattcatcgacggattcatctctctgggagcgccctggggggggtcaataaagcccatgctggtcctcgcctcgggagataaccagggcattcctattatgagcagtatcaagttgaaagaggaacaacgtattacgacaaccagtccatggatgttcccgtcccggatggcctggcccgaggaccacgtgtttatctctacaccttcctttaactataccggacgggacttccagcgcttctttgctgacctccatttcgaagaagggtggtatatgtggcttcagagtagggatctcctggctggccttcctgccccaggtgtggaggtatactgcctttatggggtgggcctgcccacgccaaggacctacatctacgatcatggttttccgtacacagatcctgtcggcgtgctgtatgaggacggcgacgacaccgtggctaccaggagtacagaattgtgcggcctgtggcagggaaggcagccccagcctgttcacctactcccgctccatggcatccagcacctgaatatggtcttctctaatctgacactggagcatataaacgcgatcttactgggagcatataggcagggacccccggcgtccccgaccgcatcccctgagccacctccgcccgaa

SEQ ID NO: 4732 - DNA, 1320 bp, Artificial Sequence
  derived and/or modified sequence
atgggaccccccggctctccttggcagtgggtgacactgctgctgggtctgctgctgcccccagccgctccattttggctgcttaacgtgctgttcccacctcacaccacccccaaggctgagctctcaaatcacactcgacccgtcatcctggtcccagggtgtctgggtaaccaactggaggccaagctggataaacctgatgtggtcaattggatgtgctaccggaagacagaagacttctttaccatctggctggatcttaacatgtttctgcccttgggagtggactgttggatcgataacactagagtggtgtacaataggtccagcgggctggtgtccaatgctcctggagttcagattcgagtgccaggctttgggaagacctactctgtcgagtatctggacagttctaaactggccgggtacttgcacactctggtccagaatctagtcaacaatggttacgtacgtgatgagacagtgagagccgcaccttacgactggagactggaaccaggtcagcaggaagagtattatagaaaactggctgggcttgtagaggagatgcacgccgcatatgggaaaccggtttttttgatcggccactctctaggctgtctgcatctgctatactttcttctgcgccaaccacaggcctggaaggaccgctttatagacggatttatctcactgggcgccccatggggaggaagtattaagccaatgctggtactggcgtccggcgacaatcaaggcatccccattatgagcagcattaaattgaaagaagagcagaggatcaccacaacaagtccttggatgttcccttctagaatggcctggcctgaggatcatgtgttcatcagtacgcccagctttaactacacggggcgggatttccagcggttttttgccgatttgcatttcgaggaagggtggtacatgtggcttcagagccgggacctgctcgccgggctccctgctccaggcgtggaggtttactgcctgtatggcgttggacttcccactccgcggacttacatttacgatcacggattcccatacactgaccctgtcggtgtcttgtatgaagatggggacgacaccgtggccactagaagcacagaactttgcggtctgtggcagggccggcaaccccagcccgtacatttacttcctttgcacggcattcagcatttaaacatggtcttctcaaatttaaccctggagcacatcaacgcaatcctcctcggagcataccgccaggggccgccagccagtcccaccgccagcccagagcctcctcccccggag

SEQ ID NO: 4733 - DNA, 1320 bp, Artificial Sequence
  derived and/or modified sequence
atggggccaccagggtctccctggcagtgggttaccttgctgcttggccttttgttgccacccgctgctcccttctggctgttaaacgtcctttttccgccccacacaacgccgaaggcagaactatcaaaccacacaagacccgtgatcctggtaccaggttgtcttggtaaccaactagaagcaaagctggacaaaccagacgtggtcaactggatgtgctatagaaagactgaggactttttcactatctggttagacttaaacatgttcctgcccctcggagtggattgctggattgacaacactagagttgtgtataatcgaagctcaggactggtcagcaatgcccctggggtgcagatcagggtgcccggctttgggaagacatattccgtcgagtacctggacagcagcaaactggctggctatctgcacacactcgtgcaaaaccttgtgaacaatggatacgtgcgcgacgagaccgtgcgcgccgctccttacgattggcgccttgagccaggccagcaggaggagtactacagaaagctagctggacttgtggaagagatgcatgccgcatacggcaagcccgtgtttctgatcggacattctcttggctgtctacatctcttatacttcctgttgcggcagccccaggcatggaaggatcgatttatcgatggatttatcagcctcggcgccccttggggaggctctatcaagcctatgctggttctcgcttccggcgacaaccagggcatccctatcatgtccagtatcaagctgaaggaagagcagcgcatcaccaccacctctccttggatgtttcctagccgaatggcctggccagaggaccacgtttttatatccacaccgagttttaactataccgggagagactttcaacgttttttcgccgacctgcacttcgaggaaggttggtatatgtggctgcaatctcgggacctgctcgccgggctgccagcaccgggagttgaggtgtactgcttgtatggcgtaggactgccaacccctagaacgtatatttacgatcacggattcccctatacagaccccgtgggtgtgctgtatgaggatggcgacgacaccgtcgctacgagaagcaccgaactctgtggcttatggcaaggcagacagcctcagccagtgcatttactgccactccatgggatccagcatctgaatatggtgttttcgaatctcacgctcgagcacattaacgccatcctgctgggagcgtacaggcagggcccacctgcctctccaaccgctagcccagagccaccgcctccagag

SEQ ID NO: 4734 - DNA, 1320 bp, Artificial Sequence
  derived and/or modified sequence
atggggccgcccggttcaccttggcagtgggtgacgctcctattgggcctgctgttgccaccagcagcgccgttttggcttctgaatgtcctgttcccccctcatacaactcccaaggcagaattgtccaatcacacccgtcctgtaattcttgtgcccggctgtctggggaatcagcttgaggccaagctcgacaagcccgatgtcgtgaactggatgtgttacaggaagacagaggattttttcacgatctggctcgatctgaacatgttcctgccccttggggttgattgttggatagataatactagagtcgtctataatcgatccagcggactagtttccaacgctcctggggtgcaaatcagagtgcctggatttggtaagacctactccgtggagtatttggatagcagcaaattggcgggatatctccacacactggtgcaaaacctagttaacaacggctatgtacgcgacgagaccgttcgggctgctccatacgactggcgactagagcctggacagcaggaggaatattaccgcaagttggcaggactcgtggaggaaatgcacgccgcgtatggcaaaccggtgtttctgatcggtcacagcctgggctgtctgcacttattgtattttctacttcgccagccacaagcctggaaggatcgattcatcgatgggtttattagcctcggcgccccatgggggggctcgatcaagcccatgttggtcctggcctctggcgacaatcaaggtattcccatcatgtccagcatcaagttaaaggaggaacaacgcatcacaactacgagcccgtggatgtttccctcacgcatggcctggcctgaggatcatgtttttattagcactccttccttcaactatactggtcgggattttcagcgctttttcgcagatctgcattttgaggagggttggtatatgtggcttcagagccgtgatcttctggccggactacctgcccccggagtcgaagtgtactgcctctatggggtgggcctgcccaccccccgcacctatatctatgaccatggtttcccttacacagacccggttggcgtgctttatgaggacggggacgacaccgtggcaactagatccaccgagctgtgtggtctgtggcagggaaggcagccgcagcctgtccacctgctgcctctccacggcatccagcacctgaatatggtttttagtaatcttactctcgaacacattaacgccatactgctcggagcttacagacagggtcctccagcctccccaacagcttcacctgagccccctcctccagaa

SEQ ID NO: 4735 - DNA, 1320 bp, Artificial Sequence
  derived and/or modified sequence
atgggacccccaggatccccctggcaatgggtgacgctcctgctggggctgcttttgcctcctgcagccccattttggcttctgaacgtcctgtttccaccccatacgaccccgaaggcggaactttcgaaccatactcgtcccgtgatactggtgcctgggtgtcttggcaatcagcttgaagccaagctggataagccagatgtcgtgaactggatgtgctaccggaaaaccgaggacttcttcactatctggctggacctcaacatgtttctccctctgggtgtcgattgctggatcgataacactcgagttgtgtacaacagatcctcgggccttgtctctaacgcaccgggggtccaaatcagagtcccaggatttggtaagacctactccgtggaataccttgatagctcgaagctcgcaggctacctccacactctcgtgcaaaatcttgtgaacaatggatacgtgagagatgaaaccgtgagagcagcaccatacgactggcgactggagccaggtcagcaagaagagtattaccggaaacttgcaggtttggtcgaagaaatgcatgctgcgtacggaaaacctgtgtttctgattggccatagcctcggatgtctgcatctgctctatttcctcctgcggcaaccgcaggcatggaaggaccgtttcattgatggtttcattagcctgggcgcaccatggggtggatctataaagccgatgctcgtgcttgctagcggtgacaaccagggaatcccgattatgagctccataaaactgaaggaagaacaacgaattactactacttccccatggatgtttccatcccgtatggcatggcctgaggatcatgtgtttatctccactccgtccttcaattacacgggtagggattttcagagatttttcgcggatctgcattttgaggaaggctggtacatgtggctgcaaagtagagatcttctggcaggtctgcccgctcccggagtcgaagtttactgcctctacggcgtgggcctccctactcctcgtacttacatttacgatcacggctttccttacaccgaccctgtgggagtgctgtacgaggacggagacgacactgtcgccaccagatccacggagctctgcggtctgtggcaagggagacaaccacagccagtgcacctgttgccactccatggtattcagcatctcaatatggtgttctcaaacttgactctggaacatatcaatgctattttgttgggcgcatatcggcaaggtccccctgcgtcaccgactgcatcgcctgagcctccacctccagaa

SEQ ID NO: 4736 - DNA, 1320 bp, Artificial Sequence
  derived and/or modified sequence
atgggcccacctggatcaccgtggcaatgggttaccttgctgctgggactgttgttgccccccgcagcccctttttggcttctcaacgtgctgtttccaccacacaccactccaaaggcagaactgtccaaccacacgcggcctgtgatccttgtgccaggctgtctgggaaaccaactcgaagcaaaactcgataagccggatgtcgtgaattggatgtgctaccgcaagactgaggacttcttcacgatttggctggatctcaacatgtttttgcctctcggagtcgattgctggattgacaacaccagagtcgtttacaaccggtcgtcgggtcttgtgtcaaacgctcctggtgttcagattcgcgtgcctggttttggtaagacctactcagtggagtacctggattcctcgaaactggctggataccttcacacccttgtgcaaaatctggtgaacaatggctacgttagagatgaaaccgtgagggcagcgccttacgactggagacttgaaccaggacagcaggaagaatactatcggaagctggcaggacttgtggaagaaatgcacgccgcgtacgggaagcccgtctttctgattggccactccctcggctgcctccacctgctctactttctgctgcgtcagccacaggcatggaaagacagatttatcgatgggtttatctcccttggagcgccttggggaggttccatcaagccgatgctggtccttgcgagcggcgataatcagggtattccaattatgtcatcgataaagctcaaggaagagcaacgaattacgactaccagcccctggatgtttccatccaggatggcttggccagaagatcatgtgtttatcagcactccatcctttaactacaccgggcgtgattttcaaagattcttcgcagacctgcattttgaggaaggatggtacatgtggcttcaatcacgggacctcctggcaggattgccagcaccaggtgtggaggtttactgtttgtacggtgtgggactgcccactcccagaacctacatctacgaccacggattcccttatactgacccggtgggggtgctgtacgaggatggagatgatactgtggcaacccgttctaccgaactgtgtggtctgtggcagggcagacaaccccaaccagtgcaccttctgcctttgcatggcatccaacatctcaacatggtgttctcgaatctgactcttgaacatatcaacgcaattctcctgggtgcatataggcaagggcctcctgcgtcgccgactgcatcgccagagccgcctcctcctgag

SEQ ID NO: 4737 - DNA, 1320 bp, Artificial Sequence
  derived and/or modified sequence
atgggcccaccgggatccccttggcagtgggtgacgctcctgctgggacttttgctgcccccagccgcgcccttttggctgcttaatgtgctgttcccgcctcataccactccgaaagccgagctctccaatcatacccgccctgtgatcctggtcccaggatgcttgggaaaccaactggaggctaagctcgacaagccagacgttgtgaactggatgtgctacaggaaaacggaggatttcttcactatatggctggatctcaatatgtttcttcctctcggcgtggactgctggatcgacaatactcgggtggtgtacaaccggtcgagcgggctggtgtcaaatgcgcctggtgtgcagattcgcgttccgggcttcgggaaaacttactccgtggaatacctggattcgtcaaaacttgcaggatatctgcacacccttgtacagaaccttgtgaacaacgggtacgtcagagacgaaaccgtgcgcgctgccccttatgactggcgcctcgaaccaggacaacaggaggaatactacagaaagctcgcaggactggtggaggaaatgcatgccgcgtacggcaagcctgtctttctcatcggccattcccttggatgtctgcaccttctgtacttcctgctgagacaaccgcaggcatggaaagacagatttatcgatggattcatctctctgggagcgccatggggagggtcgattaagccgatgctggtgttggcatctggtgacaaccagggaatcccaatcatgtcatcgatcaaattgaaggaagaacagagaatcactaccacttcgccgtggatgttcccgagtcgcatggcgtggccagaagatcacgtgtttatctcaaccccgtctttcaactataccggccgcgacttccagagattcttcgcagaccttcacttcgaggaaggatggtacatgtggttgcagtcaagagacttgctggcggggcttccagctcctggtgtggaagtttactgcctctacggcgtcggactgcctactccccgcacctacatctacgatcacggattcccatacaccgatccggtgggcgtcctttacgaggatggagacgataccgtcgcaactcgttcgacggaactgtgtggactgtggcaaggacgccagccacaaccagtgcacctgctccctcttcacggtatccagcatctcaatatggtgttcagcaacctcaccctcgagcatatcaatgccatcttgctcggagcctaccggcagggtccgcccgcctcgccgaccgcctccccggaaccaccaccgcctgaa

SEQ ID NO: 4738 - DNA, 1320 bp, Artificial Sequence
  derived and/or modified sequence
atgggcccccctggatcaccctggcagtgggtgacactcttactcggccttctacttccacccgccgctccattttggctgctgaatgtgctattcccccctcacacaacacccaaagccgagcttagcaaccatactaggccagttattcttgtgcccggttgtctggggaaccagttagaggccaagctcgacaaacctgatgtggttaattggatgtgttatcgaaagacggaggacttctttaccatctggctggatctgaatatgtttttgccacttggggtcgattgctggattgataatactcgtgttgtctataaccgcagctcaggccttgtgtctaacgccccaggtgtgcagataagggtgccaggctttggcaagacttactcagttgagtacctggacagtagcaaactggctggttaccttcatacccttgtgcagaatctggtgaacaatggctatgtgagagatgaaactgtgagagcggctccatacgattggcggctggagcccgggcagcaggaggagtattatcgaaagctggccggcctcgtggaggagatgcacgccgcatacggcaagcccgtgttcctgattggacattcgttgggatgcctgcatttgctatatttcttgcttagacagccccaggcttggaaggataggtttatcgacgggttcatttctctgggcgccccttggggggggagcattaagcctatgctggtgctcgcttccggcgataaccaggggattcccatcatgagctctattaagctcaaagaggagcagcgaatcacaacaacctccccctggatgtttccatcccggatggcgtggcctgaggaccatgtgttcatttcaaccccttctttcaactacaccggcagagactttcaacgcttttttgccgacctgcactttgaggaagggtggtacatgtggttgcagtctagggatttgctggcaggcctacccgccccaggggtagaggtttactgcctttatggagttgggttgccgacccccagaacatacatttatgatcacggctttccctacacggatccggtcggagttttatacgaagatggcgacgacacagtcgccactcgctccaccgaactgtgtggcttgtggcagggtaggcagccacagccagtccacttactgccactccacggtattcaacacctcaatatggtgtttagcaatctaactttggaacatataaatgctatcctcctcggagcctatcgacaagggcccccggcctctcccacggcttccccggaacccccaccccctgaa

SEQ ID NO: 4739 - DNA, 1320 bp, Artificial Sequence
  derived and/or modified sequence
atgggcccgcctggtagcccatggcagtgggtcaccctgctccttggcctgctgctcccccccgccgcccccttctggctgcttaacgttctcttcccaccccataccacacccaaagcggagctgtccaaccacacacggccagttatcctggtacccggatgtttggggaaccagctggaggcaaagctggataagcccgacgtagttaattggatgtgttacagaaagaccgaagatttcttcaccatctggctggatcttaacatgttcctccctctgggtgtcgactgttggattgacaacaccagagtcgtgtataacaggagctctggccttgtgagtaatgcacccggcgtgcagattagagttccagggttcggcaagacctattccgtcgagtacctggactccagcaagcttgcgggctatctgcacacgctggtacagaacctcgtgaataatgggtacgtgcgagacgagacggtgcgggctgcgccttatgattggcggctcgagccagggcaacaggaggagtattacaggaaactggccgggctggtggaggagatgcacgccgcatatggaaagcccgttttcctcattggccactccctgggatgcttgcacctgctgtacttcctcctcagacagccgcaagcttggaaggaccggtttattgacgggtttatatcattgggtgcgccatggggaggctccattaagcctatgctggtgctggcttccggagataaccagggcatacctattatgtcctccataaaactgaaggaggaacagcgcattaccacaacgtctccctggatgttcccctctcgcatggcttggcccgaagaccacgtgttcatatctaccccaagcttcaactatactggtagagatttccaaagattcttcgcagatctccacttcgaggagggctggtatatgtggctgcagagtagggatctgttggctggactgcccgcccctggagtggaggtgtattgcttgtacggggtgggactgccgactcctcggacctatatctatgatcacggattcccttacaccgaccccgtgggagtcctctatgaggatggagacgacaccgtcgcaactcgatccactgagctttgcggtctctggcaggggaggcaaccacaaccagtccaccttcttcctctgcatggcatccagcatctgaatatggtgtttagcaacttgacgctggagcatatcaacgctattctgctcggagcgtatcgacagggtcctcccgcatctcctactgcctcacctgagccacccccccctgaa

SEQ ID NO: 4740 - DNA, 1320 bp, Artificial Sequence
  derived and/or modified sequence
atgggcccaccaggcagcccctggcagtgggtgacactgctgctgggcctgctgctgcctccagctgcacctttttggctgctcaatgtgctgtttcctccacatacaacccccaaagctgagctgtctaatcacaccagaccagtgatactcgtgcctggctgtctcgggaaccagctggaagctaaactggacaagccagacgtggtgaattggatgtgctaccggaagaccgaagactttttcaccatttggctggatctgaatatgttcctacccctaggcgtcgattgttggattgataatacccgagtggtgtataacaggagcagcggcctagtcagtaatgctcccggggtgcagattcgggtccctggttttgggaagacctacagcgttgaatacctagacagcagcaagctggccggatacttgcataccctggtccagaacctcgtgaacaatggttatgtccgcgacgagacagttcgggccgccccctacgactggcggctagaaccaggccaacaagaggaatactatcggaagctggcaggcctagtggaggagatgcacgccgcttatggcaagcctgtgttcttaattggccactccctcggatgcttacatctactgtattttctgctgaggcagcctcaagcttggaaggacaggtttatagacgggttcatatccctgggcgctccttggggcggttctataaaaccaatgctggtgctggcctccggagacaaccagggcattcctataatgtcaagcatcaagttaaaggaagagcagaggataactactacctccccttggatgttcccatccaggatggcctggcccgaggaccatgtgtttataagcaccccatctttcaactacacagggagggactttcagcggttcttcgctgacttgcactttgaagagggatggtacatgtggctgcagtctcgggacttgctggccggtctgccagctcctggcgtcgaagtttattgcctatatggcgtgggcctgcccacccctagaacctacatttacgaccacggctttccttatacagatccagtaggcgtgctttacgaagacggcgatgacacagtggcaaccaggtctaccgaactgtgtgggctgtggcagggcagacaacctcagccagttcatctgctccccctgcacggaatccagcacctgaacatggtgttttccaacctcaccttagaacacataaatgcaattctactgggcgcatacaggcagggcccacccgctagcccaaccgcctctcctgaacccccaccacctgaa

SEQ ID NO: 4741 - DNA, 1320 bp, Artificial Sequence
  derived and/or modified sequence
atgggtccacctggctcaccatggcagtgggtaaccctcctactgggacttttgctcccacctgcagcccccttctggttgctgaatgtgctttttcccccgcacacgactccaaaggctgagttgagcaatcatacgcggccggtcatcctggtacctggatgtctgggcaaccagctagaggccaagctcgacaagcctgacgtggtgaactggatgtgttacaggaagacggaggatttctttacgatctggctggatcttaatatgttcctcccgctaggcgttgattgctggatcgataatactagggtggtatacaaccggtcgagcggtttggtcagcaatgcccccggggtgcaaatccgtgtaccgggattcgggaagacttatagtgtggagtatttggatagctccaagctcgcaggatatctccacaccctggttcagaacctcgtaaacaatggatacgtccgggacgaaacagtccgagcggctccgtacgactggagactcgagccggggcagcaggaagagtactaccggaagctcgcgggcctcgtcgaggagatgcacgctgcctatggtaaaccggtattcttgatcggacatagcctgggttgtctgcacctactgtattttctgctcagacagccgcaggcgtggaaagatcggtttatcgacgggtttattagcctcggcgctccttggggcggatctataaagcccatgctggtactggcatctggagataatcagggtatcccaatcatgtcctctataaaactgaaggaggaacaacgaataaccactacctcaccctggatgtttccctcacgtatggcttggcccgaagatcatgtgttcatatccacgcccagcttcaactacactggccgggactttcagagattcttcgcggatttacattttgaggagggctggtacatgtggctgcagagtagggatctgctcgctggccttcctgcacccggtgttgaggtgtattgtctgtacggcgttggattaccaacgccaagaacatatatatatgaccatggcttcccctataccgacccagttggggttctgtatgaagacggagacgatactgttgccactagatcaaccgagttatgcggattatggcagggacgccagccacagcccgtccaccttctgcccttacacggcattcaacacctgaatatggttttctctaacttgactttggagcacatcaacgccattctcctgggtgcatataggcagggaccccctgccagccccacagccagtcccgagccccctccccccgag

SEQ ID NO: 4742 - DNA, 1320 bp, Artificial Sequence
  derived and/or modified sequence
atgggacctccaggatctccatggcagtgggttactttacttttaggacttcttttacctccagctgctcctttctggttattaaatgttttatttcctccacatactactccaaaagcagaattatctaatcatacaagaccagttatcttggttccaggttgtttaggaaaccaattagaggctaaattagataagccagatgttgttaattggatgtgttatagaaaaacagaagatttttttacaatttggcttgacttaaatatgtttcttccactaggagttgattgttggatagataatactcgtgttgtttataacagaagttcaggacttgtatctaatgctccaggtgttcaaataagagttccaggatttgggaaaacttattcagtcgaatatcttgattcttctaaattagcaggatatttgcatacacttgttcaaaatttagttaacaatggatatgtaagagatgaaacagttagagcagcaccatatgactggagattagaaccaggacaacaagaagaatattatagaaaattagcaggattggtagaagaaatgcatgcagcatacggaaaacctgtttttcttattggtcattcacttggatgtcttcatcttctttatttcttgttaagacaaccacaggcatggaaagatagatttattgatggatttatttcattaggtgctccatggggaggatctatcaaacctatgttagttttagcatcaggtgacaaccaaggaattccaatcatgtcatctattaaacttaaggaagaacaacgtattactacaacaagtccatggatgtttccatcaagaatggcttggccagaagatcatgtttttatttctactccatcttttaattatactggtagagattttcaaagattttttgcagacttacattttgaagaaggatggtatatgtggttacaaagtcgtgatcttttagcagggttaccagctccaggtgtagaagtttattgtttatatggagttggacttccaactcctcgaacatatatttatgaccatggatttccatatacagatccagttggtgttttatatgaagatggtgatgatacagttgccacaagatccacagaactttgtggtctttggcaaggaagacaaccacaaccagtccatttacttcctttacacggaattcaacatctaaatatggttttttcaaacttaactttagaacatattaatgcaattctattaggggcttatagacaaggaccaccagcttcaccaacagcaagtccagaaccacctccaccagaa

SEQ ID NO: 4743 - DNA, 1320 bp, Artificial Sequence
  derived and/or modified sequence
atggggccaccaggatccccctggcaatgggtgactctgctcttgggacttcttctgcctcccgccgcgcccttttggctcctcaatgtgctgtttcccccacacactacccctaaagcggagctttccaaccacaccagaccagtgatccttgtgccgggatgtcttggaaaccaacttgaagctaagttggataaacccgacgtggtgaactggatgtgttatagaaagactgaagatttctttactatttggctcgatctgaacatgtttttgccccttggtgtggattgctggattgacaacactcgcgtggtctacaatagatcctcgggactcgtctcgaacgcgcctggcgtgcaaattagagtccctggttttggcaaaacctactccgtggagtatctcgattcgtccaagctggcaggttaccttcataccctggtccagaacttggtcaacaatggatacgtgagagatgaaacggtgcgcgctgcgccttacgactggcgtcttgagccgggtcaacaagaggaatactacagaaaacttgccggtttggtcgaagagatgcatgcggcctatgggaaacctgtgtttctgattggccacagcctgggatgtctccatctcctctactttctgctgcggcaaccccaggcttggaaggatagattcattgacggatttatcagcctcggcgctccatggggtggatcgatcaaacccatgcttgtgttggcttctggggataaccaaggtattcctataatgtcatcgattaagctcaaggaagagcaacgaattaccaccacttccccgtggatgttcccttcacgcatggcatggccagaagatcatgtgttcatatcaactccatccttcaactacactggaagagatttccaacgcttcttcgcagacttgcactttgaagagggttggtacatgtggcttcagtcaagggatctgctggcaggactcccagcacctggagtggaagtgtactgcctttacggagtcgggcttccgacgccccgcacctacatttacgatcatggatttccttacaccgacccagtgggtgtgctctacgaagatggtgatgatactgtggcaaccagatccaccgaactctgcggactgtggcaaggcagacaacctcagcctgtgcatctgctgcctctgcacggtattcaacatctcaacatggtgtttagcaatttgacgctggagcatatcaacgccattcttcttggggcatacagacagggtcctccagcctcgcctactgcgtcgccagaacctcccccaccggaa

SEQ ID NO: 4744 - DNA, 1320 bp, Artificial Sequence
  derived and/or modified sequence
atgggaccgcccggctctccctggcagtgggttaccctgcttctgggattgctcctgccaccagccgcccccttttggctgctcaatgtcctctttcctcctcacacaacacccaaggctgaactttccaaccatacgcgcccagtaatcctcgtcccaggttgtctgggtaaccagctggaggctaaactggataagcccgatgtcgttaattggatgtgctatagaaaaactgaggattttttcacaatttggctggatcttaatatgtttctgcccctgggtgttgactgttggatcgacaacacccgcgttgtctacaacagatctagcggactagtgagtaacgcgcccggagtgcagatccgggttcctggcttcggtaagacctactccgtagagtacctggactcttctaaattagctggctatctacataccctggtccaaaacctggtgaacaatggatatgtcagggatgaaacagtgcgagccgcgccatatgactggagattggaacctgggcaacaggaagagtactatcgcaaactggcagggctggtggaagaaatgcatgccgcctacggaaagcccgtattcttgatcgggcattctctgggatgtctgcacttgctatatttcctcttacgccaacctcaggcatggaaagaccgcttcattgatgggttcatatctttgggggcgccctggggcggctcgattaagcctatgctggtactggcatcaggagacaatcagggcattccgatcatgagcagcataaaactgaaggaggagcagcgaatcactacaaccagcccctggatgttcccatcccggatggcctggcccgaagatcacgttttcatcagcactccttctttcaactacacaggcagagacttccagcggttctttgctgacctgcacttcgaggaagggtggtatatgtggctacagtctcgggatttactggccggtctcccggcccctggagtggaggtgtactgcctgtacggtgtgggcttgcccactcctcgcacatatatctacgatcatggcttcccttacacagatccagtgggcgtattgtatgaagacggcgatgacactgtcgccactcggagcactgaactgtgtgggttgtggcaggggagacaaccgcagcctgttcacctgctgccactgcatggcatccaacatctgaacatggtgttttctaatctaacacttgagcacatcaacgctatattgctgggcgcctaccgccaggggccaccagcatcgcctaccgcatctcccgaacctccgcctccggaa

SEQ ID NO: 4745 - DNA, 1320 bp, Artificial Sequence
  derived and/or modified sequence
atgggacccccaggaagtccctggcagtgggttaccctgttactgggccttctactgccacccgctgccccattttggttgttgaatgtgcttttccctccacacaccaccccaaaggccgagctgagcaaccatactcgacccgtcatcttggtgcccggatgcctgggcaaccagctcgaggcaaaactcgacaagcccgatgtggtcaattggatgtgctaccgtaagaccgaagacttcttcacaatctggctcgacctgaatatgttccttcctctgggcgtcgattgctggatcgacaatacacgagtggtttacaacaggtccagcggtctcgtttctaacgcaccaggagtgcaaattcgtgtgcctggctttggaaaaacttattccgtcgagtacctggatagctcaaagctcgccggctacctgcatacccttgtgcagaacctcgtcaacaacggttatgtgcgagatgagaccgtacgagctgcgccttacgattggagactcgaacctggccagcaagaagagtactatcggaagcttgccggactcgttgaggaaatgcatgcagcatacgggaaacccgtttttctgataggccacagccttggctgtctgcatttgttgtatttcctcctaagacagccacaggcctggaaggatagattcatagacggcttcatatccctcggtgcaccgtggggtggatctattaaacccatgctggtcctcgccagcggggataaccagggaattcctattatgtctagcatcaaacttaaagaagagcaaagaatcaccactacctccccatggatgtttccttcaaggatggcttggccagaagaccatgtctttattagcacacccagcttcaattacacaggtcgagattttcagcgattctttgccgatttgcatttcgaggaggggtggtatatgtggctgcagtctagagatttactggcaggcttgcctgcccccggcgtggaggtttactgtctgtatggggtgggcctgcccacccctcgaacatatatctacgatcacggctttccgtataccgatccggtgggcgtactgtatgaggatggtgatgatacggtcgctactagatcaaccgaactgtgtggtctgtggcagggccgacagcctcagcccgtgcacctcttaccactgcatggcattcagcacttgaacatggtctttagcaacctcaccttggagcatataaacgccattctgctgggagcttatcgacaagggcccccagcctcccccacagcatcaccggaacccccccctcctgaa

SEQ ID NO: 4746 - DNA, 1320 bp, Artificial Sequence
  derived and/or modified sequence
atgggacctccggggagcccgtggcagtgggtgaccctgctgctcggtctgttgctcccgccagccgccccgttctggttgctcaacgtgctttttccgccgcacaccacgccaaaggcagagctgtcgaaccacacccggccggtgatcctcgtgccgggatgcctgggtaaccagctggaagcgaaactggacaagccagacgtggtcaactggatgtgctacagaaagaccgaggatttcttcaccatctggctggatctgaatatgtttctcccgctgggtgtggattgctggatcgataacactcgggtggtgtataaccgctcttccggactggtgtccaacgccccgggagtgcagataagggtgccaggattcggaaagacctacagcgtcgaatacctggactcctcgaagctggccggctacctccacactctggtccaaaacctggtgaacaacggctacgtgagagatgaaactgtgcgggccgcaccgtacgattggagactggagccgggacaacaggaagagtactaccgtaagttggccggactggtggaggagatgcatgcagcctacgggaagccggtctttctgatcggacattcgctcggctgtctgcacctgctgtacttcctcctgcgccagccccaggcgtggaaggaccgatttatcgatggcttcatctcgctgggggccccttggggtggctccattaagcctatgctcgtgctggcttcgggcgacaaccaaggtatcccaatcatgtcatcaatcaagctgaaggaggaacagcgcatcactaccacgtccccctggatgttcccgagcagaatggcatggccggaggaccacgtctttatctcgacgccatcctttaactacaccggacgggatttccaacgcttctttgccgatctgcacttcgaggaaggatggtacatgtggctgcaatcacgggacctgctggcaggactgcctgcgccgggagtggaagtctattgcttgtacggagtgggactgccaactccgcgcacctatatctatgatcacggttttccatacaccgacccggtcggagtgctgtacgaggatggagacgatactgtggctaccaggagcaccgagctctgcggattgtggcaagggagacagcctcagccggtccatctcctgcctctgcacggaatccagcatctgaacatggtgttcagcaatcttaccctcgagcacattaacgcaattcttctgggtgcctaccggcagggcccgcccgcttccccaactgccagccctgaacctcctccaccggag

SEQ ID NO: 4747 - DNA, 1320 bp, Artificial Sequence
  derived and/or modified sequence
atgggcccgccgggatctccttggcaatgggttacgcttctgctgggccttctgcttccgccggctgctccgttttggttattgaatgtcctttttccgccgcatacaactcctaaagcggaattatcaaaccatacacggccggtcattttagtgcctggctgccttggtaatcaattggaagctaaacttgacaaaccggatgttgtaaattggatgtgttatcgtaaaactgaggatttttttaccatctggttagatctcaatatgtttttgcctcttggtgtcgactgctggattgacaacacacgggtcgtgtacaaccggtcatctggactggtctcaaatgcacctggcgttcagatccgagtgcccggttttggaaaaacatactcagtagagtacttggactcttcaaaactggctggctacttacacacactggtccaaaaccttgtaaataacggctatgttagagatgaaacagttcgggcggcgccatatgattggcgccttgaacctggacaacaagaggaatattatcgtaaattagctggactcgtcgaagaaatgcatgctgcgtatggcaaacctgtctttttgattggacattcacttggttgtttgcatctcttgtatttccttcttagacagccacaagcttggaaggatcgctttattgatgggtttatttctctgggggctccgtggggcggcagcataaaaccgatgttggtgcttgcgtcaggcgacaatcaggggattccgattatgtcatctattaaacttaaagaagagcaacgcatcacaactacatctccttggatgtttccttcacgcatggcgtggcctgaggatcatgtatttatttccacaccatcattcaactacacgggaagagattttcaacgttttttcgcggatctacacttcgaagagggatggtacatgtggcttcagtccagagatttgttagccggcttgcctgctcctggcgtggaagtctactgcctttacggcgttggactaccgactccgcgcacctatatttatgatcacggttttccctatactgatccggtgggcgtgctttacgaagacggtgatgatacagttgctacccgtagtacggaactgtgtgggttatggcagggtcgccagccacaacccgtccatttattgcctctccatggcatccagcatctcaatatggtcttctctaacctcacgctggaacatattaacgcaattcttctcggcgcatatcgacaaggtcctcccgcgagccccacagcctcacccgaacctcctcctcccgaa

SEQ ID NO: 4748 - DNA, 1320 bp, Artificial Sequence
  derived and/or modified sequence
atgggacccccaggttcaccgtggcaatgggtgacgctgcttctgggtctgctcttgcccccggctgcgccgttctggctgctgaacgtcctgttccctccgcacactaccccaaaggcggagctgtcgaaccatactcgcccagtcatcctggtcccaggatgcctcggaaaccaacttgaagctaaactggacaaaccagacgtggtgaattggatgtgctatagaaagaccgaggacttcttcaccatctggcttgacttgaatatgtttctgccgctcggggttgactgctggatcgacaacacccgagtggtctacaatagatcatccgggctggtttcaaacgccccgggagtgcagattcgggtcccgggatttggaaagacttactcggtggaatacctggactcgtcgaagctggcgggatacctgcacactctggtgcagaatctggttaacaacgggtatgtgcgagatgaaaccgtcagagctgcaccctacgactggcggctggagccgggccagcaagaggagtactaccggaagttggcaggcctggtcgaagaaatgcacgccgcctatggaaagccggtgttcctcattggacattcccttggatgcttgcatcttttgtacttcctgctgaggcagccacaagcatggaaggatagattcattgacggatttatctctctgggagcgccatggggcggctcgatcaagccaatgctcgtcttggcgtcgggcgacaaccagggtatccctatcatgagctccatcaagctcaaggaagaacagcgcataaccacgacctccccttggatgttcccatccagaatggcgtggccggaagatcacgtgtttatctccacgccgtcgttcaattacactggacgcgacttccagaggttcttcgcggacctgcacttcgaagaagggtggtacatgtggttgcaatcacgggacctgctcgccggactcccggcgcccggcgtggaagtctactgcctgtacggagtcggcctgccgacgcctcggacttatatctacgatcacggatttccgtacaccgaccctgttggggtactctacgaggacggcgatgatactgtggccacgcgcagcaccgagctttgcggcctctggcagggtcggcagccgcaaccagtccacctcctcccgttgcatggaatccaacaccttaacatggtcttttcaaatctcacccttgaacacatcaacgctatcctgttgggagcctacagacaaggtcccccggcgtcaccaacggcctccccggagccgccgccgcctgag

SEQ ID NO: 4749 - DNA, 1320 bp, Artificial Sequence
  derived and/or modified sequence
atgggtccgccgggttcgccgtggcaatgggtaacgttactattaggtctactattaccgccggcggcgccgttttggctattaaatgttttatttccgccgcatacgacgccgaaagcggaattatcgaatcatacgcgtccggtaatattagtaccgggttgtctaggtaatcaactagaagcgaaattagataaaccggatgtagttaattggatgtgttatcgtaaaacggaagatttttttacgatatggctagatttaaatatgtttttaccgttaggtgtagattgttggatagataatacgcgtgttgtttataatcgttcgtcgggtttagtatcgaatgcgccgggtgtacaaatacgagtaccgggttttggtaaaacgtattcggtagaatatctagattcgtcgaaattagcgggttatttacatacgttagtacaaaatttagtaaataatggttatgttcgtgatgaaacggttcgagcggcgccgtatgattggcgattagaaccgggtcaacaagaagaatattatcgtaaactagcgggtttagtagaagaaatgcatgcggcgtatggtaaaccggtatttttaataggtcattcgctaggttgtctacatttattatattttctactacgtcaaccgcaagcgtggaaagatcgttttatagatggttttatatcgctaggtgcgccgtggggtggttcgataaaaccgatgctagtactagcgtcgggtgataatcaaggtataccgataatgtcgtcgataaaactaaaagaagaacaacgtataacgacgacgtcgccgtggatgtttccgtcgcgtatggcgtggccggaagatcatgtttttatatcgacgccgtcgtttaattatacgggtcgtgattttcaacgattttttgcggatttacattttgaagaaggttggtatatgtggttacaatcgcgagatttactagcgggtctaccggcgccgggtgttgaagtatattgtttatatggtgttggtttaccgacgccgcgtacgtatatatatgatcatggttttccgtatacggatccggttggtgtactatatgaagatggtgatgatacggtagcgacgcgatcgacggaattatgtggtctatggcaaggtcgtcaaccgcaaccggtacatctattaccgctacatggtatacaacatctaaatatggtattttcgaatctaacgctagaacatataaatgcgatactattaggtgcgtatcgacaaggtccgccggcgtcgccgacggcgtcgccggaaccgccgccgccggaa

SEQ ID NO: 4750 - DNA, 1320 bp, Artificial Sequence
  derived and/or modified sequence
atgggcccaccgggctctccttggcagtgggtgacccttcttttgggtctgcttctccctcccgccgcaccattctggctgctgaatgtgctctttcctcctcacacgacccccaaggcggagctctccaaccatacgaggcccgtcattcttgttcctggatgtctgggaaaccagctcgaggcaaagctcgacaagccagatgtcgttaattggatgtgttaccgaaaaaccgaggacttctttactatatggctggatctgaacatgtttctcccccttggagtggactgctggattgataacacccgggtggtgtacaatcgtagctcgggacttgtgtcaaacgcgccgggggtgcagatccgcgtccctggttttggtaagacttactccgtggaatacctcgattcaagcaaacttgcggggtacctccacaccctcgtgcagaacttggtcaacaacggttacgtgagagacgaaacggtcagagccgcaccgtacgattggcgtctcgaacctggacagcaggaggagtattacagaaaactggccggtctggtcgaagaaatgcacgctgcttacggcaagccagtgttcctcattggccattcgcttggttgcctgcatcttctctactttttgcttaggcaaccacaagcatggaaggacaggtttatcgacggatttatctctctgggggcgccttggggaggatcaattaagcccatgttggtgcttgcaagcggcgataaccaaggcattccgattatgtcatcgatcaaacttaaggaagaacagaggattaccactacttccccgtggatgtttccttcccgtatggcgtggcccgaagatcatgtgttcatctccactcctagctttaactatacgggaagggattttcaacgctttttcgccgatctgcatttcgaagaaggttggtacatgtggctccaatcccgagatcttctcgccggactgcctgcacctggcgtcgaagtgtattgtttgtacggcgtcggactccccacccccagaacctacatctacgaccacgggttcccttacactgaccctgttggagtcctgtacgaagatggtgacgatactgtggccaccagatccacggaactgtgtgggctttggcaagggcgtcaaccccagccggtgcaccttctgcccttgcatgggattcaacatctgaacatggtgttcagcaatctgaccttggagcatatcaacgcaatactgctgggcgcataccggcaagggcctccagcatcaccaactgcatcaccagagcctccacccccggag

SEQ ID NO: 4751 - DNA, 1320 bp, Artificial Sequence
  derived and/or modified sequence
atgggtcctcctggtagcccttggcagtgggttacactattgttgggtttacttctccctcctgctgcacctttttggttactcaatgttctgtttccaccgcatacaactcctaaggctgagttgtctaatcatactaggcctgttattttggtacctggttgcttgggaaaccaattagaggccaaacttgataagccagacgtcgttaactggatgtgttatcgaaagaccgaggattttttcactatatggcttgatctgaatatgttcttgcctttgggtgttgattgctggatagataacacgagggtagtttacaatcgctcctctggtttggtctcgaacgctccgggagtacaaatccgagttcctggcttcggtaagacttattccgtggaatatttggattcctctaagctggcaggttatctgcatactttggtacaaaatcttgtgaacaatggatacgtgcgggatgaaactgtcagagcggcaccttatgattggcgtttggagcctggtcaacaagaggagtattataggaagctggcaggattggttgaggaaatgcatgctgcttatggtaagccagttttccttattggacattcacttggatgccttcaccttctatatttcttacttcgtcaaccacaggcttggaaggatcggttcattgacggatttatttcacttggtgcgccatggggaggaagcattaagcctatgttagttctggctagtggagataatcaaggaatacccatcatgagctctatcaagctaaaggaagagcaaagaatcacgaccacctccccctggatgttcccaagccggatggcctggcctgaggaccatgtgtttatctctactcccagtttcaactataccggacgtgactttcaacgattcttcgctgacttgcactttgaagaagggtggtacatgtggttgcaaagtcgtgatttgcttgctgggctacccgccccaggtgtcgaggtgtactgtctttatggtgtcggattacccacccctcgtacttatatttacgatcatggtttcccatataccgatccggtgggagtgctttacgaggacggagatgatactgttgcgacacgctcgacagagctttgcggcctgtggcaggggcgacagccgcaacctgtacacttgctcccactccatgggatccagcacctcaatatggtgttctcgaatcttacactagaacatattaatgctatattattgggagcatacaggcaaggccctccagcttcgcctactgcgtctccggaaccccctcccccagag

SEQ ID NO: 4752 - DNA, 1320 bp, Artificial Sequence
  derived and/or modified sequence
atgggccccccgggaagcccttggcagtgggtgacgctcttgctcgggctcctgctgccgccagcggcgccgttctggctgcttaatgtgctgtttccgcctcatactaccccaaaggcggaactgtcaaaccatactcgcccagtcatcctggtgccgggatgcctgggcaatcagctggaagccaagctggataagcctgacgtcgtgaactggatgtgctacagaaagaccgaggacttctttactatttggctggacctcaacatgttcctgccgctgggagtggactgttggatcgacaatactcgagtggtctacaatcgctcgtcggggctggtgagcaacgctccgggcgttcaaattcgggtgccgggcttcggaaagacctattccgtggagtacctggattccagcaaacttgccgggtacctgcacaccctggtgcagaacttggtgaacaacggttacgtcagagacgagactgtgcgggccgctccgtacgattggcggctcgaaccggggcaacaggaggaatactaccgcaagctcgcaggactcgtggaggaaatgcacgccgcttacggaaagccagttttcctgatcggccacagcctcggatgcctgcacttgctgtacttcctcctgagacaaccgcaggcctggaaagacagattcatcgacggtttcatctctctcggagcaccctggggagggtcaatcaaacctatgctggtgctcgcatcaggagacaaccaaggtatcccgataatgtcgtccatcaagctgaaagaggagcaacgcatcaccaccacctcgccctggatgttccctagccgtatggcctggcctgaagatcacgtgtttatctcgactcccagttttaactacaccggacgggacttccaaaggttcttcgcagatcttcatttcgaagaaggatggtacatgtggttgcagtcacgcgatctccttgcgggattgccagccccgggagtagaagtctactgtctctatggagtcggcctccctacgccacggacctacatctacgaccacggattcccatacactgacccggtgggagtcctgtacgaagatggtgacgataccgtcgcaacgcggtccaccgagctctgcggcctgtggcagggaaggcagccgcagcctgtgcacctgttgccgcttcacggcatccagcatctgaacatggtgttttccaatctgactctcgaacatatcaatgccattctgcttggcgcctaccgccagggtccaccagcgtcgccgactgcttcccccgaaccgccacccccagag

SEQ ID NO: 4753 - DNA, 1320 bp, Artificial Sequence
  derived and/or modified sequence
atgggaccacctggttcgccctggcaatgggtcaccctcttgctcggactgctgctgccgccagcagcgcctttttggctcttgaatgtgctctttccaccacataccacgcctaaggccgaactgtcgaaccacacccggcctgtgatcctggtgcctggctgtcttggtaatcaattggaagcaaaacttgacaagccagacgtggtgaactggatgtgttaccgcaagactgaggacttcttcaccatatggctggatctgaacatgttcctgccacttggtgtggattgttggattgacaacacccgcgtcgtgtacaaccggtcatccggactggtgtcgaatgctcctggggtgcaaatccgagtcccgggatttggaaagacctattccgtggaatacctggacagctcgaagctcgcggggtacctgcacacgttggtccagaacctcgtgaataatgggtacgtgagggatgaaacggtgcgggcggccccatacgattggagactggagccgggacaacaggaagagtactacagaaagctcgcgggactggtggaagagatgcacgccgcttacggtaaacccgtatttctgattggtcattcacttggatgtctgcatctgctgtattttctcctgcgccaaccccaggcgtggaaagatcgctttatcgatggtttcatcagccttggagccccatggggagggtccattaaaccaatgttggtgcttgcaagcggagataaccagggtataccaattatgtcgagcatcaagctcaaggaggagcaacggattacgactactagcccatggatgtttccttctcgaatggcctggccagaagatcatgttttcatttctactcctagcttcaactacactggtagagacttccaaaggtttttcgcggatcttcattttgaagaaggatggtacatgtggctgcagtcgagagatcttcttgccgggctccccgctcctggtgtagaggtgtattgcctctacggcgttgggctcccaacccctaggacttacatctacgaccacggatttccatacactgaccccgtcggcgtgctctatgaggacggagatgatactgtcgcaaccagatcgactgagctgtgcggcctttggcaaggtcgtcaaccacagcccgtgcatcttctgcccctgcatggtattcaacatttgaacatggtattttccaatctcactcttgaacacattaatgcaatccttctgggcgcttaccggcagggcccaccagcatcccctaccgcatctcccgaacccccaccgcctgaa

SEQ ID NO: 4754 - DNA, 1320 bp, Artificial Sequence
  derived and/or modified sequence
atgggaccccctgggtcaccatggcagtgggtgactcttcttctcggactactcctgccacccgccgcccctttctggctactcaatgtcctcttccccccccacacaacacctaaggcagaactctcaaaccacacacggcccgttatcttagtgcccggatgtctcgggaatcagctggaggctaaactcgataaacctgatgtagtgaattggatgtgttacaggaaaacagaggacttctttacaatatggctcgatctgaacatgttcctcccactgggggtggactgctggatagataatacacgggtcgtgtacaaccggtcttcagggctagtttcaaacgccccaggagttcaaatacgggtcccagggttcggaaagacttactccgtagagtatttagattcctctaaactcgctgggtatctccatacactcgtccagaacctagtcaataatggatatgtacgggacgaaacagtccgggcagcaccatacgattggcggctggaacccggacagcaagaggagtattatcggaaactcgctggactagtggaagaaatgcacgcagcctatggaaaacccgtgtttctgatagggcactctcttggatgtcttcacctgctatattttctactccgtcagcctcaggcttggaaagacagattcattgacggatttatttccctgggagccccttggggaggaagtataaaaccaatgttggtgctcgcaagtggagataaccagggaattccaataatgtcttccataaaactcaaagaagaacagcggatcactacaacatctccttggatgttcccctctaggatggcctggcccgaagatcatgtattcatctctactccctctttcaactatactggacgggattttcagaggttcttcgccgatctgcattttgaagaagggtggtatatgtggctgcagagtcgggacctactcgctggactcccagcacccggagtggaagtctactgtttatatggagttggactcccaacacctaggacttatatctacgatcatggattcccttatacagatcctgtgggagtgctgtatgaagatggggatgatacagtcgctacaaggagtactgaactatgcgggttgtggcagggaagacagccccagcccgtacacttattaccacttcatgggatccagcacctgaatatggtgttctcaaaccttactttggagcacattaacgccatcttactcggagcctatcgccaggggccccccgcctcccccactgcctccccagaacccccaccacctgaa

SEQ ID NO: 4755 - DNA, 1320 bp, Artificial Sequence
  derived and/or modified sequence
atgggaccgccagggagcccctggcagtgggtcacgcttctgctgggattattgctcccccctgcagcccccttctggttattgaatgtcctgttccctcctcacacaactcccaaagccgagctctctaatcacactcgtcccgtcatactggttcccggttgtctagggaaccagctggaggcaaagttggataagcccgacgtagtgaactggatgtgctaccggaaaactgaagatttcttcaccatatggctcgacttgaacatgtttttgcccttgggtgtggactgctggatcgataacacccgcgtagtgtacaatcgcagttcgggtctggtgtctaacgctccgggagtgcagatcagagtgcctggcttcggaaaaacctatagcgtggaatacctggactccagtaaactggcaggttatctccacaccctggtccagaacttggtgaataatggctacgttcgggacgagacggtgcgggcagcgccctatgactggcgattagaaccgggccagcaagaagaatattaccgtaagctcgccggcctagtggaagagatgcatgccgcctatggaaaacctgtctttctgatcggacattcactcggctgcctgcatctattgtacttcctgctgagacagccacaggcctggaaagaccggtttatagacgggttcatatccctcggcgccccatggggggggtccataaagcccatgctggtgttagcttcgggtgataatcaggggatacctattatgtccagcatcaaacttaaggaagaacagcggattaccactacctctccatggatgtttcctagcaggatggcgtggcctgaggaccatgtcttcatctcgaccccctcttttaactatacagggagggattttcagagattttttgcagaccttcactttgaggagggctggtacatgtggcttcagtcgcgcgatttactcgccgggcttccagccccaggagtggaagtgtactgtctttatggggttgggctgcccacccctcgtacttacatttacgaccacggctttccctatacagaccccgtgggggtcctttacgaggacggcgatgacactgtggccacccgttccactgagttgtgcgggctgtggcagggaagacagccccaaccagtccacctgctgcccctccatggcattcaacacttaaatatggtgttcagcaatctgacccttgaacacattaatgccatcttattgggtgcttaccggcaagggccccccgcatccccgacagcctccccggaacccccccctccagag

SEQ ID NO: 4756 - DNA, 1320 bp, Artificial Sequence
  derived and/or modified sequence
atgggtcctcccggctccccctggcaatgggttaccctgctgcttggacttctcctccctccggcagcaccgttttggcttttgaacgtgttgttcccaccacacactacccctaaggcagagctgagtaatcacactcgtcctgttattctggtgccaggttgtctgggtaaccagctggaagccaagctggataagccagatgtagtgaattggatgtgttacagaaaaaccgaggacttcttcacgatttggctggatctgaacatgtttctgccactgggagtggactgttggattgacaatacccgagtggtgtataacagatcgtccgggctggtgagcaacgctcctggtgtgcagattagggtgccaggttttggtaagacctactcagtggagtacctggattcgtcgaaactggccggctacctgcatacccttgtgcaaaaccttgtcaataatggatacgtgcgggacgaaactgtcagagccgcgccatacgattggcgcttggaacctggtcaacaagaggaatactacagaaaactcgcgggactggtcgaagaaatgcatgcagcgtacggcaagcctgttttcctgataggtcattctctgggatgccttcatctgttgtatttcttgcttcgtcaaccccaggcctggaaagataggttcattgacggttttatctcactcggtgccccatggggaggatctatcaagcccatgctcgtcctggcaagcggtgacaaccaagggatcccgattatgagctcgatcaaacttaaggaggagcaaagaatcaccacgacttccccctggatgtttccttcgagaatggcctggcctgaagatcacgtgtttatcagcacccctagctttaactacactggaagagattttcaacggtttttcgccgatctgcattttgaggagggatggtacatgtggcttcagagccgcgatctcctggcagggctccccgccccaggggtggaagtctattgcctgtacggagtcggcctccctactccacggacttacatctacgaccacgggtttccatacacggatcccgtgggtgtcctttacgaggatggcgatgatactgtagccacccgcagcaccgaactctgtggcctttggcagggccgacaaccccagcccgtccaccttcttcccctccacggaatccagcatttgaatatggtcttttcgaacttgaccctggaacacattaatgcaatcctgcttggtgcctacagacaaggacccccagcatccccgactgcatcacctgaaccaccaccacccgag

SEQ ID NO: 4757 - DNA, 1320 bp, Artificial Sequence
  derived and/or modified sequence
atgggcccacccggatcgccgtggcagtgggtgaccttgctcctcggcctgttgctcccaccggccgccccattctggttgctcaatgtcctgttcccaccgcacaccaccccgaaagctgagctgtcgaaccatacccgcccagtgatccttgtgccgggatgcctcggaaaccaactggaagcgaagctggacaagccggatgtcgtgaactggatgtgctaccgcaagactgaggatttctttaccatctggctcgacctcaatatgtttctgccactcggagtggactgttggatcgacaataccagagtggtctacaatcgcagctcaggactcgtctccaacgcacctggagtgcaaatcagggtgcctggattcggaaagacttattccgtcgaatacttggacagcagcaagctggccgggtacctccataccctcgtgcagaacttggtgaacaacggatacgtgcgcgacgagactgtcagagccgctccctatgattggcgcctcgaaccgggacagcaagaagaatactaccggaagctggcaggactggtggaggaaatgcacgcggcctacggcaagccggtgttccttatcggtcactccctcggctgcctccaccttctgtacttcctcctccgccagccacaagcatggaaggatcgctttattgacggcttcatttcgcttggagcgccatggggtggctcgatcaaaccgatgttggtcctcgcctccggcgacaaccagggtatcccaatcatgtcgagcattaaactgaaggaggagcaacggatcactaccacttcgccatggatgttcccatcgcgtatggcgtggccagaagatcacgtctttatcagcactccatcgttcaattacactggcagagatttccaaagattcttcgcagatctgcattttgaagaaggatggtatatgtggttgcaatcgagggatctcctggccggactgccagcgccaggcgtggaggtctactgtttgtacggcgtgggactgccgacgccgcggacgtacatctacgatcacggatttccctacaccgaccccgtgggtgtgctctacgaagatggcgatgatactgtcgccactagatccactgaactttgcggtctgtggcaggggagacagccgcagccggtgcatctgttgccgctgcacggaatccagcacctcaacatggtgttttccaatctgactctggagcacatcaatgctatcttgctgggagcctacaggcagggaccgccggcttccccaactgcctcgccggagccgcctcccccggaa

SEQ ID NO: 4758 - DNA, 1320 bp, Artificial Sequence
  derived and/or modified sequence
atgggccctccgggaagcccctggcaatgggtcactctgcttctggggctgctgcttcctcctgcagcacctttttggctccttaacgtgttgttccctcctcacactacccctaaggcagagttgtccaaccatactcgccctgtgatccttgtgcctggctgtcttgggaatcaacttgaagcaaagttggacaagccggacgtggtgaactggatgtgttaccgtaaaactgaggacttctttactatttggctggatctcaacatgtttcttccgcttggagtcgattgctggatagacaacactagggtggtctacaaccgatcgtcaggacttgtcagcaatgcacctggtgtgcaaatcagggtgcccggattcggtaagacgtacagcgtggagtacctggattcatccaaactggcaggatacctgcacaccctggtgcaaaatctcgtcaataacgggtacgttagagatgaaacggttcgcgccgcaccctacgattggcgcctggaacctggtcaacaggaagaatactacagaaagctcgccggcctggtggaggaaatgcatgcagcgtacggtaagccggtgtttcttattggacactcactcggatgtctccatctcctgtattttctgttgaggcaaccgcaggcgtggaaggaccggtttatcgatgggtttatctcgctgggggcaccgtggggcggttcgattaagccgatgctggtgcttgcttctggtgataatcagggtattcctattatgagctccattaagctgaaagaagagcaacgtattaccaccacctccccgtggatgttccctagccgcatggcttggcctgaagatcatgtgttcatatcgactccgtccttcaattacaccggtagagacttccagcggttctttgcggatcttcattttgaagaaggttggtacatgtggctccaaagccgcgacctgctggcagggcttcctgcaccaggtgtcgaggtctactgtctgtacggggtcggcctgccaacgccacgcacctacatatatgaccacggattcccttacaccgatcccgtgggggtgctctacgaggacggtgatgataccgtagccactagaagcactgaactttgcgggttgtggcagggtcggcagccacaacctgtccaccttttgccgcttcatggaatccagcacctcaatatggtctttagcaaccttactcttgagcatatcaacgcaattctgctgggagcataccggcagggaccccctgcatctccaactgcatcccccgaaccaccgcctcctgag

SEQ ID NO: 4759 - DNA, 1320 bp, Artificial Sequence
  derived and/or modified sequence
atgggaccgcccggatccccgtggcaatgggtgacgttactgctgggtctgttgttaccgccagccgctcccttctggttgttgaatgttctgtttccgccccataccacgcctaaggccgagctatctaaccacacccgtcctgtgatcctcgtccccggctgcttgggcaaccagctcgaggcgaagctcgataagcccgacgtcgtcaactggatgtgctaccgcaagacggaggacttcttcaccatctggctcgatcttaacatgttcctcccactcggtgttgattgttggattgacaacacgcgtgtagtgtacaaccgctcctcgggcctcgtttctaacgcccccggcgtacagatcagggtccccggatttggtaagacttattctgtcgagtatctcgattcatccaagcttgcgggatacctgcataccttagtccaaaatctggtcaataacggctacgtgcgggacgagaccgtccgtgccgccccctacgactggaggttagagcccggtcagcaagaggaatactaccgtaaacttgccggcttggtcgaggagatgcatgccgcctacgggaagccggtcttcctgattgggcattccctgggttgcctacacctgctgtacttcctactacgccagcctcaggcatggaaggaccgcttcatcgacggcttcatttcgctgggcgctccctggggcggctcgatcaagcccatgctagtcctggcaagcggagacaaccagggcatcccaatcatgagctctatcaaattgaaggaggagcagcggatcaccaccaccagcccctggatgttcccgtccaggatggcatggcctgaggaccatgtctttatctcgacaccgtccttcaattacaccggtagagactttcagaggttcttcgctgacctccacttcgaagaggggtggtacatgtggctccagtcgcgtgatctcctggcgggcctgcccgcgcccggagtggaggtttactgcctttatggcgtaggcctaccgaccccccgtacctacatttacgaccatggtttcccttataccgaccctgtcggtgtcctttacgaggacggcgacgatacggtcgcgacccggtctacggaactgtgtggcctgtggcagggacggcagcctcagcctgttcaccttctgcccctacatggcatccagcacttgaacatggtcttctccaacctgactcttgagcacatcaatgcaatcttgttgggcgcctaccgccagggccctcccgcgtcgcccactgcctccccggaaccgcctccacctgag

SEQ ID NO: 4760 - DNA, 1320 bp, Artificial Sequence
  derived and/or modified sequence
atggggccacctggaagcccctggcaatgggtcacattgctcctcggtttgctactcccacccgccgccccattttggctgctcaacgttctgttccctccacacaccactcccaaagctgaactgagcaatcacacccgccctgtcattttagtgccaggctgtcttggaaaccagttagaggcaaagctagacaaacctgacgtcgtcaattggatgtgttaccgtaagaccgaggacttttttactatctggctcgatctaaacatgttcctacccctgggggtagattgttggattgacaacaccagggtagtgtataaccgctccagtggtctagtctctaatgccccaggagtccagatacgggtcccgggctttggaaaaacctattccgtggagtatctggacagttctaaactcgcgggttacctgcatactcttgtccagaatctcgtgaataacgggtacgtgcgtgacgagaccgtgcgagccgccccctacgattggcgcctggagccaggacagcaggaagagtactaccgcaagctcgcaggtctggtcgaggagatgcatgctgcatatggcaaacccgtttttctcattgggcacagtttagggtgccttcacctcctatattttttgctgcgccaacctcaggcgtggaaggacagattcatcgatggtttcatctccctcggagccccgtggggcggcagtatcaagcccatgctggtacttgcctcaggggacaaccagggtattccaattatgtctagtattaagctgaaggaggagcagcgcataactaccacctctccttggatgtttccctcccgtatggcctggccggaggatcacgtgttcatcagtacgccatcattcaattacacgggccgggatttccagagattcttcgctgatttgcacttcgaggagggctggtatatgtggctgcagagcagggatctgctagctgggttgcccgcgcctggcgtcgaagtttactgcctgtacggggtgggactcccgacgcccagaacatacatctatgatcacgggttcccctacaccgatcctgtcggcgtgctctatgaagacggagatgacactgtagcaactaggtcaactgagctgtgcggtttgtggcaaggtcgccagccccaacctgttcatctgcttcctctacatggaatacaacatttaaacatggttttttccaatctgacccttgagcacattaatgctattttactgggggcctacagacagggaccgccagcatctccaacagcgtcacccgagccccccccgcctgag

SEQ ID NO: 4761 - DNA, 1320 bp, Artificial Sequence
  derived and/or modified sequence
atgggccctcccggatctccctggcagtgggtcactctgctcctcggtctgttgctgcccccggctgctcctttctggcttcttaatgtactgtttccccctcataccacaccaaaggccgagctcagtaaccatactcggcccgtgatcctggtccctggatgtctgggcaatcagcttgaagccaagcttgacaagccagatgttgtcaattggatgtgctaccgaaaaacagaggacttcttcacaatatggctggatctgaatatgttccttcctctaggggtagattgctggatagacaataccagagtggtgtacaacagatctagcggcctcgtgtctaatgctcccggcgttcagataagggtgccagggttcgggaagacgtactcagttgaatacctggatagttctaagctcgccggatacctgcacaccctggtccagaatctggtaaacaacggatacgtcagggacgagaccgtgcgggcggcaccttacgattggagactcgaaccagggcaacaagaagaatactatagaaagctggcgggcctggtggaggaaatgcacgctgcctatggcaaacctgtttttcttattggacactcactgggctgcctgcatctattgtatttcttgttgaggcaaccccaggcgtggaaggatagattcatcgacggctttattagcttaggcgcaccctgggggggttcaattaagcctatgctcgtcctcgcctccggcgataatcagggaatcccaatcatgtcatctattaaactgaaggaggagcaacggattaccaccaccagtccctggatgtttccaagccgcatggcatggccagaggaccacgtatttatttctacaccttcattcaactacactgggcgcgactttcagaggttcttcgcggatctgcattttgaggaagggtggtacatgtggctgcagtcgagggacctcctggccgggcttcccgctccgggagtcgaagtgtattgtctgtacggtgtcggcctgccaaccccacgcacatatatctacgaccacggatttccatacacggacccagtaggtgtcctatacgaggatggtgatgacacagtggccacaaggtcaaccgaattatgtggcctgtggcaggggcgccaaccgcaaccagtccaccttctgcctctgcacggaatacagcatctaaacatggtgtttagcaacctgactctcgagcacattaacgccatactcctaggagcctaccgccagggcccacccgccagccccaccgctagccctgagccgccccctcccgaa

SEQ ID NO: 4762 - DNA, 1320 bp, Artificial Sequence
  derived and/or modified sequence
atgggccctccaggcagtccatggcagtgggtgacactgctgctgggcctcctcttgccacctgccgccccattttggctgctaaatgtgctgtttcccccccacactacacccaaggctgaactgtccaatcacacgcgcccagtgatcctggtgccggggtgcctcggcaatcagctggaggcaaagttagacaaacctgatgtcgtcaattggatgtgctaccgaaaaaccgaggacttttttacaatttggttggatttgaacatgttcctgcccttaggcgtggactgctggattgataacactagggtcgtttacaatagatctagcggactcgtgagcaatgccccaggggtgcagatccgtgtccctgggtttggcaagacttattccgtggagtatctcgactcaagcaaacttgcaggatatctgcacacattggtgcagaacttagttaacaacggttacgtgagagacgagactgtccgcgccgcgccttacgactggcggctggaacctggccagcaggaagaatattatagaaagctggccgggctcgtagaagagatgcacgctgcttacggcaagcccgtcttcctgattggccattctctcggctgcttgcacctgctgtactttcttctgcggcagccacaggcctggaaggacaggtttatcgacggattcatcagcttgggcgctccatggggagggagtattaaacctatgctcgtactcgcttcaggagacaaccagggaatccccataatgtcttctatcaagctgaaagaggagcaaaggattacaaccacctcgccatggatgttccctagccgaatggcctggcccgaagaccatgtgtttatctctaccccctcatttaactacacaggccgcgactttcagcgatttttcgcggatctgcattttgaagagggatggtatatgtggttgcagtctagagacttgctggccgggcttcctgcgcctggcgtcgaagtgtattgtctgtatggtgtcggtttgcctactccacgcacctatatatacgatcacggatttccgtatacagatcctgtgggtgtcctctatgaggatggagacgacacagtggctactagaagcacagagctgtgtggattatggcagggccgccaacctcagcctgtccacctgctgcccctgcatggcattcagcacctaaatatggtcttcagcaaccttactctcgaacacataaatgccatactgctgggtgcctaccgccaaggaccccctgctagccctacagcctcccccgaaccccccccgccggaa

SEQ ID NO: 4763 - DNA, 1320 bp, Artificial Sequence
  derived and/or modified sequence
atgggccctcccggctctccctggcagtgggtcacacttctacttgggctgctgcttcccccagccgcacccttctggctgctcaacgtactctttcccccgcataccacccccaaagccgaactctctaatcatacccggcccgttatcctggtgcccggctgcttaggaaaccagctggaggccaagctggataaaccagacgttgtaaattggatgtgctacagaaagacagaggatttctttacaatttggctagacttgaacatgtttttgcccctcggcgttgactgctggatagacaacacgagagtcgtgtataaccgtagttcgggattggtgagtaacgccccaggggtgcagattagagtgcccggatttgggaaaacgtattcggtcgagtatcttgacagcagcaaactcgcgggctatttgcacactctggtacagaacctcgtaaacaacggatatgttagggacgaaaccgtgcgggcggctccgtatgattggcggctcgagcctgggcaacaggaagaatactacaggaagcttgccggcttagtggaggagatgcacgcagcctacgggaaacccgttttcttaataggtcattctctgggttgcctccacctgctgtacttcctcctgcggcagccacaggcgtggaaggaccggtttattgatggatttatctccctgggagctccttggggaggatcgatcaagccgatgctcgtactggcttcaggagacaatcaaggcattcctataatgagtagtattaaattgaaggaggagcagcgaataacaaccaccagtccgtggatgttccctagtaggatggcatggcccgaagaccacgtcttcattagtactccgagcttcaattacacagggcgggacttccagcggttcttcgctgatcttcattttgaagaggggtggtatatgtggctccagtcccgcgaccttctagcgggcctgcccgccccaggtgtcgaggtgtattgtttatacggggttggcctcccaactcctcgtacgtacatttatgaccacggatttccctataccgatcctgtgggggtcctctacgaagatggggatgacactgtggccacacgatccaccgagctgtgtgggttgtggcagggccgacagccacaaccggtgcatctgctgcctctgcacggaatacagcatctgaatatggtgttttctaacctgaccctggaacatattaacgcgatcctgctcggggcataccgccagggcccccctgccagccctacagcttcaccagagccaccccctcccgag

SEQ ID NO: 4764 - DNA, 1323 bp, Artificial Sequence
  derived and/or modified sequence
atgggcccccccggcagcccctggcagtgggtgaccctgctgctgggcctgctgctgccccccgccgcccccttctggctgctgaacgtgctgttccccccccacaccacccccaaggccgagctgagcaaccacaccagacccgtgatcctggtgcccggctgcctgggcaaccagctggaggccaagctggacaagcccgacgtggtgaactggatgtgctacagaaagaccgaggacttcttcaccatctggctggacctgaacatgttcctgcccctgggcgtggactgctggatcgacaacaccagagtggtgtacaacagaagcagcggcctggtgagcaacgcccccggcgtgcagatcagagtgcccggcttcggcaagacctacagcgtggagtacctggacagcagcaagctggccggctacctgcacaccctggtgcagaacctggtgaacaacggctacgtgagagacgagaccgtgagagccgccccctacgactggagactggagcccggccagcaggaggagtactacagaaagctggccggcctggtggaggagatgcacgccgcctacggcaagcccgtgttcctgatcggccacagcctgggctgcctgcacctgctgtacttcctgctgagacagccccaggcctggaaggacagattcatcgacggcttcatcagcctgggcgccccctggggcggcagcatcaagcccatgctggtgctggccagcggcgacaaccagggcatccccatcatgagcagcatcaagctgaaggaggagcagagaatcaccaccaccagcccctggatgttccccagcagaatggcctggcccgaggaccacgtgttcatcagcacccccagcttcaactacaccggcagagacttccagagattcttcgccgacctgcacttcgaggagggctggtacatgtggctgcagagcagagacctgctggccggcctgcccgcccccggcgtggaggtgtactgcctgtacggcgtgggcctgcccacccccagaacctacatctacgaccacggcttcccctacaccgaccccgtgggcgtgctgtacgaggacggcgacgacaccgtggccaccagaagcaccgagctgtgcggcctgtggcagggcagacagccccagcccgtgcacctgctgcccctgcacggcatccagcacctgaacatggtgttcagcaacctgaccctggagcacatcaacgccatcctgctgggcgcctacagacagggcccccccgccagccccaccgccagccccgagccccccccccccgagtag

SEQ ID NO: 4765 - DNA, 1469 bp, Artificial Sequence
  derived and/or modified sequence
gggaaataagagagaaaagaagagtaagaagaaatataagagccaccatggggcctcccgggtcgccgtggcagtgggtcaccttgctgcttgggttgctgttgcctcctgctgcgcccttttggttgctgaatgtgctctttccacctcacacgacaccaaaggccgagctctcgaatcacaccaggccggtgattttggtgcccgggtgccttgggaaccaactggaagccaaattggacaagcccgatgtggtgaactggatgtgttatcgaaagacagaggacttcttcactatttggcttgacctcaatatgtttctcccgctgggagtggactgctggatcgataatacccgcgtcgtatacaacagatccagcggtcttgtatcaaacgctcccggagtccagattagagtccccggttttggaaaaacttacagcgtagaataccttgattcatcaaaacttgcgggatatctgcatacgctggtgcagaacctcgtgaataacgggtacgtcagagatgaaacagtccgagccgcaccgtacgactggcgcttggaaccgggccaacaggaggagtattaccgcaaactcgccggacttgtcgaggagatgcacgcagcctacggaaagccagtgtttctgattggtcattcactggggtgtctccacttgctctattttctcttgagacagcctcaagcgtggaaagaccggttcatcgacggctttatctccctcggtgcgccatggggaggctccatcaagcctatgctcgtcttggcatcgggcgataaccagggcatcccgattatgagcagcatcaaacttaaggaggagcagaggattactacgacatcgccctggatgttcccgtccagaatggcctggcccgaagatcatgtattcatcagcacgccctcgttcaattacacagggcgagacttccagaggtttttcgcggatctccacttcgaggaagggtggtacatgtggcttcaatcgcgggacttgctggcgggactccctgcgcctggggtggaagtatattgtttgtacggagtcggccttcccacgccacggacttatatctacgaccacgggttcccctatacggatccggtaggagtactttatgaggacggggatgatacagtggcgacgcggagcacggagttgtgcggattgtggcagggtcggcagccacagccggtgcacctgttgccgctgcacggaattcagcatctgaatatggtgttttcgaacctcacccttgaacatatcaacgcaatcctgctcggtgcgtatcgccagggaccgccagcttcacccacagcatcgccggagccgccaccgcctgaatgataataggctgccttctgcggggcttgccttctggccatgcccttcttctctcccttgcacctgtacctcttggtctttgaataaagcctgagtaggaag

SEQ ID NO: 4766 - DNA, 1323 bp, Artificial Sequence
  derived and/or modified sequence
atgggtcccccagggtcaccatggcagtgggtgaccctgttactcgggctgctgctgccaccagccgcccctttctggctgctgaacgtgctgtttcccccgcatacaactccgaaggcagagctgtccaaccatactcgcccagtgatacttgtgcctggatgcctcggaaaccagctcgaggctaagctcgacaagcctgatgttgttaactggatgtgctacagaaaaaccgaggacttttttaccatctggctggatctcaatatgtttcttcccctgggcgttgactgttggattgacaacaccagagtggtgtataacagatcttccggactagtctcaaatgctcctggggtacaaattcgggtgcctgggtttggaaagacatacagcgtggaatacctcgacagtagcaagctggccggctacctacacacacttgtgcagaacctcgtgaataatgggtacgttcgagacgagaccgtaagagccgccccatatgactggaggcttgaacctgggcagcaggaagagtattatcggaagctggctggccttgtcgaggaaatgcatgcagcttatgggaagcccgtctttcttataggccatagtctgggctgtctgcacctgctgtacttcctgttaaggcagccccaggcatggaaggaccgctttattgatggcttcatctcgttaggcgccccgtgggggggaagcattaagccgatgctggtcctcgccagtggcgataaccagggaatacccatcatgtcctctataaagcttaaggaggagcagcggatcactactacgagcccttggatgttcccttcaaggatggcctggcctgaagatcatgtgtttatcagtacacccagctttaactacacgggtcgcgactttcaacggttttttgccgatcttcatttcgaggagggatggtacatgtggcttcaatcccgagatcttctcgccggattgcccgcaccaggggtggaggtctattgcttgtacggcgtcggattacccactcctcgtacatacatttacgatcacggctttccatatacagaccccgtcggagttctgtatgaggatggcgacgatacggtcgccacccgttctaccgagttgtgtgggctgtggcaaggaagacagccccaaccagttcatctattgccactccatggtatacagcacctcaacatggtgttctcaaatttgacgctcgaacacatcaacgctattctccttggagcttatcgccagggaccaccagcctcaccgacagccagccccgaacctccaccgcctgagtag

SEQ ID NO: 4767 - DNA, 1323 bp, Artificial Sequence
  derived and/or modified sequence
atgggccccccaggcagcccctggcagtgggtgaccctgctgctgggcctgctgctgcccccagctgcccccttctggctgctgaatgtgctcttccccccccacaccacccccaaggccgagctgagcaaccacaccaggcctgtgatcctggtgcccggctgcctgggcaaccagctggaggccaagctggacaagccagatgtggtgaactggatgtgctacaggaagacagaggacttcttcaccatctggctggacctgaacatgttcctgcccctgggcgtggactgctggattgacaacaccagggtggtgtacaacagaagcagcggcctggtgtccaatgcccctggggtgcagatccgggtgcccggctttgggaagacctacagcgtggagtacctggacagcagcaagctggccggctacctgcacaccctggtgcagaacctggtgaacaacggctacgtgagagatgagaccgtgcgggccgccccctatgactggaggctggagcccggccagcaggaggagtactacaggaagctggccggcctggtggaggagatgcatgctgcctacggcaagcctgtgttcctgattggccacagcctgggctgcctgcacctgctgtacttcctgctgcggcagccccaggcctggaaggaccgcttcattgatggcttcatcagcctgggcgccccctggggcggcagcatcaagcccatgctggtgctggccagcggggacaaccagggcatccccatcatgagcagcatcaagctgaaggaggagcagaggatcaccaccaccagcccctggatgttccccagcaggatggcctggccagaagatcatgtgttcatcagcacccccagcttcaactacacaggccgggacttccagcgcttctttgctgacctgcactttgaggagggctggtacatgtggctgcagagccgggacctgctggccggcctgcctgcccctggggtggaggtgtactgcctgtatggagtgggcctgcccacccccaggacctacatctatgaccacggcttcccctacacagatcctgtgggcgtgctgtatgaagatggagatgacacagtggccaccaggagcacagagctgtgtggcctgtggcagggccggcagccccagcctgtgcacctgctgcccctgcacggcatccagcacctgaacatggtgttcagcaacctgaccctggagcacatcaatgccatcctgctgggcgcctaccggcagggccccccagccagccccacagccagccctgagcccccacctcctgagtag

SEQ ID NO: 4768 - DNA, 1323 bp, Artificial Sequence
  derived and/or modified sequence
atgggcccccccggcagcccctggcagtgggtgaccctgctgctgggcctactgttgccgcctgcagctcccttctggctgctgaacgtgctgttccccccacacactacccccaaagcagagctctccaaccatacacgacccgttattctggtgccgggatgtctcggcaaccagcttgaagcaaagttggacaaacccgacgtggtaaactggatgtgttaccggaaaactgaggactttttcaccatttggctcgatctaaacatgttccttcctctcggtgtggactgctggatcgataacacacgcgtggtatataaccgaagctcagggctggttagtaacgctccaggggtgcagatccgcgtccccgggttcgggaagacctacagtgtggaatacctggattcaagcaagttggccggatacctgcacacacttgtacaaaacctcgtcaacaacgggtacgtgcgcgatgaaaccgtgagggcagccccgtacgattggcgcctggaacctggtcagcaggaggaatactataggaagctggccggattggtcgaagagatgcacgccgcttatggtaagccagtttttctaataggacattctttgggctgccttcacttgctgtatttccttctcaggcagccgcaggcttggaaggaccggtttatcgatgggttcatctcgctgggagctccttggggagggagcataaagcctatgctcgtcctggcatcaggcgacaatcagggcattccaataatgagctccataaaactgaaagaggagcaacgaatcaccacaaccagcccatggatgttcccatcccggatggcctggcctgaagatcacgtcttcatcagcaccccttcatttaattacactgggcgcgactttcaacgcttttttgccgacctgcacttcgaggaggggtggtatatgtggctgcagtcaagagatctcctggccggactcccagctccaggcgtggaagtttactgcctgtacggcgttggcctccccactcctcggacatatatctatgaccacggcttcccttacacagatcctgtcggggtgctgtacgaagacggtgacgataccgtagcgactagaagtaccgaactctgtggcctgtggcaggggcgtcagccacagcccgtgcatctgctgcctctgcatggtatccagcacttaaacatggtgttctctaatttaaccttggaacacatcaatgccatcctactgggcgcataccgacagggaccccccgcttcccccaccgcctcaccagaacccccacctccggaatag

SEQ ID NO: 4769 - DNA, 1323 bp, Artificial Sequence
  derived and/or modified sequence
atggggcctccgggtagtccatggcaatgggtaacactgttgctgggcctattgctgcctcctgcggcacccttctggcttctgaatgtgctgttcccacctcacacaacacctaaggcagagctgtccaatcatacgagaccggtgatcctagtccccggttgtctgggcaatcaacttgaggctaaactcgataagccagatgtagtaaactggatgtgctataggaagaccgaagacttcttcaccatctggctggatctgaatatgtttttgcccctgggggttgactgctggatagacaacacaagggtggtctacaatagaagttcaggacttgttagcaacgcccctggggtacagattcgcgtacctgggttcggcaaaacctactctgtggaatatctggacagctcgaagctggctgggtatctccatacactggtccaaaacttagtcaacaacggatacgtgagagacgaaacagtgcgcgctgctccatacgattggaggttggagcctggacagcaagaggagtattatagaaaacttgccggactcgtggaggagatgcatgctgcatatggcaagcccgtgtttcttatcggccacagtcttggatgcctccacttgttgtatttcttgctccggcaaccacaggcctggaaggacaggtttattgacggcttcatcagcttaggcgctccttggggagggagcataaagcctatgttggtactcgctagcggagacaaccagggcatccccattatgagtagcattaagcttaaggaagaacagcgaattacaactactagcccatggatgtttccaagtagaatggcatggccagaggatcacgtgttcatctccacgcccagcttcaactatacaggccgtgactttcagaggttctttgctgaccttcatttcgaagaagggtggtatatgtggctgcagagtagggatctgttagctgggctgccggctcccggtgtggaggtttactgcctgtacggagttggattgcccacaccgagaacctatatttacgatcacggcttcccttataccgatccagtgggagtcctctacgaggacggtgatgatactgtagcgactcggtccaccgaactgtgtggcctatggcagggccgacagccacaacccgtgcacctcttacccttacatggaatccagcacctgaatatggtgttctctaatctgacactggagcatatcaatgcaatcctgcttggagcctacaggcagggaccccctgcaagtcccacagcaagcccagagcctccacctcctgaatag

SEQ ID NO: 4770 - DNA, 1887 bp, Artificial Sequence
  derived and/or modified sequence
tttattgtttggatgtcaccatcagagacgaagggaagggtagccagggagggagtccagcccagctgcctgcaggaagatctggctcagtctactatgggcagggccccccaccaagctgagccgaatggagacagctgagctgaggcctgactttttcaataaaacattgtgtagttctgggcctcctgctgccccggctctgtttcccctggcgccaagagaagaaggcggaactgaacccaggcccagagccggctccctgaggctgtgcccctttccggcaatctctggccacaacccccactggccaggccgtccctcccactggccctagggcccctcccactcccacaccagataaggacagcccagtgccgctttctctggcagtaggcaccagggctggaatggggccgcccggctccccatggcagtgggtgacgctgctgctggggctgctgctccctcctgccgcccccttctggctcctcaatgtgctcttccccccgcacaccacgcccaaggctgagctcagtaaccacacacggcccgtcatcctcgtgcccggctgcctggggaatcagctagaagccaagctggacaaaccagatgtggtgaactggatgtgctaccgcaagacagaggacttcttcaccatctggctggatctcaacatgttcctaccccttggggtagactgctggatcgataacaccagggttgtctacaaccggagctctgggctcgtgtccaacgcccctggtgtccagatccgcgtccctggctttggcaagacctactctgtggagtacctggacagcagcaagctggcagggtacctgcacacactggtgcagaacctggtcaacaatggctacgtgcgggacgagactgtgcgcgccgccccctatgactggcggctggagcccggccagcaggaggagtactaccgcaagctcgcagggctggtggaggagatgcacgctgcctatgggaagcctgtcttcctcattggccacagcctcggctgtctacacttgctctatttcctgctgcgccagccccaggcctggaaggaccgctttattgatggcttcatctctcttggggctccctggggtggctccatcaagcccatgctggtcttggcctcaggtgacaaccagggcatccccatcatgtccagcatcaagctgaaagaggagcagcgcataaccaccacctccccctggatgtttccctctcgcatggcgtggcctgaggaccacgtgttcatttccacacccagcttcaactacacaggccgtgacttccaacgcttctttgcagacctgcactttgaggaaggctggtacatgtggctgcagtcacgtgacctcctggcaggactcccagcacctggtgtggaagtatactgtctttacggcgtgggcctgcccacgccccgcacctacatctacgaccacggcttcccctacacggaccctgtgggtgtgctctatgaggatggtgatgacacggtggcgacccgcagcaccgagctctgtggcctgtggcagggccgccagccacagcctgtgcacctgctgcccctgcacgggatacagcatctcaacatggtcttcagcaacctgaccctggagcacatcaatgccatcctgctgggtgcctaccgccagggtccccctgcatccccgactgccagcccagagcccccgcctcctgaataaagaccttcctttgctaccgtaagccctgatggctatgtttcaggttgaagggaggcactagagtcccacactaggtttcactcctcaccagccacaggctcagtgctgtgtgcagtgaggcaagatgggctctgctgaggcctgggactgagct

SEQ ID NO: 4771 - RNA, 1469 nt, Artificial Sequence
  derived and/or modified sequence
gggaaauaagagagaaaagaagaguaagaagaaauauaagagccaccauggggccucccgggucgccguggcagugggucaccuugcugcuuggguugcuguugccuccugcugcgcccuuuugguugcugaaugugcucuuuccaccucacacgacaccaaaggccgagcucucgaaucacaccaggccggugauuuuggugcccgggugccuugggaaccaacuggaagccaaauuggacaagcccgauguggugaacuggauguguuaucgaaagacagaggacuucuucacuauuuggcuugaccucaauauguuucucccgcugggaguggacugcuggaucgauaauacccgcgucguauacaacagauccagcggucuuguaucaaacgcucccggaguccagauuagaguccccgguuuuggaaaaacuuacagcguagaauaccuugauucaucaaaacuugcgggauaucugcauacgcuggugcagaaccucgugaauaacggguacgucagagaugaaacaguccgagccgcaccguacgacuggcgcuuggaaccgggccaacaggaggaguauuaccgcaaacucgccggacuugucgaggagaugcacgcagccuacggaaagccaguguuucugauuggucauucacuggggugucuccacuugcucuauuuucucuugagacagccucaagcguggaaagaccgguucaucgacggcuuuaucucccucggugcgccauggggaggcuccaucaagccuaugcucgucuuggcaucgggcgauaaccagggcaucccgauuaugagcagcaucaaacuuaaggaggagcagaggauuacuacgacaucgcccuggauguucccguccagaauggccuggcccgaagaucauguauucaucagcacgcccucguucaauuacacagggcgagacuuccagagguuuuucgcggaucuccacuucgaggaagggugguacauguggcuucaaucgcgggacuugcuggcgggacucccugcgccugggguggaaguauauuguuuguacggagucggccuucccacgccacggacuuauaucuacgaccacggguuccccuauacggauccgguaggaguacuuuaugaggacggggaugauacaguggcgacgcggagcacggaguugugcggauuguggcagggucggcagccacagccggugcaccuguugccgcugcacggaauucagcaucugaauaugguguuuucgaaccucacccuugaacauaucaacgcaauccugcucggugcguaucgccagggaccgccagcuucacccacagcaucgccggagccgccaccgccugaaugauaauaggcugccuucugcggggcuugccuucuggccaugcccuucuucucucccuugcaccuguaccucuuggucuuugaauaaagccugaguaggaag

SEQ ID NO: 4772 - protein, 167 aa, Artificial Sequence
  derived and/or modified sequence
MHWGTLCGFLWLWPYLFYVQAVPIQKVQDDTKTLIKTIVTRINDISHTQSVSSKQKVTGLDFIPGLHPILTLSKMDQTLAVYQQILTSMPSRNVIQISNDLENLRDLLHVLAFSKSCHLPWASGLETLDSLGGVLEASGYSTEVVALSRLQGSLQDMLWQLDLSPGC

SEQ ID NO: 4773 - DNA, 504 bp, Artificial Sequence
  derived and/or modified sequence
atgcactggggcaccctgtgcggcttcctgtggctgtggccctacctgttctacgtgcaggccgtgcccatccagaaggtgcaggacgacaccaagaccctgatcaagaccatcgtgaccagaatcaacgacatcagccacacccagagcgtgagcagcaagcagaaggtgaccggcctggacttcatccccggcctgcaccccatcctgaccctgagcaagatggaccagaccctggccgtgtaccagcagatcctgaccagcatgcccagcagaaacgtgatccagatcagcaacgacctggagaacctgagagacctgctgcacgtgctggccttcagcaagagctgccacctgccctgggccagcggcctggagaccctggacagcctgggcggcgtgctggaggccagcggctacagcaccgaggtggtggccctgagcagactgcagggcagcctgcaggacatgctgtggcagctggacctgagccccggctgctag

SEQ ID NO: 4774 - DNA, 504 bp, Artificial Sequence
  derived and/or modified sequence
atgcattggggaacactctgcggcttcctatggctgtggccatatctgttctacgtgcaggcagttcccattcagaaagtacaggacgataccaagacactgatcaagactatcgtgacccgaattaacgacattagccacactcaatccgttagctccaagcagaaggtgaccggcctggacttcattcccggactgcatccgatcttaactctgtccaaaatggaccagactcttgccgtgtaccagcagatcttgacaagtatgcctagcaggaacgtgatccagatatcaaatgacctcgagaatttgcgggacctgcttcatgtgcttgctttttcgaagtcttgccatctcccttgggcttccggattggaaactctggatagcctgggaggtgtgttggaggcctccggatatagtaccgaagtggtggccctgtcccgactccagggcagcctccaggacatgctttggcagctggacctgagccccgggtgttag

SEQ ID NO: 4775 - DNA, 504 bp, Artificial Sequence
  derived and/or modified sequence
atgcactggggcaccctgtgtggcttcctgtggctgtggccctacctgttctacgtgcaggccgtgcccatccagaaggtgcaggatgacaccaagaccctcatcaagaccatcgtgacccgcatcaatgacatcagccacacccagagcgtgagcagcaagcagaaggtgacaggcctggacttcatccctggcctgcaccccatcctgaccctgagcaagatggaccagaccctggccgtgtaccagcagatcctgacctccatgcccagcagaaatgtcatccagatcagcaatgacctggagaacctgcgggacctgctgcacgtgctggccttcagcaagagctgccacctgccctgggccagcggcctggagaccctggacagcctgggcggcgtgctggaggccagcggctacagcacagaggtggtggccctgagccggctgcagggcagcctgcaggacatgctgtggcagctggacctgagccctggctgctag

SEQ ID NO: 4776 - DNA, 3420 bp, Artificial Sequence
  derived and/or modified sequence
atcgcagcgccagcggttgcaaggcccaagaagcccatcctgggaaggaaaatgcattggggaaccctgtgcggattcttgtggctttggccctatcttttctatgtccaagctgtgcccatccaaaaagtccaagatgacaccaaaaccctcatcaagacaattgtcaccaggatcaatgacatttcacacacgcagtcagtctcctccaaacagaaagtcaccggtttggacttcattcctgggctccaccccatcctgaccttatccaagatggaccagacactggcagtctaccaacagatcctcaccagtatgccttccagaaacgtgatccaaatatccaacgacctggagaacctccgggatcttcttcacgtgctggccttctctaagagctgccacttgccctgggccagtggcctggagaccttggacagcctggggggtgtcctggaagcttcaggctactccacagaggtggtggccctgagcaggctgcaggggtctctgcaggacatgctgtggcagctggacctcagccctgggtgctgaggccttgaaggtcactcttcctgcaaggactacgttaagggaaggaactctggcttccaggtatctccaggattgaagagcattgcatggacaccccttatccaggactctgtcaatttccctgactcctctaagccactcttccaaaggcataagaccctaagcctccttttgcttgaaaccaaagatatatacacaggatcctattctcaccaggaagggggtccacccagcaaagagtgggctgcatctgggattcccaccaaggtcttcagccatcaacaagagttgtcttgtcccctcttgacccatctccccctcactgaatgcctcaatgtgaccaggggtgatttcagagagggcagaggggtaggcagagcctttggatgaccagaacaaggttccctctgagaattccaaggagttccatgaagaccacatccacacacgcaggaactcccagcaacacaagctggaagcacatgtttatttattctgcattttattctggatggatttgaagcaaagcaccagcttctccaggctctttggggtcagccagggccaggggtctccctggagtgcagtttccaatcccatagatgggtctggctgagctgaacccattttgagtgactcgagggttgggttcatctgagcaagagctggcaaaggtggctctccagttagttctctcgtaactggtttcatttctactgtgactgatgttacatcacagtgtttgcaatggtgttgccctgagtggatctccaaggaccaggttattttaaaaagatttgttttgtcaagtgtcatatgtaggtgtctgcacccaggggtggggaatgtttgggcagaagggagaaggatctagaatgtgttttctgaataacatttgtgtggtgggttctttggaaggagtgagatcattttcttatcttctgcaattgcttaggatgtttttcatgaaaatagctctttcaggggggttgtgaggcctggccaggcaccccctggagagaagtttctggccctggctgaccccaaagagcctggagaagctgatgctttgcttcaaatccatccagaataaaacgcaaagggctgaaagccatttgttggggcagtggtaagctctggctttctccgactgctagggagtggtctttcctatcatggagtgacggtcccacactggtgactgcgatcttcagagcaggggtccttggtgtgaccctctgaatggtccagggttgatcacactctgggtttattacatggcagtgttcctatttggggcttgcatgccaaattgtagttcttgtctgattggctcacccaagcaaggccaaaattaccaaaaatcttggggggtttttactccagtggtgaagaaaactcctttagcaggtggtcctgagacctgacaagcactgctaggcgagtgccaggactccccaggccaggccaccaggatggcccttcccactggaggtcacattcaggaagatgaaagaggaggtttggggtctgccaccatcctgctgctgtgtttttgctatcacacagtgggtggtggatctgtccaaggaaacttgaatcaaagcagttaactttaagactgagcacctgcttcatgctcagccctgactggtgctataggctggagaagctcacccaataaacattaagattgaggcctgccctcagggatcttgcattcccagtggtcaaaccgcactcacccatgtgccaaggtggggtatttaccacagcagctgaacagccaaatgcatggtgcagttgacagcaggtgggaaatggtatgagctgaggggggccgtgcccaggggcccacagggaaccctgcttgcactttgtaacatgtttacttttcagggcatcttagcttctattatagccacatccctttgaaacaagataactgagaatttaaaaataagaaaatacataagaccataacagccaacaggtggcaggaccaggactatagcccaggtcctctgatacccagagcattacgtgagccaggtaatgagggactggaaccagggagaccgagcgctttctggaaaagaggagtttcgaggtagagtttgaaggaggtgagggatgtgaattgcctgcagagagaagcctgttttgttggaaggtttggtgtgtggagatgcagaggtaaaagtgtgagcagtgagttacagcgagaggcagagaaagaagagacaggagggcaagggccatgctgaagggaccttgaagggtaaagaagtttgatattaaaggagttaagagtagcaagttctagagaagaggctggtgctgtggccagggtgagagctgctctggaaaatgtgacccagatcctcacaaccacctaatcaggctgaggtgtcttaagccttttgctcacaaaacctggcacaatggctaattcccagagtgtgaaacttcctaagtataaatggttgtctgtttttgtaacttaaaaaaaaaaaaaaaagtttggccgggtgcggtggctcacgcctgtaatcccagcactttgggaggccaaggtggggggatcacaaggtcactagatggcgagcatcctggccaacatggtgaaaccccgtctctactaaaaacacaaaagttagctgagcgtggtggcgggcgcctgtagtcccagccactcgggaggctgagacaggagaatcgcttaaacctgggaggcggagagtacagtgagccaagatcgcgccactgcactccggcctgatgacagagcgagattccgtcttaaaaaaaaaaaaaaaaaagtttgtttttaaaaaaatctaaataaaataactttgccccctg

SEQ ID NO: 4777 - DNA, 504 bp, Artificial Sequence
  derived and/or modified sequence
atgcactggggcaccctgtgcggcttcctgtggctgtggccctacctgttctatgtccaagccgtacctatccagaaagtccaggacgataccaagacgctaataaaaacaattgtgacaagaatcaatgatatttcgcacacccagtccgtcagcagcaaacagaaggtgacaggactcgatttcatccctgggttgcacccaatactaacactgtccaaaatggatcaaactctggccgtgtaccagcagatcttaacaagcatgccttcgcgcaacgtcatccagatcagcaacgatctagaaaacttgcgtgatctgctgcatgtattagcgtttagtaaatcctgtcatctgccctgggcgtctggtctggagacactggactccctgggaggggttctcgaagcatctggatattctactgaggtcgtcgctttgtccaggctgcaggggtctctacaagacatgctgtggcagcttgacctgagtcctggctgctag

SEQ ID NO: 4778 - DNA, 504 bp, Artificial Sequence
  derived and/or modified sequence
atgcactggggaacactgtgtggatttttgtggttgtggccatatttgttttacgtccaggccgtccctattcagaaggtgcaagacgacacaaagaccctgataaagaccatcgtcacccgcattaacgacattagtcatacccagagtgtgagcagtaagcaaaaagttacgggcttggatttcatccccggactccacccgatcctcactttatccaaaatggatcagacgttggccgtttatcaacaaattttaacctccatgcctagtagaaacgtgattcaaattagcaatgatcttgagaatctgagagacctcctgcacgttctggccttttccaagtcctgccacttgccctgggcgagcggcctcgagacgctcgacagtctgggcggagtactcgaggcttcgggatattccactgaagtagtcgccctgtctcggctccagggcagcctgcaggacatgctttggcagctggatctgagccctgggtgttag

SEQ ID NO: 4779 - DNA, 504 bp, Artificial Sequence
  derived and/or modified sequence
atgtgctggagacccctgtgtcggttcctgtggctttggtcctatctgtcttatgttcaagcagtgcctatccagaaagtccaggatgacaccaaaaccctcatcaagaccattgtcaccaggatcaatgacatttcacacacgcagtcggtatccgccaagcagagggtcactggcttggacttcattcctgggcttcaccccattctgagtttgtccaagatggaccagactctggcagtctatcaacaggtcctcaccagcctgccttcccaaaatgtgctgcagatagccaatgacctggagaatctccgagacctcctccatctgctggccttctccaagagctgctccctgcctcagaccagtggcctgcagaagccagagagcctggatggcgtcctggaagcctcactctactccacagaggtggtggctttgagcaggctgcagggctctctgcaggacattcttcaacagttggatgttagccctgaatgctga

SEQ ID NO: 4780 - DNA, 695 bp, Artificial Sequence
  derived and/or modified sequence
aagcttttggaccctcgtacagaagctaatacgactcactatagggaaataagagagaaaagaagagtaagaagaaatataagagccaccatgtgctggagacccctgtgtcggttcctgtggctttggtcctatctgtcttatgttcaagcagtgcctatccagaaagtccaggatgacaccaaaaccctcatcaagaccattgtcaccaggatcaatgacatttcacacacgcagtcggtatccgccaagcagagggtcactggcttggacttcattcctgggcttcaccccattctgagtttgtccaagatggaccagactctggcagtctatcaacaggtcctcaccagcctgccttcccaaaatgtgctgcagatagccaatgacctggagaatctccgagacctcctccatctgctggccttctccaagagctgctccctgcctcagaccagtggcctgcagaagccagagagcctggatggcgtcctggaagcctcactctactccacagaggtggtggctttgagcaggctgcagggctctctgcaggacattcttcaacagttggatgttagccctgaatgctgagctgccttctgcggggcttgccttctggccatgcccttcttctctcccttgcacctgtacctcttggtctttgaataaagcctgagtaggaaggcggccgc

SEQ ID NO: 4781 - protein, 318 aa, Artificial Sequence
  derived and/or modified sequence
MAAAAAAAAEQQSSNGPVKKSMREKAVERRSVNKEHNSNFKAGYIPIDEDRLHKTGLRGRKGNLAICVIILLFILAVINLIITLVIWAVIRIGPNGCDSMEFHESGLLRFKQVSDMGVIHPLYKSTVGGRRNENLVITGNNQPIVFQQGTTKLSVENNKTSITSDIGMQFFDPRTQNILFSTDYETHEFHLPSGVKSLNVQKASTERITSNATSDLNIKVDGRAIVRGNEGVFIMGKTIEFHMGGNMELKAENSIILNGSVMVSTTRLPSSSSGDQLGSGDWVRYKLCMCADGTLFKVQVTSQNMGCQISDNPCGNTH

SEQ ID NO: 4782 - DNA, 957 bp, Artificial Sequence
  derived and/or modified sequence
atggccgctgctgctgctgctgccgccgaacagcagtcttcaaacgggccagtgaaaaaatcgatgcgggagaaagccgtggaacgaaggtcagtcaataaggaacacaattcgaacttcaaggcaggatacattcccattgacgaagaccgactccacaagactgggctgagaggtcggaagggcaacctcgcaatctgcgtgatcatactactgttcatcctggctgtcatcaatctgatcatcactctggttatttgggccgtgatccggattggccccaacggatgcgattctatggaatttcatgagagtgggctcctgcgattcaagcaggtctcagatatgggagtgatccatccgctgtacaaatcaactgtcggcggtcgaagaaatgagaatctggtcatcactggaaataatcagcccatcgtgttccagcaagggaccacaaaacttagcgtcgaaaataacaagaccagcatcacttcagacatagggatgcagttcttcgatccaagaacccagaatatcctgtttagcacagactacgagacgcacgagtttcacttaccgtctggggtcaaaagcctgaacgtacagaaggcttctactgagagaataactagtaatgccacatcggatcttaatatcaaagtagatgggcgagccatcgtgcgaggcaacgaaggcgtctttatcatgggcaaaacaattgaatttcatatgggaggcaatatggaactgaaagctgaaaattccattatcctgaacggaagcgtgatggtatcaacaacgaggctcccttccagttctagcggcgatcagctgggcagtggcgattgggtgagatataagctctgcatgtgcgcagatggcacgcttttcaaagtgcaagtgacatctcagaatatgggatgtcagatttcagacaatccctgtgggaacacccattag

SEQ ID NO: 4783 - DNA, 957 bp, Artificial Sequence
  derived and/or modified sequence
atggctgctgctgctgctgctgctgctgagcagcagagcagcaatggacctgtgaagaagtccatgagggagaaggctgtggagaggagatctgtgaacaaggagcacaacagcaacttcaaggccggctacatccccattgatgaagatcggctgcacaagacaggcctgcggggcaggaaaggaaacctggccatctgtgtgatcatcctgctcttcatcctggccgtcatcaacctgatcatcaccctggtgatctgggccgtcatccgcatcggccccaacggctgtgacagcatggagttccatgaaagtggcctgctgcgcttcaagcaggtgtctgacatgggcgtcatccaccccctgtacaagagcacagtgggcggcagaagaaatgaaaacctggtgatcaccggcaacaaccagcccatcgtgttccagcagggcaccaccaagctgtctgtggagaacaacaagaccagcatcaccagtgacatcggcatgcagttctttgaccccaggacccagaacatcctcttcagcacagattatgagacccatgagttccacctgcccagcggcgtgaagagcctgaatgtgcagaaggccagcacagagcgcatcaccagcaatgccaccagtgacctgaacatcaaggtggatggccgggccatcgtgagaggaaatgaaggagtcttcatcatgggcaagaccatcgagttccacatgggcggcaacatggagctgaaggccgagaacagcatcatcctgaatggatctgtgatggtgtccaccacccggctgcccagcagcagcagcggggaccagctgggcagcggggactgggtgcgctacaagctgtgcatgtgtgctgatggcaccctcttcaaggtgcaggtgaccagccagaacatgggctgccagatcagtgacaacccctgtggcaacacccactag

SEQ ID NO: 4784 - DNA, 957 bp, Artificial Sequence
  derived and/or modified sequence
atggccgccgccgccgccgccgccgccgagcagcagagcagcaacggtccggtgaagaagtctatgagggagaaggccgtggagagaagatctgtcaataaagaacacaattctaactttaaggccggttatatccccatcgatgaagatcgactccacaaaacaggcctgcgaggaagaaaagggaacttagctatttgcgtgatcatcttactgttcatactagctgtaatcaacctcattatcaccttagtcatttgggcagtgattcgcatcggccctaatggctgcgactcaatggaattccacgagtccggtttgttgcgattcaaacaggtttccgacatgggagtgatccatccattgtacaagtctaccgtagggggtcgtaggaacgagaacctagtgattaccggtaataaccagcccattgtgtttcagcaggggacgacaaagctgtcagtagagaataataagacctccattaccagcgacattggaatgcaattctttgacccccgcacccagaacatcctcttttctactgactacgaaacccacgaattccatctgccctccggcgtcaaaagcttgaacgtacaaaaggcctctacagagagaatcacatccaacgcaacttccgacctgaacattaaggtggacggtagggccattgtgcggggaaacgaaggcgtgtttatcatggggaaaacgatcgagttccacatggggggcaacatggaacttaaagcagaaaatagtattatattgaatgggagcgttatggtcagcactacgaggcttccatctagtagctccggtgatcaactgggctccggggactgggttcgttataagttgtgtatgtgcgcggatggaactctgtttaaagttcaggtgacgagccagaacatgggctgccaaatatccgacaacccctgcgggaacactcactag

SEQ ID NO: 4785 - DNA, 957 bp, Artificial Sequence
  derived and/or modified sequence
atggccgctgccgcagccgctgcagccgagcagcaatctagcaacggtcctgtgaaaaaaagcatgagggagaaggcggtcgaaaggcgctccgttaataaggagcacaactcaaacttcaaagcgggatatattccgattgatgaagataggctacataaaacaggtctgcggggacgtaaaggcaatctggctatttgcgtgattattctgctctttattctggcggttataaacctgatcataaccctggtgatatgggccgttattaggattgggcctaacggctgtgacagcatggagtttcacgagtccggcttgcttcgcttcaagcaggtgagtgatatgggtgtcatccaccctttgtataaaagtacagtagggggtaggaggaatgagaatttggtcataaccggaaataatcagcccatcgtgttccagcagggaacaaccaagctgagcgtcgagaataacaagacctccatcacctccgacatcggcatgcagtttttcgatcctcgcacccagaatattttgttttcaaccgactacgaaacacacgagtttcacctgccttccggcgttaagtcactgaacgtgcaaaaggcttcaactgagcggatcacatccaacgcaaccagcgatttaaatattaaggtggacggaagagcaattgtgcgtggaaatgagggcgtctttatcatgggcaaaactattgaatttcacatgggaggcaacatggaactcaaggccgagaattctatcatcttaaatgggagcgtgatggtatcgacgacacgcctgccatcaagctctagtggtgaccaactcgggagcggggattgggtgaggtacaagctgtgcatgtgcgccgacgggacactgtttaaggttcaggtaacctcgcaaaatatgggctgccagatcagcgacaatccgtgtggcaacacgcactag

SEQ ID NO: 4786 - DNA, 4431 bp, Artificial Sequence
  derived and/or modified sequence
atacaacgcgccccaggccaaggtcctaggtgcaggggccgccgcagagcctgagcccgcagggctgggatgcgggtcgtcagggatgcgggctggggaggggagggtgtgagcagcgggtgcccccagtccccgccagggcgcaagcgcaggcgcgcagggtgcggtcgcggaggggcgggcacagtcgggcggggagctcggcggcggcgggcgcgggaagatggcggcagcggcggcggcggctgcagaacagcaaagttccaatggtcctgtaaagaagtccatgcgtgagaaggctgttgagagaaggagtgtcaataaagagcacaacagtaactttaaagctggatacattccgattgatgaagatcgtctccacaaaacagggttgagaggaagaaagggcaatttagccatctgtgtgattatcctcttgtttatcctggctgtcatcaatttaataataacacttgttatttgggccgtgattcgcattggaccaaatggctgtgatagtatggagtttcatgaaagtggcctgcttcgatttaagcaagtatctgacatgggagtgatccaccctctttataaaagcacagtaggaggaaggcgaaatgaaaatttggtcatcactggcaacaaccagcctattgtttttcagcaagggacaacaaagctcagtgtagaaaacaacaaaacttctattacaagtgacatcggcatgcagttttttgacccgaggactcaaaatatcttattcagcacagactatgaaactcatgagtttcatttgccaagtggagtgaaaagtttgaatgttcaaaaggcatctactgaaaggattaccagcaatgctaccagtgatttaaatataaaagttgatgggcgtgctattgtgcgtggaaatgaaggtgtattcattatgggcaaaaccattgaatttcacatgggtggtaatatggagttaaaggcggaaaacagtatcatcctaaatggatctgtgatggtcagcaccacccgcctacccagttcctccagtggagaccagttgggtagtggtgactgggtacgctacaagctctgcatgtgtgctgatgggacgctcttcaaggtgcaagtaaccagccagaacatgggctgccaaatctcagacaacccctgtggaaacactcattaaaagaaccccagaggtcaccaacatgtttatatcttgacttgacttttttatgcatgcaaatcattgtttttacagagtttgtgataactcataattattttaatggcagagcactgctgtatctgttttatggtctacatagttaaaatcttctcagagagcctaaattctaatacattttattaatttatactaatcttcatatttactgttctctaaaataattatgagaagcaaataaaatcaaaagtcatgtttaaagacgtgtttttaaaattccactatcccttttctaaaggttaaaggtctgaagcagctgtttagattcactgtaagtaaactttggtaactctaatggggatagacccacttaagatatttaaaaaggtatggcatcagcgtttcatgctctgccttttagcttctaaaaggaaagatgcagatttctagtgcattaagcctgagccatattctcacatgcaagtgaagtcattaaagaactttacatatgtgagatagaaacaatggttccttagttttgcactgggaagaaaatattttgtaaaagaatgtttatttgaaataatgataactatcaattgttcacaatgtggtggaaattaaaacaccatctcagctttaacttttaaataataatgataactatctttattgagcatcttctacatcctaggcattgtcctaggcattgcatgtttatatccccaattctcaccacaaccctgcaagtaggtggtattatccaagttttacccattaagaaactgaagatcagagaagttaagaaacttgctcaacatcatatagtaagtagcagagttgggattggaattcaggcatgactcaaacctggatgtacttgattccaaatgccatgttgttttcactctctgcactgactttttaattatttaaaactctagaaagatgaacaaaggttaatttaaacttacctaagaagatgagaatcaaacaaaacagatatgcttactctagttaaaaagaaaataaatctcatgtcagacccagaaaggaccaatcactgtccgattgtaagctatgttgggccaattccaaaatattatacgatggagaggtcaaatttacctacttctgagttacctcagtttcccaacaatggaccttggcacactggagtaacaatacataacagagttgccaagatatttataccctcagcactcggggcaacacagtggaaagtggggaggccatagacccaaacaagttctttgggccaggcatggcctagtaagtacaccatgcctcgaaaataagtccagaagcactggactaaagagtgctaatgcaggaaataatacacataatttttaggtaaggataataatttatctctgctcctaatattactatcccattgtaattatttataaccctcaagccagttgatttttaatatatttgattggaaaagaactctctggtattattaagactcacacagaatcagggacagggcccccaaaggagtttgctgtaaaataggcagtagagttgtggcatgggcccaaccctgcattcaagtgtaacagcattctgtcagggtcactttgaattgtgcacataagaaaaccaatacaaaaaacaatttgtattcaatattgtcacatttctctctggtagaaaaatcaaataccttagagattatgaagtcattaatttatactgaaattggattgacttactacctaacactgagcgctgtttttaaatgaaaagaatgagatttataaccacttgagtgttattgcagtgatatttgaactcatttgaatatattcagtatcatttaatgtctgaattcagaaaaaaatgccgaaatttttattcagatggtccataaattaaattgcatattcattacttatctgctctatttagatttattttaaaagtttatttaagtaaatatttttataaaaaccagaaaacactgtattacaaaatattatttattaaatgtagttcaggaaataatctatttttactcttttttgggaaatacttgtgtttttgatacatctccatgaagttcttttgagaggagaggctattttgatgtttttatacaactgaaggttaacagccatagcattttatgatactttacaggtagtcctggctttttccctgaaacataagcttggaaaatctattagaaagcagaacagggcaaactctccattttacttatggcttttctaatttttaattaattaatttatttttttgagacagagtcttgttctgtcgccaggctggagtgcagtggcacaatctcggctctcggctcactgcaacctctgcctcccaggttcaagcgattctcctgcctcagcctcccgagtacctgggactacaggcatgtgccacagttcccggctaatttttgtatttttagtagagacggggtttcaccatgttggccaggatggtctcaatctcttgacctcgtgatctgcctgccttggcctcccaaagtgctgggattacaggtgtgagccaccacgcctggccggcttatttttatccacagtaaatcttcagcaactcattgtctccaccagatagtatttttctgtaaatgaaatgctgacttcgcctcttcctgctgtatgctcatccctgcactgagcacagatatgacaagcagtagccatgggggaggtgggtgacaaagataggaccccgggagggggcgcaggtacatgctagtttcaattaccacagtattctagagacgggttgcaatgacaaggggggcaaatgaaatcaatgcaagatttcttaataatgggcagacagaaaaatgtaaaaccacacaaaacggactgctgataatattttaaaatatacttatttgtcttctttttgcattgtgaaaaaaacaaaataaattttgtgtgataattttgatgatgaaaggtggaagttctacctagatttgaatgagtgtttttttaagggaatgagaatgtcatggtgctaaacctgacaaataagagatcattgaaatgctgaaaattttaacagtcttcttaaaagtattgagggggcaaaaattaccaattatggtatacaaaaataagcctataaatgtgtttcacattgctaacttgagtttcagttgattcagtttgtaataactagtaatgagcttctgtttacaataaaaattctgtaaattg

SEQ ID NO: 4787 - DNA, 954 bp, Artificial Sequence
  derived and/or modified sequence
atggccgccgccgccgccgccgccgccgagcagcagagcagcaacggccccgtgaagaagagcatgcgcgagaaggccgtggagcgccgcagcgtgaacaaggagcacaacagcaacttcaaggccggctacatccccatcgacgaggaccgcctgcacaagaccggcctgcgcggccgcaagggcaacctggccatctgcgtgatcatcctgctgttcatcctggccgtgatcaacctgatcatcaccctggtgatctgggccgtgatccgcatcggccccaacggctgcgacagcatggagttccacgagagcggcctgctgcgcttcaagcaggtgagcgacatgggcgtgatccaccccctgtacaagagcaccgtgggcggccgccgcaacgagaacctggtgatcaccggcaacaaccagcccatcgtgttccagcagggcaccaccaagctgagcgtggagaacaacaagaccagcatcaccagcgacatcggcatgcagttcttcgacccccgcacccagaacatcctgttcagcaccgactacgagacccacgagttccacctgcccagcggcgtgaagagcctgaacgtgcagaaggccagcaccgagcgcatcaccagcaacgccaccagcgacctgaacatcaaggtggacggccgcgccatcgtgcgcggcaacgagggcgtgttcatcatgggcaagaccatcgagttccacatgggcggcaacatggagctgaaggccgagaacagcatcatcctgaacggcagcgtgatggtgagcaccacccgcctgcccagcagcagcagcggcgaccagctgggcagcggcgactgggtgcgctacaagctgtgcatgtgcgccgacggcaccctgttcaaggtgcaggtgaccagccagaacatgggctgccagatcagcgacaacccctgcggcaacacccac

SEQ ID NO: 4788 - DNA, 957 bp, Artificial Sequence
  derived and/or modified sequence
atggccgccgccgccgccgccgccgccgagcagcagagcagcaacggccccgtgaagaagagcatgagagagaaggccgtggagagaagaagcgtgaacaaggagcacaacagcaacttcaaggccggctacatccccatcgacgaggacagactgcacaagaccggcctgagaggcagaaagggcaacctggccatctgcgtgatcatcctgctgttcatcctggccgtgatcaacctgatcatcaccctggtgatctgggccgtgatcagaatcggccccaacggctgcgacagcatggagttccacgagagcggcctgctgagattcaagcaggtgagcgacatgggcgtgatccaccccctgtacaagagcaccgtgggcggcagaagaaacgagaacctggtgatcaccggcaacaaccagcccatcgtgttccagcagggcaccaccaagctgagcgtggagaacaacaagaccagcatcaccagcgacatcggcatgcagttcttcgaccccagaacccagaacatcctgttcagcaccgactacgagacccacgagttccacctgcccagcggcgtgaagagcctgaacgtgcagaaggccagcaccgagagaatcaccagcaacgccaccagcgacctgaacatcaaggtggacggcagagccatcgtgagaggcaacgagggcgtgttcatcatgggcaagaccatcgagttccacatgggcggcaacatggagctgaaggccgagaacagcatcatcctgaacggcagcgtgatggtgagcaccaccagactgcccagcagcagcagcggcgaccagctgggcagcggcgactgggtgagatacaagctgtgcatgtgcgccgacggcaccctgttcaaggtgcaggtgaccagccagaacatgggctgccagatcagcgacaacccctgcggcaacacccactag

SEQ ID NO: 4789 - protein, 699 aa, Artificial Sequence
  derived and/or modified sequence
MKQRFSALQLLKLLLLLQPPLPRALREALCPEPCNCVPDGALRCPGPTAGLTRLSLAYLPVKVIPSQAFRGLNEVIKIEISQIDSLERIEANAFDNLLNLSEILIQNTKNLRYIEPGAFINLPRLKYLSICNTGIRKFPDVTKVFSSESNFILEICDNLHITTIPGNAFQGMNNESVTLKLYGNGFEEVQSHAFNGTTLTSLELKENVHLEKMHNGAFRGATGPKTLDISSTKLQALPSYGLESIQRLIATSSYSLKKLPSRETFVNLLEATLTYPSHCCAFRNLPTKEQNFSHSISENFSKQCESTVRKVNNKTLYSSMLAESELSGWDYEYGFCLPKTPRCAPEPDAFNPCEDIMGYDFLRVLIWLINILAIMGNMTVLFVLLTSRYKLTVPRFLMCNLSFADFCMGLYLLLIASVDSQTKGQYYNHAIDWQTGSGCSTAGFFTVFASELSVYTLTVITLERWHTITYAIHLDQKLRLRHAILIMLGGWLFSSLIAMLPLVGVSNYMKVSICFPMDVETTLSQVYILTILILNVVAFFIICACYIKIYFAVRNPELMATNKDTKIAKKMAILIFTDFTCMAPISFFAISAAFKVPLITVTNSKVLLVLFYPINSCANPFLYAIFTKTFQRDFFLLLSKFGCCKRRAELYRRKDFSAYTSNCKNGFTGSNKPSQSTLKLSTLHCQGTALLDKTRYTEC

SEQ ID NO: 4790 - protein, 325 aa, Artificial Sequence
  derived and/or modified sequence
MKQRFSALQLLKLLLLLQPPLPRALREALCPEPCNCVPDGALRCPGPTAGLTRLSLAYLPVKVIPSQAFRGLNEVIKIEISQIDSLERIEANAFDNLLNLSEILIQNTKNLRYIEPGAFINLPRLKYLSICNTGIRKFPDVTKVFSSESNFILEICDNLHITTIPGNAFQGMNNESVTLKLYGNGFEEVQSHAFNGTTLTSLELKENVHLEKMHNGAFRGATGPKTLDISSTKLQALPSYGLESIQRLIATSSYSLKKLPSRETFVNLLEATLTYPSHCCAFRNLPTKEQNFSHSISENFSKQCESTVRKVNNKTLSKPRINGYQ

SEQ ID NO: 4791 - protein, 329 aa, Artificial Sequence
  derived and/or modified sequence
MKQRFSALQLLKLLLLLQPPLPRALREALCPEPCNCVPDGALRCPGPTAGLTRLSLAYLPVKVIPSQAFRGLNEVIKIEISQIDSLERIEANAFDNLLNLSEILIQNTKNLRYIEPGAFINLPRLKYLSICNTGIRKFPDVTKVFSSESNFILEICDNLHITTIPGNAFQGMNNESVTLKLYGNGFEEVQSHAFNGTTLTSLELKENVHLEKMHNGAFRGATGPKTLDISSTKLQALPSYGLESIQRLIATSSYSLKKLPSRETFVNLLEATLTYPSHCCAFRNLPTKEQNFSHSISENFSKQCESTVRKVNNKTLLLHGALSAAHSLS

SEQ ID NO: 4792 - protein, 672 aa, Artificial Sequence
  derived and/or modified sequence
MKQRFSALQLLKLLLLLQPPLPRALREALCPEPCNCVPDGALRCPGPTAGLTRLSLAYLPVKVIPSQAFRGLNEVIKIEISQIDSLERIEANAFDNLLNLSEILIQNTKNLRYIEPGAFINLPRLKYLSICNTGIRKFPDVTKVFSSESNFILEICDNLHITTIPGNAFQGMNNESVTLKLYGNGFEEVQSHAFNGTTLTSLELKENVHLEKMHNGAFRGATGPKTLDISSTKLQALPSYGLESIQRLIATSSYSLKKLPSRETFVNLLEATLTYPSHCCAFRNLPTKDYSSMLAESELSGWDYEYGFCLPKTPRCAPEPDAFNPCEDIMGYDFLRVLIWLINILAIMGNMTVLFVLLTSRYKLTVPRFLMCNLSFADFCMGLYLLLIASVDSQTKGQYYNHAIDWQTGSGCSTAGFFTVFASELSVYTLTVITLERWHTITYAIHLDQKLRLRHAILIMLGGWLFSSLIAMLPLVGVSNYMKVSICFPMDVETTLSQVYILTILILNVVAFFIICACYIKIYFAVRNPELMATNKDTKIAKKMAILIFTDFTCMAPISFFAISAAFKVPLITVTNSKVLLVLFYPINSCANPFLYAIFTKTFQRDFFLLLSKFGCCKRRAELYRRKDFSAYTSNCKNGFTGSNKPSQSTLKLSTLHCQGTALLDKTRYTEC

SEQ ID NO: 4793 - DNA, 2100 bp, Artificial Sequence
  derived and/or modified sequence
atgaaacagcgcttcagtgcgttacagcttctgaagttactgttgctcttgcagccgccattacctagggcactacgggaggccctatgccctgaaccttgtaactgtgttcccgatggtgccctgcgatgcccgggcccgacagctggtctcaccaggctgagtctagcctacctgccggtgaaggtgatcccaagtcaggcctttcgcggcctgaatgaggtgattaagatcgagattagccagatagacagcctcgaacgcatagaagcgaatgcttttgataacctcctgaatctgagcgaaatattgattcagaacactaagaatctccgatacatcgagcccggggccttcatcaatttaccgcgtcttaagtacttgtcaatctgtaacaccgggattcgaaagttccctgacgtgacgaaggttttcagttccgaatcgaacttcattctcgaaatttgtgataacctgcacatcacaaccataccaggaaatgcctttcaaggcatgaacaacgaaagtgtcactttgaagctgtacggcaacgggttcgaggaggtccagagccacgcctttaatggcacgacgctgacctcactggagctcaaggaaaacgtacacctggagaagatgcataatggcgcattcagaggtgccacgggtcctaaaacgctggatatttctagcactaaattgcaggctcttccttcttatgggctggagtcaattcagagactgattgccactagttcttatagtctgaagaagctaccatctcgagaaacattcgtgaaccttctggaggcaactctgacgtacccatctcattgttgcgccttcagaaatttaccaacaaaggaacaaaacttctcccacagcatttctgagaatttctctaaacaatgtgagtcaactgttcggaaggtgaataacaaaacactgtactcttcaatgctagctgaatctgaactgtccggctgggattacgagtacggcttttgcctgcccaagacacctcggtgtgcccccgagccagatgcgtttaatccgtgcgaggatataatggggtatgacttcctccgagttctcatttggttaataaacattcttgcgatcatgggcaacatgactgttttattcgttctgctgacctcccggtataagctcaccgtccctagatttctcatgtgcaacctctcattcgccgacttctgcatggggctttacctgcttctgatagcatcagtggattcacagacaaaaggtcagtactacaatcatgcaatcgattggcagacaggcagtggctgctcaactgccggattctttacagtctttgctagtgagttgagcgtctatactttgaccgtgataaccctcgagcgctggcataccattacctatgccattcacttggaccagaaactcagattaaggcatgctatactgattatgttgggaggctggctgttttcttcactgattgctatgctcccacttgtgggcgtgtctaattatatgaaagtgtctatttgtttcccaatggatgtcgagaccacactgagccaggtttacattctgaccattcttatcctgaacgtggtagcatttttcatcatttgcgcttgctacatcaagatatatttcgctgtgcggaatccggagctcatggcgaccaacaaggacaccaagatagccaagaaaatggcgatcctcatcttcactgactttacgtgtatggcacctatcagttttttcgccattagtgccgcatttaaggtgcctctgatcaccgtgaccaacagcaaggtgttgctggtcctattttatccaattaacagctgtgcaaacccctttttgtatgctatattcactaagactttccagcgggacttcttcctcctgttatctaaattcggatgttgcaaacgacgggccgaactgtatcgccggaaagatttctccgcctatactagtaattgtaaaaatggctttacaggcagtaataagccttcccagagcactctgaagctcagcacccttcactgccagggcaccgctctgctggataaaacacggtacactgaatgttag

SEQ ID NO: 4794 - DNA, 978 bp, Artificial Sequence
  derived and/or modified sequence
atgaaacagaggttttctgcactccagctgctgaagctgctacttttgctgcagccccccttgccccgggccttgagggaagcactttgccccgaaccctgtaactgcgtgccggacggagcactccgctgccctggaccgaccgccggcctgactcgcttatcattggcgtatttaccagtcaaggtgattcccagtcaggctttccgtgggctgaacgaagtgattaagattgaaattagccagattgattctttagagcggattgaagctaacgcattcgataacctgctaaatttgtccgaaatacttatccagaatacaaagaacttgagatacatagagccaggagcttttataaatctgcccagattaaagtacctctccatatgcaacaccgggatcagaaagtttcccgatgttaccaaggtctttagctccgagtccaatttcatcttagagatttgcgacaatctccatattacaactattcccggcaatgcattccaggggatgaacaatgaatcagtgacattaaagctgtacgggaacggatttgaggaagttcagagtcatgcattcaatggtacaacactcaccagcctcgagctcaaggagaacgttcacctggagaagatgcataacggggcgttccgcggagccacaggtccaaagacgctggatatttcaagcacaaaattgcaagccctgccgagttacgggctcgaatcgatacaaagactgatcgccaccagcagttactcccttaaaaaactcccgtcgcgcgagactttcgtgaatcttctcgaagccaccttgacttacccgtctcactgttgtgcatttaggaacttgcctaccaaggagcagaacttttctcatagcatctctgaaaacttttcaaagcagtgcgaatcaacagtccggaaagtcaacaataagacactgtccaagccgagaatcaatgggtaccagtag

SEQ ID NO: 4795 - DNA, 990 bp, Artificial Sequence
  derived and/or modified sequence
atgaaacagcgatttagcgctttacagttactgaagctgctgttgctgctccagcccccactgccaagggccctacgggaggctctgtgtcctgagccctgtaactgtgtaccagacggcgccctaagatgtcctgggccaacggcaggcttgactagacttagcttggcatatctgcccgtgaaagtaatccctagtcaagccttcagaggcctgaatgaggtgattaagattgagattagccagattgactcccttgagagaatcgaagccaacgcttttgacaacctgctgaatctaagtgaaatcctcatacaaaataccaagaacttgcggtacattgagccgggagcatttatcaacctgccacgattaaagtacctctcgatttgcaacactggaatccgcaaatttcccgatgtgaccaaagtattttcctctgagagtaatttcatcctcgagatttgcgacaatctccacatcaccactatccccgggaatgcgttccagggcatgaacaacgagagcgtgacactgaagctgtatggcaacggattcgaagaagtgcagtctcacgcattcaatggaactacgctgacatcactcgagctgaaggaaaacgtgcacctggagaaaatgcataatggtgcttttagaggggccacagggccaaaaactctcgacatctctagcacaaagcttcaggcgctcccttcctacggtctggaaagtattcagagacttattgcaacctcgtcatactccttgaaaaaacttccatcacgcgaaacgtttgtgaatcttcttgaagctacgcttacctatcctagccactgctgcgccttccgtaacctgccaacaaaagaacagaattttagtcactcaatcagcgaaaacttctctaagcaatgtgaatctaccgtgaggaaagtgaataacaagacgcttctgctgcatggagcactgagcgcagcgcatagcctttcctag

SEQ ID NO: 4796 - DNA, 2019 bp, Artificial Sequence
  derived and/or modified sequence
atgaagcaaaggttcagtgctttacagcttctgaagctgctcctactgctccagcctccgctacctagggcattgagggaagctctctgcccagaaccatgcaactgcgtgccggatggcgctctgagatgccccgggcccactgccggcctcactaggctctctctggcctacctccccgtgaaggttatacccagtcaggcttttcgtggacttaatgaggtgattaagattgagatttcccagattgatagccttgaaagaatcgaagccaacgccttcgataacctccttaacctgagtgagattctgatccaaaatacaaaaaatctccgatatatcgagcctggcgctttcattaatctacccagactcaagtaccttagcatctgtaacaccggaatccggaagtttccagatgtcaccaaggtattctcatctgaaagcaattttatccttgaaatttgcgacaatcttcatattacaacaatcccaggcaacgcatttcagggcatgaataatgagagcgtcactctcaagttgtacggaaacggatttgaagaagtgcagtcacatgcctttaacggcacgacgctaacttcccttgaactgaaggaaaacgtgcatctggaaaagatgcacaatggcgcctttaggggggccactggccctaagacattagatatttcttctacaaagctgcaggctttacccagctacgggttggagtcgatccaacgactgattgcaacctcatcgtactctcttaagaaactaccatcaagggagacctttgtcaatcttctcgaagccacactgacatatcccagccattgctgtgccttccgcaacctcccaacgaaagattatagctccatgttggccgagagcgagctgtcaggctgggactacgaatatggcttttgcctaccgaagacccctaggtgcgcccccgaacctgatgcatttaacccatgcgaggatatcatgggttacgacttcttaagagtcttgatctggcttattaacattctcgctattatgggaaacatgaccgtcctgttcgtcttgctcactagccgatataaactaaccgttccccggttcctgatgtgcaacttatcgttcgctgatttctgtatgggattgtatctcctgctgatcgcatctgttgatagccagactaaggggcagtattacaatcatgccattgattggcagactggctctggctgctcgacggctggtttctttaccgtgttcgcatccgagctgtctgtttacaccttgactgtaatcacactcgagaggtggcacaccatcacctatgccattcatctcgaccaaaagctccgtctgaggcatgctatcctgatcatgctcggcgggtggcttttctcttcactgatcgcaatgctccccttggtcggggtctcaaactatatgaaagtgagtatttgcttcccaatggacgtggaaactacacttagtcaggtgtatatcctaaccatccttatcctgaatgttgtcgccttcttcattatctgtgcttgctacatcaagatttattttgccgtgcggaaccctgaactcatggcaactaataaagacactaagatcgccaaaaaaatggcaatcctcatattcaccgactttacatgtatggcccctattagtttctttgccattagtgcggctttcaaggtgcccttaattacagtgaccaattcaaaggtgttgttggtgctgttttatccgatcaatagttgtgctaaccccttcctctatgccatcttcactaagacattccagcgcgacttttttctcctactctccaagttcggctgttgcaaaaggagagccgagctgtatagaagaaaagattttagcgcatatacgagcaactgcaagaacgggttcacaggcagcaataaacctagccagagcacactcaaactgtccacactgcactgccagggaactgcgcttctggataagacgcggtacaccgagtgctag

SEQ ID NO: 4797 - DNA, 2100 bp, Artificial Sequence
  derived and/or modified sequence
atgaagcagcgcttcagcgccctgcagctgctgaagctgctgctgctgctgcagccccccctgccccgggccctgcgggaggccctgtgcccagagccctgcaactgtgtgcctgatggagccctgcgctgccccggccccacagctggcctgacccggctgagcctggcctacctgcctgtgaaggtgatccccagccaggccttccggggcctgaatgaagtcatcaagattgagatcagccagattgacagcctggagagaattgaggccaatgcctttgacaacctgctgaacctgtctgagatcctgatccagaacaccaagaacctgcgctacatcgagcccggggccttcatcaacctgccccggctgaagtacctgagcatctgcaacacaggcatcaggaagttcccagatgtgaccaaggtgttcagcagcgagagcaacttcatcctggagatctgtgacaacctgcacatcaccaccatccctggaaatgccttccagggcatgaacaatgaatctgtgaccctgaagctgtatggaaatggatttgaggaggtgcagagccacgccttcaacggcaccaccctgaccagcctggagctgaaggaaaatgtgcacctggagaagatgcacaatggagccttccggggggccaccggccccaagaccctggacatcagcagcaccaagctgcaggccctgcccagctatggcctggagagcatccagaggctgattgccaccagcagctacagcctgaagaagctgcccagccgggagacctttgtgaacctgctggaggccaccctgacctaccccagccactgctgtgccttcaggaacctgcccaccaaggagcagaacttcagccacagcatcagcgagaacttcagcaagcagtgtgagagcacagtgaggaaggtgaacaacaagaccctgtacagctccatgctggccgagagcgagctgagcggctgggactatgaatatggcttctgcctgcccaagaccccccgctgtgcccctgagccagatgccttcaacccctgtgaggacatcatgggctatgacttcctgcgggtgctgatctggctgatcaacatcctggccatcatgggcaacatgacagtgctgtttgtgctgctgaccagccgctacaagctgactgtgccccgcttcctgatgtgcaacctgagctttgctgacttctgcatgggcctgtacctgctgctgattgcctctgtggacagccagaccaagggccagtactacaaccacgccatcgactggcagacaggcagcggctgcagcacagctggcttcttcaccgtgtttgccagcgagctgtctgtgtacaccctgaccgtcatcaccctggagcgctggcacaccatcacctacgccatccacctggaccagaagctgcggctgcggcatgccatcctgatcatgctgggcggctggctgttcagcagcctgattgccatgctgcccctggtgggcgtgagcaactacatgaaggtgtccatctgcttccccatggatgtggagaccaccctgagccaggtgtacatcctgaccatcctgatcctgaatgtggtggccttcttcatcatctgtgcctgctacatcaagatctactttgctgtgaggaaccctgagctgatggccaccaacaaggacaccaagatcgccaagaagatggccatcctgatcttcacagacttcacctgcatggcccccatctccttctttgccatctctgctgccttcaaggtgcccctcatcaccgtgaccaacagcaaggtgctgctggtgctcttctaccccatcaacagctgtgccaaccccttcctgtatgccatcttcaccaagaccttccagagggacttcttcctgctgctgagcaagtttggctgctgcaagagaagagctgagctgtacagaaggaaggacttcagcgcctacaccagcaactgcaagaatggcttcaccggcagcaacaagcccagccagagcaccctgaagctgagcaccctgcactgccagggcacagccctgctggacaagacccgctacacagagtgctag

SEQ ID NO: 4798 - DNA, 978 bp, Artificial Sequence
  derived and/or modified sequence
atgaagcagcgcttcagcgccctgcagctgctgaagctgctgctgctgctgcagccccccctgccccgggccctgcgggaggccctgtgcccagagccctgcaactgtgtgcctgatggagccctgcgctgccccggccccacagctggcctgacccggctgagcctggcctacctgcctgtgaaggtgatccccagccaggccttccggggcctgaatgaagtcatcaagattgagatcagccagattgacagcctggagagaattgaggccaatgcctttgacaacctgctgaacctgtctgagatcctgatccagaacaccaagaacctgcgctacatcgagcccggggccttcatcaacctgccccggctgaagtacctgagcatctgcaacacaggcatcaggaagttcccagatgtgaccaaggtgttcagcagcgagagcaacttcatcctggagatctgtgacaacctgcacatcaccaccatccctggaaatgccttccagggcatgaacaatgaatctgtgaccctgaagctgtatggaaatggatttgaggaggtgcagagccacgccttcaacggcaccaccctgaccagcctggagctgaaggaaaatgtgcacctggagaagatgcacaatggagccttccggggggccaccggccccaagaccctggacatcagcagcaccaagctgcaggccctgcccagctatggcctggagagcatccagaggctgattgccaccagcagctacagcctgaagaagctgcccagccgggagacctttgtgaacctgctggaggccaccctgacctaccccagccactgctgtgccttcaggaacctgcccaccaaggagcagaacttcagccacagcatcagcgagaacttcagcaagcagtgtgagagcacagtgaggaaggtgaacaacaagaccctgagcaagccccgcatcaatggctaccagtag

SEQ ID NO: 4799 - DNA, 990 bp, Artificial Sequence
  derived and/or modified sequence
atgaagcagcgcttcagcgccctgcagctgctgaagctgctgctgctgctgcagccccccctgccccgggccctgcgggaggccctgtgcccagagccctgcaactgtgtgcctgatggagccctgcgctgccccggccccacagctggcctgacccggctgagcctggcctacctgcctgtgaaggtgatccccagccaggccttccggggcctgaatgaagtcatcaagattgagatcagccagattgacagcctggagagaattgaggccaatgcctttgacaacctgctgaacctgtctgagatcctgatccagaacaccaagaacctgcgctacatcgagcccggggccttcatcaacctgccccggctgaagtacctgagcatctgcaacacaggcatcaggaagttcccagatgtgaccaaggtgttcagcagcgagagcaacttcatcctggagatctgtgacaacctgcacatcaccaccatccctggaaatgccttccagggcatgaacaatgaatctgtgaccctgaagctgtatggaaatggatttgaggaggtgcagagccacgccttcaacggcaccaccctgaccagcctggagctgaaggaaaatgtgcacctggagaagatgcacaatggagccttccggggggccaccggccccaagaccctggacatcagcagcaccaagctgcaggccctgcccagctatggcctggagagcatccagaggctgattgccaccagcagctacagcctgaagaagctgcccagccgggagacctttgtgaacctgctggaggccaccctgacctaccccagccactgctgtgccttcaggaacctgcccaccaaggagcagaacttcagccacagcatcagcgagaacttcagcaagcagtgtgagagcacagtgaggaaggtgaacaacaagaccctgctgctgcatggagccctgtctgctgcccacagcctgtcctag

SEQ ID NO: 4800 - DNA, 2019 bp, Artificial Sequence
  derived and/or modified sequence
atgaagcagcgcttcagcgccctgcagctgctgaagctgctgctgctgctgcagccccccctgccccgggccctgcgggaggccctgtgcccagagccctgcaactgtgtgcctgatggagccctgcgctgccccggccccacagctggcctgacccggctgagcctggcctacctgcctgtgaaggtgatccccagccaggccttccggggcctgaatgaagtcatcaagattgagatcagccagattgacagcctggagagaattgaggccaatgcctttgacaacctgctgaacctgtctgagatcctgatccagaacaccaagaacctgcgctacatcgagcccggggccttcatcaacctgccccggctgaagtacctgagcatctgcaacacaggcatcaggaagttcccagatgtgaccaaggtgttcagcagcgagagcaacttcatcctggagatctgtgacaacctgcacatcaccaccatccctggaaatgccttccagggcatgaacaatgaatctgtgaccctgaagctgtatggaaatggatttgaggaggtgcagagccacgccttcaacggcaccaccctgaccagcctggagctgaaggaaaatgtgcacctggagaagatgcacaatggagccttccggggggccaccggccccaagaccctggacatcagcagcaccaagctgcaggccctgcccagctatggcctggagagcatccagaggctgattgccaccagcagctacagcctgaagaagctgcccagccgggagacctttgtgaacctgctggaggccaccctgacctaccccagccactgctgtgccttcaggaacctgcccaccaaggactacagctccatgctggccgagagcgagctgagcggctgggactatgaatatggcttctgcctgcccaagaccccccgctgtgcccctgagccagatgccttcaacccctgtgaggacatcatgggctatgacttcctgcgggtgctgatctggctgatcaacatcctggccatcatgggcaacatgacagtgctgtttgtgctgctgaccagccgctacaagctgactgtgccccgcttcctgatgtgcaacctgagctttgctgacttctgcatgggcctgtacctgctgctgattgcctctgtggacagccagaccaagggccagtactacaaccacgccatcgactggcagacaggcagcggctgcagcacagctggcttcttcaccgtgtttgccagcgagctgtctgtgtacaccctgaccgtcatcaccctggagcgctggcacaccatcacctacgccatccacctggaccagaagctgcggctgcggcatgccatcctgatcatgctgggcggctggctgttcagcagcctcatcgccatgctgcccctggtgggcgtgagcaactacatgaaggtgtccatctgcttccccatggatgtggagaccaccctgagccaggtgtacatcctgaccatcctgatcctgaatgtggtggccttcttcatcatctgtgcctgctacatcaagatctactttgctgtgagaaatcctgagctgatggccaccaacaaggacaccaagatcgccaagaagatggccatcctgatcttcacagacttcacctgcatggcccccatctccttctttgccatctctgctgccttcaaggtgcccctcatcaccgtgaccaacagcaaggtgctgctggtgctcttctaccccatcaacagctgtgccaaccccttcctgtatgccatcttcaccaagaccttccagagggacttcttcctgctgctgagcaagtttggctgctgcaagagaagagctgagctgtacagaaggaaggacttcagcgcctacaccagcaactgcaagaatggcttcaccggcagcaacaagcccagccagagcaccctgaagctgagcaccctgcactgccagggcacagccctgctggacaagacccgctacacagaatgttag

SEQ ID NO: 4801 - DNA, 2989 bp, Artificial Sequence
  derived and/or modified sequence
gcagaagcccagttcgccggccatgaagcagcggttctcggcgctgcagctgctgaagctgctgctgctgctgcagccgccgctgccacgagcgctgcgcgaggcgctctgccctgagccctgcaactgcgtgcccgacggcgccctgcgctgccccggccccacggccggtctcactcgactatcacttgcctacctccctgtcaaagtgatcccatctcaagctttcagaggacttaatgaggtcataaaaattgaaatctctcagattgattccctggaaaggatagaagctaatgcctttgacaacctcctcaatttgtctgaaatactgatccagaacaccaaaaatctgagatacattgagcccggagcatttataaatcttccccgattaaaatacttgagcatctgtaacacaggcatcagaaagtttccagatgttacgaaggtcttctcctctgaatcaaatttcattctggaaatttgtgataacttacacataaccaccataccaggaaatgcttttcaagggatgaataatgaatctgtaacactcaaactatatggaaatggatttgaagaagtacaaagtcatgcattcaatgggacgacactgacttcactggagctaaaggaaaacgtacatctggagaagatgcacaatggagccttccgtggggccacagggccgaaaaccttggatatttcttccaccaaattgcaggccctgccgagctatggcctagagtccattcagaggctaattgccacgtcatcctattctctaaaaaaattgccatcaagagaaacatttgtcaatctcctggaggccacgttgacttaccccagccactgctgtgcttttagaaacttgccaacaaaagaacagaatttttcacattccatttctgaaaacttttccaaacaatgtgaaagcacagtaaggaaagtgaataacaaaacactttattcttccatgcttgctgagagtgaactgagtggctgggactatgaatatggtttctgcttacccaagacaccccgatgtgctcctgaaccagatgcttttaatccctgtgaagatattatgggctatgacttccttagggtcctgatttggctgattaatattctagccatcatgggaaacatgactgttctttttgttctcctgacaagtcgttacaaacttacagtgcctcgttttctcatgtgcaatctctcctttgcagacttttgcatggggctctatctgctgctcatagcctcagttgattcccaaaccaagggccagtactataaccatgccatagactggcagacagggagtgggtgcagcactgctggctttttcactgtattcgcaagtgaactttctgtctacaccctcaccgtcatcactctagaaagatggcacaccatcacctatgctattcacctggaccaaaagctgcgattaagacatgccattctgattatgcttggaggatggctcttttcttctctaattgctatgttgccccttgtcggtgtcagcaattacatgaaggtcagtatttgcttccccatggatgtggaaaccactctctcacaagtctatatattaaccatcctgattctcaatgtggtggccttcttcataatttgtgcttgctacattaaaatttattttgcagttcgaaacccagaattaatggctaccaataaagatacaaagattgctaagaaaatggcaatcctcatcttcaccgatttcacctgcatggcacctatctctttttttgccatctcagctgccttcaaagtacctcttatcacagtaaccaactctaaagttttactggttcttttttatcccatcaattcttgtgccaatccatttctgtatgcaatattcactaagacattccaaagagatttctttcttttgctgagcaaatttggctgctgtaaacgtcgggctgaactttatagaaggaaagatttttcagcttacacctccaactgcaaaaatggcttcactggatcaaataagccttctcaatccaccttgaagttgtccacattgcactgtcaaggtacagctctcctagacaagactcgctacacagagtgttaactgttacatcagtaactgcattattgaattgttcttaaacctgtaaaaaaaaattacctgtaccagtaattttaacataaagggttggatttaggaaattatttatttttaggtacattaggcaagagacctctacctagtagaaagtgtagtctatgaccactgccacactaaaaactatttgtcattgttacatggcataaatactgaagttgagagtgtttagaaatttttatagaaattttgacacagtaattttgtttgatgaatcttttaaaaaactgaggaggtattttgcatatcttttttttcattttcgtaatttgtattgcattctataaaaatattagttcataacagatcagaaatttaaaataactggcctttttcctcaggtagtttgaaaaacacactctagagatgcactgtccaatccggtagccactagccacatgtggctaaattaaaattaaataaaatgagaaatgtagtttctcagttgcactagccacgtttcaagttctcaatggctacgtgtgactagtgcttaccatactggacagcacagacacagaatattttcatcaccacagaaagttctatctgttctattatagagacttttatctatgccctatctggattctacttatttataatttaaggtaaacatctgaaagcacatttcagcctatttgcttagtgaaacattaagctgtagactgtaaactcctcgtgagtaggaaccctgtctcagtgcattttgttttcctgcttcctacctcaagatcttggcaatggtacactacaaatgtgctgagttagaattactctgaagttatgaaacatataatgaaaacaattttt

SEQ ID NO: 4802 - DNA, 1477 bp, Artificial Sequence
  derived and/or modified sequence
ggccgcactcagaggccgtccaagacactggcaagccgcagaagcccagttcgccggccatgaagcagcggttctcggcgctgcagctgctgaagctgctgctgctgctgcagccgccgctgccacgagcgctgcgcgaggcgctctgccctgagccctgcaactgcgtgcccgacggcgccctgcgctgccccggccccacggccggtctcactcgactatcacttgcctacctccctgtcaaagtgatcccatctcaagctttcagaggacttaatgaggtcataaaaattgaaatctctcagattgattccctggaaaggatagaagctaatgcctttgacaacctcctcaatttgtctgaaatactgatccagaacaccaaaaatctgagatacattgagcccggagcatttataaatcttccccgattaaaatacttgagcatctgtaacacaggcatcagaaagtttccagatgttacgaaggtcttctcctctgaatcaaatttcattctggaaatttgtgataacttacacataaccaccataccaggaaatgcttttcaagggatgaataatgaatctgtaacactcaaactatatggaaatggatttgaagaagtacaaagtcatgcattcaatgggacgacactgacttcactggagctaaaggaaaacgtacatctggagaagatgcacaatggagccttccgtggggccacagggccgaaaaccttggatatttcttccaccaaattgcaggccctgccgagctatggcctagagtccattcagaggctaattgccacgtcatcctattctctaaaaaaattgccatcaagagaaacatttgtcaatctcctggaggccacgttgacttaccccagccactgctgtgcttttagaaacttgccaacaaaagaacagaatttttcacattccatttctgaaaacttttccaaacaatgtgaaagcacagtaaggaaagtgaataacaaaacactttcgaaacccagaattaatggctaccaataaagatacaaagattgctaagaaaatggcaatcctcatcttcaccgatttcacctgcatggcacctatctctttttttgccatctcagctgccttcaaagtacctcttatcacagtaaccaactctaaagttttactggttcttttttatcccatcaattcttgtgccaatccatttctgtatgcaatattcactaagacattccaaagagatttctttcttttgctgagcaaatttggctgctgtaaacgtcgggctgaactttatagaaggaaagatttttcagcttacacctccaactgcaaaaatggcttcactggatcaaataagccttctcaatccaccttgaagttgtccacattgcactgtcaaggtacagctctcctagacaagactcgctacacagagtgttaactgttacatcagtaactgcattattgaa

SEQ ID NO: 4803 - DNA, 2073 bp, Artificial Sequence
  derived and/or modified sequence
atgaagcagcggttctcggcgctgcagctgctgaagctgctgctgctgctgcagccgccgctgccacgagcgctgcgcgaggcgctctgccctgagccctgcaactgcgtgcccgacggcgccctgcgctgccccggccccacggccggtctcactcgactatcacttgcctacctccctgtcaaagtgatcccatctcaagctttcagaggacttaatgaggtcataaaaattgaaatctctcagattgattccctggaaaggatagaagctaatgcctttgacaacctcctcaatttgtctgaaatactgatccagaacaccaaaaatctgagatacattgagcccggagcatttataaatcttccccgattaaaatacttgagcatctgtaacacaggcatcagaaagtttccagatgttacgaaggtcttctcctctgaatcaaatttcattctggaaatttgtgataacttacacataaccaccataccaggaaatgcttttcaagggatgaataatgaatctgtaacactcaaactatatggaaatggatttgaagaagtacaaagtcatgcattcaatgggacgacactgacttcactggagctaaaggaaaacgtacatctggagaagatgcacaatggagccttccgtggggccacagggccgaaaaccttggatatttcttccaccaaattgcaggccctgccgagctatggcctagagtccattcagaggctaattgccacgtcatcctattctctaaaaaaattgccatcaagagaaacatttgtcaatctcctggaggccacgttgacttaccccagccactgctgtgcttttagaaacttgccaacaaaagattattcttccatgcttgctgagagtgaactgagtggctgggactatgaatatggtttctgcttacccaagacaccccgatgtgctcctgaaccagatgcttttaatccctgtgaagatattatgggctatgacttccttagggtcctgatttggctgattaatattctagccatcatgggaaacatgactgttctttttgttctcctgacaagtcgttacaaacttacagtgcctcgttttctcatgtgcaatctctcctttgcagacttttgcatggggctctatctgctgctcatagcctcagttgattcccaaaccaagggccagtactataaccatgccatagactggcagacagggagtgggtgcagcactgctggctttttcactgtattcgcaagtgaactttctgtctacaccctcaccgtcatcactctagaaagatggcacaccatcacctatgctattcacctggaccaaaagctgcgattaagacatgccattctgattatgcttggaggatggctcttttcttctctaattgctatgttgccccttgtcggtgtcagcaattacatgaaggtcagtatttgcttccccatggatgtggaaaccactctctcacaagtctatatattaaccatcctgattctcaatgtggtggccttcttcataatttgtgcttgctacattaaaatttattttgcagttcgaaacccagaattaatggctaccaataaagatacaaagattgctaagaaaatggcaatcctcatcttcaccgatttcacctgcatggcacctatctctttttttgccatctcagctgccttcaaagtacctcttatcacagtaaccaactctaaagttttactggttcttttttatcccatcaattcttgtgccaatccatttctgtatgcaatattcactaagacattccaaagagatttctttcttttgctgagcaaatttggctgctgtaaacgtcgggctgaactttatagaaggaaagatttttcagcttacacctccaactgcaaaaatggcttcactggatcaaataagccttctcaatccaccttgaagttgtccacattgcactgtcaaggtacagctctcctagacaagactcgctacacagagtgttaactgttacatcagtaactgcattattgaattgttcttaaacctgtaaaaaaaaat

SEQ ID NO: 4804 - DNA, 2100 bp, Artificial Sequence
  derived and/or modified sequence
atgaagcagcggttcagcgccctgcagctgctgaagctgctgctgctcctacagccgccactgcccagagcgctgcgcgaggccttgtgcccagagccttgtaactgcgtccccgatggcgccctgagatgcccggggccaaccgccgggctcactcgcctcagcctagcgtacttacctgttaaggtgatcccatcgcaagccttccgggggttgaatgaagtgataaagatagaaattagccaaattgactctctagagagaattgaagcaaacgcgttcgataacctgctgaatctgtcagagatcctaatacagaacactaagaacctgcgttacatcgagccaggggcgttcatcaacctgcccaggctcaagtacctgagtatttgcaacacagggataaggaagttcccagacgtgactaaagtcttttcgtctgagtcaaatttcattttggagatctgcgataatctgcatatcaccacaatccctggcaatgcctttcagggtatgaacaacgaatccgtgactctgaaactttacgggaatggatttgaggaggtccagtctcacgcctttaatggaacaacattgacttctctggaacttaaggaaaacgttcacctggagaaaatgcataatggcgcgttccgcggcgctactgggccaaaaaccttagatatatcgagcactaagctgcaagcattgccttcgtatggcctggagtccatacagagattgatagccacctcatcctacagcctgaaaaaactcccttcccgggagacatttgtgaatctgctggaggctaccctcacataccccagccactgttgcgcctttaggaatctgcccacaaaggagcagaatttctcccactccattagtgagaacttttccaagcagtgtgaaagcaccgtccggaaggtgaataacaaaaccttgtattcttctatgctcgctgaaagtgagttgagcggctgggattatgagtacgggttttgcctacctaaaactcctcgttgcgcccctgaacctgacgcttttaatccatgcgaagacataatgggctatgacttcctgcgagtactgatctggctaattaacattctcgctattatgggcaatatgactgtcctgtttgtgctgcttacatcaagatataagttaacagtaccgcgttttctgatgtgtaacctctctttcgcagacttttgcatggggctctatctgctccttattgctagcgtggacagccagacgaaggggcaatactacaatcatgccattgactggcagacaggaagtggatgttctacagccggcttctttacagtatttgcctctgagctgagtgtctacactttgaccgtgattaccctcgagcggtggcatacaattacatatgccatccaccttgaccagaagctcagactcaggcatgccatcctgataatgctcggcgggtggctcttttccagcctaattgcaatgctaccgctggttggagtgagtaattacatgaaggtgtcaatctgttttcctatggacgtggagactaccctcagccaggtctacatccttaccattcttattttaaacgtggtcgccttcttcataatttgtgcctgctatataaagatttattttgcggtgagaaatcctgagctgatggctactaacaaagatacaaaaattgccaaaaagatggccatcctgattttcacagacttcacatgtatggctccaattagcttcttcgcgatatctgcagcttttaaggtccccctgatcacagttactaacagcaaagtgctgctggtactcttctatccaataaactcctgcgctaacccctttctgtatgcaatttttaccaagaccttccagcgggatttctttctgctcctgtcaaaattcggatgctgcaaacgtagagctgaactgtacagaaggaaagatttctctgcttataccagcaactgcaagaatggctttactgggtcaaacaaaccttctcagagcacattgaagctttcaaccttgcattgccaagggactgctctattagacaagacccgatacacggaatgctag

SEQ ID NO: 4805 - DNA, 978 bp, Artificial Sequence
  derived and/or modified sequence
atgaagcagcggttcagcgccctgcagctgctgaagctgctgctgctgctgcaaccacctctccccagggcactgcgcgaggctctctgtcctgaaccctgcaattgtgttcccgacggagccctgaggtgccccggcccaaccgccggtcttacccgcctgagtctcgcatatctacctgtgaaggtcatcccaagccaggcgttcagaggactcaatgaggtgattaaaatcgagatctcgcagatcgactccctcgagcggattgaggctaacgcgtttgacaacttgctcaacctgagcgagattcttattcagaatactaagaacctgcggtatatcgagcccggcgcattcatcaatcttccgcgactcaaatacctgagcatctgcaatactggtattcgcaaatttcccgacgtgacaaaagtcttttccagcgaatccaatttcatcctggaaatctgtgacaacctgcatattacgaccataccaggtaacgcctttcagggtatgaataacgaaagcgtgactttgaaactctatggcaatggttttgaggaagtgcagagtcatgccttcaacggcaccacactgacttctctggaactgaaggaaaacgtgcatctggaaaagatgcacaatggtgcatttcgcggggctactggtccaaagactctggacatcagctcaactaagttgcaggccttaccaagctatggactggagtccattcagcggctaatcgccacctcaagttattctttaaagaagcttccctctcgggagacatttgtcaaccttttggaggccaccctgacatatccctcgcactgttgcgcctttcgcaacctccctacgaaggaacaaaatttcagccactcaatcagcgaaaacttctcaaagcagtgcgagtcgacagtgagaaaagtaaataacaagaccctgtctaagccacgcattaatggataccaatag

SEQ ID NO: 4806 - DNA, 990 bp, Artificial Sequence
  derived and/or modified sequence
atgaagcagcggttcagcgccctgcagctgctgaagctgctgctgcttttacagccgcccttgccccgtgcactgcgtgaggccctgtgcccagagccttgtaattgcgtgccagacggtgctcttcgctgtcctggccctactgccggacttactcgcttgagcttggcctacctcccagtcaaggttatacctagccaggcttttaggggcctcaacgaggtgatcaaaatcgagattagccagattgacagtttagagcggattgaggcaaatgctttcgacaacctccttaatctaagtgagattctgatacagaacaccaaaaacctgcgctacatcgagcccggcgcttttatcaacctgcccaggttaaaatatttatccatctgcaacacaggaattaggaagtttcccgacgtaacgaaggttttctcatccgaatccaacttcattctcgagatttgcgataacctccatattacgacaatccccgggaacgcattccaaggcatgaataacgaatcggtgaccctgaagctgtacgggaatggattcgaggaagtccagtcacacgcattcaatggcactactttgacaagcctcgagctcaaggaaaatgtgcacctggaaaaaatgcacaatggtgcattccgtggggctaccggtccgaagaccttggatatctcctccacaaaactccaggcacttccctcttacggtttggaatccatccagcgcctgatcgcgacgagttcatactccttgaagaagctcccttcccgggagacctttgtcaacctgctggaagctacactcacctacccctctcactgctgtgctttccgaaatctgccaacaaaggagcagaattttagccacagcatttccgagaatttctctaagcagtgcgagtcaaccgtacgcaaagtgaacaataaaaccctcttgctgcatggcgccttgagtgccgcgcattcactgtcatag

SEQ ID NO: 4807 - DNA, 2019 bp, Artificial Sequence
  derived and/or modified sequence
atgaagcagcggttcagcgccctgcagctgctgaagctgctgctgctcttacagccccctctgccccgtgcactccgggaagccctgtgccctgagccctgtaactgcgtgcctgacggggctctgcggtgcccgggacctaccgcgggcctaacaaggctaagccttgcatatctcccggtgaaggtgataccttcccaggctttcaggggtcttaacgaagtgatcaaaattgagattagtcagatcgactccctggagcgcatcgaagcgaacgcctttgacaacctgttaaacctgtcagagatattaatccagaataccaagaacctgagatacattgaacccggtgcctttattaacctgccacgcctaaagtatctgagcatctgcaatactggtattcgcaagttcccagatgttacaaaggtgttctcgagtgaatctaacttcattcttgaaatttgtgacaatctgcacattactacgattccaggaaatgcattccagggaatgaacaatgagagcgtgactctaaagctgtatggaaacggattcgaggaagtccaatcacacgcctttaatgggacaacactgacgtccctcgaattgaaagagaatgtgcaccttgagaagatgcacaacggcgcattcaggggcgctactggacctaagacactggatattagtagtaccaagttacaggccctgccgtcctacgggctggaatcgatccagcgcttgatagcgacttcctcctacagtttgaaaaaattgccaagccgggaaaccttcgtgaatctactggaagctaccctgacttatccgtcccattgttgcgccttccgcaacctgcctaccaaagattactcatcaatgctcgcagaaagtgaactttctggatgggattacgagtatggcttttgcttgccaaaaacgccaaggtgtgctcctgaaccagacgccttcaatccttgcgaggacatcatgggctatgacttccttcgcgtcctcatctggctgatcaatatcctggctatcatggggaacatgaccgtgttgttcgttctgctaacctctcgttacaagctaactgtgccacgctttctgatgtgcaatctgagttttgcagacttctgtatgggactgtacctgctcctgatcgctagtgtcgacagccagacaaagggccagtactacaaccatgcaatcgactggcaaactggatcaggatgctccactgccggcttcttcacagtattcgcatcagagctcagcgtgtatactctgacagtgattacgcttgagcgttggcataccataacgtatgcaattcacctagatcagaagctgagactgcggcatgctatcttgatcatgctgggtggttggctgttctcctccctgattgctatgctgccacttgtgggtgtgtcgaactacatgaaggtctcaatctgcttccctatggacgtcgaaactactctgagtcaggtgtacattcttaccattctcatcttaaacgtggtagcctttttcattatctgtgcctgctacatcaagatttacttcgcagtcagaaatcccgagctcatggcaactaataaggatactaagatcgctaaaaagatggcaattcttatctttaccgactttacttgtatggcccctatttctttctttgctatctccgccgcgttcaaagtccctctgattacagtcaccaattccaaggttcttctggtgctgttttacccaattaactcttgcgcaaacccttttctatacgccatctttactaagacatttcaacgggacttcttcctgctgctctccaagttcgggtgctgcaaaagaagagcggagctctaccgcagaaaggatttttcagcttacacgagtaattgcaaaaacggattcaccggttccaacaaacctagtcaaagcacgctgaagttatcaactctccactgccagggaacggcactgctcgataaaacacggtacactgagtgctag

SEQ ID NO: 4808 - DNA, 2100 bp, Artificial Sequence
  derived and/or modified sequence
atgaagcaacgcttttcggccctgcagcttctgaagctactgctgctgctacagccgcctctcccacgcgcactgagagaagccctttgccccgaaccttgcaactgtgtgcctgacggcgcactgcgctgcccagggccaaccgcgggtttgactaggctgagcctagcgtatttgcctgtcaaagtgattcctagtcaggcatttcggggactcaacgaagtgattaagatagaaattagccagatcgacagcttagagagaatcgaggcgaatgctttcgacaacttactgaacctaagcgagattctcattcagaataccaaaaatctgagatatattgagcctggcgctttcatcaatttgcccagacttaaatacttgagcatctgtaatactggaatacgtaaattccctgatgtgacaaaagttttctcgtccgagtccaacttcatcctggagatctgcgataatttacatatcaccactattcccggtaatgcgttccagggcatgaataatgagagcgtaacacttaagctgtatgggaacggtttcgaggaggtgcagtcccatgccttcaatggcacaaccctgacatctctcgagctgaaagaaaatgtccatcttgagaagatgcacaatggtgcttttcgcggagctactggaccgaagacgctggacattagttctaccaagctccaggctctgccatcatatggcctggagtctatccaacgtctgatcgcaacctctagctactctctgaagaagctccccagtagagagacttttgtcaacctgctggaggccacactgacgtacccaagccactgctgcgcgttcaggaatctgccaaccaaagaacagaacttctcgcacagtattagcgaaaactttagtaaacagtgcgaaagtacggtgcgtaaggtgaataacaaaacactttacagcagtatgctggctgagagcgagctgtctggttgggactacgagtacgggttttgtttgcctaaaacccctcgttgcgcaccggagccggacgcatttaatccatgtgaagacatcatggggtatgacttccttcgagtgctgatctggttaatcaacatcctggccattatgggaaacatgactgtcctatttgtgctcctgactagccgctataaactgacagtgccgcgattcctgatgtgtaatctgtcatttgccgatttctgcatgggactatatttgctgctgattgcatctgtcgactctcagaccaaaggacagtactataatcacgccattgattggcagactggttccggctgctccactgcgggtttctttacggtgttcgcctcagaactctcagtgtatacactgactgtaatcacgcttgaaaggtggcacacaatcacgtatgctatacacttggatcagaagcttagactccgtcatgccatccttatcatgttaggaggctggctcttttccagtctcatagctatgctgccattagtgggcgtcagtaactatatgaaagtgtccatctgttttccaatggatgtggagacgactctttcccaagtgtacatactgactatacttatcctgaatgtggtggctttctttattatctgcgcttgctatattaaaatatactttgcagttcgaaaccccgaactcatggctaccaacaaagatacaaaaatcgcaaagaaaatggcgatactgatcttcaccgatttcacatgcatggcccctatttccttcttcgcgatctccgcagcttttaaggtgccactcattacggttacgaactccaaagtcctattggtgttattctacccaataaatagctgcgccaaccccttcttatatgccatattcaccaagacatttcagcgcgacttcttcctgcttctaagcaagttcggttgttgtaagagacgagcagaactctataggagaaaggatttcagtgcctataccagcaactgcaagaacggtttcacagggtcaaataagccttctcaaagcaccctgaaacttagcacactgcactgtcaagggaccgctctactggacaaaacaaggtatacagaatgctag

SEQ ID NO: 4809 - DNA, 978 bp, Artificial Sequence
  derived and/or modified sequence
atgaagcagcggttctctgcccttcagctcctgaagcttcttctgctcttgcagccaccactgcctcgcgcacttagagaggccctttgccctgagccatgcaactgcgttccggatggcgctctgagatgccctggtccaaccgctggtctcacacggctttcactggcatatctccccgtgaaagtaatccctagtcaggcctttaggggactaaacgaggtgatcaaaatagagatctcccagattgactccttggagcgtattgaggcaaacgcattcgataatctcctaaatctctctgaaatcctgatccagaatacaaaaaatctgcgctacatcgagcctggtgcgttcataaacttgcccagattaaagtatctgtccatatgcaacacgggaatccgaaagtttccagacgtgaccaaggtgttttcaagcgaatcaaacttcattctggagatttgtgacaacctccatattaccaccatacccggaaacgcattccagggcatgaacaatgaatctgtgacactgaagctgtacggcaacggctttgaagaagtgcaaagccacgcgtttaacggcaccaccctgactagcctggaacttaaggaaaatgttcacctcgagaaaatgcacaatggggcttttagaggtgcaaccggcccaaagacactggatattagtagcacgaagctccaggccctgccgtcttatggcctggaaagcatacagagactaatagctacgagttcctacagcctgaagaaactccctagtagagagacctttgttaatcttctcgaagccacactcacatacccatcacattgctgcgcctttcgcaaccttccaacaaaagaacagaacttctcccattccatcagcgagaatttttctaaacagtgcgaatcgactgtgaggaaggtgaataataaaaccctttctaagcctcgcataaatggataccaatag

SEQ ID NO: 4810 - DNA, 990 bp, Artificial Sequence
  derived and/or modified sequence
atgaaacagcgcttttcagcactgcagttgcttaagctactgctgctgctgcaacccccattacccagagccctccgagaggccctgtgtcctgaaccatgcaattgcgtgcccgacggcgcacttcgatgtcccggacccactgcaggtttgacgaggttgtccctcgcgtacctcccggttaaggtgatcccatcccaggctttccgcggactgaacgaagtgataaaaattgaaatctcacagattgactctctggaacgaatcgaagcaaatgcctttgataacctgctgaatctcagcgaaattttaattcagaacaccaagaatctgcggtacattgagccaggtgctttcatcaaccttcctaggctcaaatacctgtctatttgtaataccggcattcggaaatttccggatgtcaccaaggtgttcagctctgagtctaattttatcctggagatatgtgacaaccttcacatcacaaccatacctggtaatgcctttcaaggtatgaacaacgaatctgtgaccttaaaactgtatggcaacggtttcgaggaagtgcagagccatgcttttaacggtaccaccttaacgtcactcgagctaaaagagaacgttcacctggagaaaatgcacaacggcgcattcagaggcgctacagggccaaagaccctggatatatcctcgaccaaactccaagcccttcctagctatggccttgaaagcatacagcgactaatcgcgacttccagctattccttaaaaaagttgcctagcagagagacttttgtaaatctactcgaggcaaccctcacttatccctctcattgctgcgctttcaggaacttgcccacaaaggagcagaatttctcccacagcatcagcgagaacttctcaaaacagtgcgagtcaacagtgaggaaagtgaacaacaagacattgctgctgcacggggctctgtcagctgcccacagcctatcctag

SEQ ID NO: 4811 - DNA, 2019 bp, Artificial Sequence
  derived and/or modified sequence
atgaaacagcgattttctgcacttcaactcctcaaactcctgctgttattacaaccacctttgccgagggcactgcgagaggccctgtgtcctgagccatgcaactgtgtcccggatggtgcccttcgctgtcccggacccactgccggtctcacacggttgtcccttgcctatctgcccgtaaaggtcatccccagccaggcgttccgtggtttaaatgaggttatcaagattgagatctctcagatcgattcgctcgaaagaatcgaagccaacgcatttgataatctcctaaacctgtccgaaattttgatccaaaacaccaagaatcttaggtacatcgaaccaggagcttttatcaaccttccacggctcaaatacctatctatctgcaacactgggatacggaaatttcctgatgtcaccaaggttttctccagtgagtcaaattttattcttgagatttgtgataacctccacataacaacaatcccgggaaacgctttccagggaatgaacaatgaatctgtcaccctgaaattatatgggaatgggttcgaggaggtgcagtcccatgcctttaatggcaccaccctgacaagcctcgagttgaaggaaaacgtccacctggaaaagatgcacaacggagcattccggggagcaactggccctaaaactctcgacatcagctccaccaaactccaggcactgcccagctatggcctggagtcgatccagagattaatcgcaacatccagttactctctgaagaaactgccttcgcgggaaacattcgtgaaccttctcgaagcaactctgacatacccctctcattgctgcgcttttaggaatttgcccactaaggactactcctcaatgctcgctgaatctgagttgagtggctgggattatgaatacggtttctgcctgcccaaaacccctaggtgcgcccctgaaccggacgcctttaacccatgcgaggatatcatggggtatgactttctgcgcgtcttgatatggctgattaacatcctggctataatgggtaatatgactgtccttttcgtgctcctgacctcgcggtataaacttacagtcccccgttttttgatgtgtaatctgtcatttgccgacttctgcatggggctctacctcctactgattgcgagcgtggactctcagacaaaggggcagtattataatcatgctatcgattggcagactggatcgggatgctctactgccggattcttcacagtttttgcatcagaactaagcgtgtatactcttacagtgattacactggagcgatggcataccataacctacgcaatccacttggatcagaagttgcggttaaggcatgccatcctgataatgctcggaggttggctgttctcaagtctgattgccatgctacccctggtcggtgtgtcaaactacatgaaggtgagcatctgcttccccatggatgtcgagactacactgagtcaggtctatatcctgacaattctcattctcaatgttgttgcattcttcatcatctgtgcatgttacattaagatttactttgccgtacgaaatcccgaactgatggccacaaacaaagatactaaaatcgccaagaagatggctatcctgatttttacagatttcacgtgcatggcacccattagtttttttgctatctcggcagcgttcaaggtgcctctgataaccgtgaccaattctaaggtcctgttggttctgttttatcccattaattcttgtgccaatcctttcctgtatgcaattttcacaaagacattccagagagatttttttttgctgctctctaaattcggatgttgtaaacggagagcagaactttatagacggaaggatttcagtgcctacaccagcaactgtaagaatggcttcacgggatccaacaaaccctcccagtccacactgaagttgtctaccctccattgtcagggtaccgctctactcgataaaactcgatacacagaatgttag

SEQ ID NO: 4812 - DNA, 2100 bp, Artificial Sequence
  derived and/or modified sequence
atgaagcagagattcagcgccctgcagctgctgaagctgctgctgctgctgcagccccccctgcccagagccctgagagaggccctgtgccccgagccctgcaactgcgtgcccgacggcgccctgagatgccccggccccaccgccggcctgaccagactgagcctggcctacctgcccgtgaaggtgatccccagccaggccttcagaggcctgaacgaggtgatcaagatcgagatcagccagatcgacagcctggagagaatcgaggccaacgccttcgacaacctgctgaacctgagcgagatcctgatccagaacaccaagaacctgagatacatcgagcccggcgccttcatcaacctgcccagactgaagtacctgagcatctgcaacaccggcatcagaaagttccccgacgtgaccaaggtgttcagcagcgagagcaacttcatcctggagatctgcgacaacctgcacatcaccaccatccccggcaacgccttccagggcatgaacaacgagagcgtgaccctgaagctgtacggcaacggcttcgaggaggtgcagagccacgccttcaacggcaccaccctgaccagcctggagctgaaggagaacgtgcacctggagaagatgcacaacggcgccttcagaggcgccaccggccccaagaccctggacatcagcagcaccaagctgcaggccctgcccagctacggcctggagagcatccagagactgatcgccaccagcagctacagcctgaagaagctgcccagcagagagaccttcgtgaacctgctggaggccaccctgacctaccccagccactgctgcgccttcagaaacctgcccaccaaggagcagaacttcagccacagcatcagcgagaacttcagcaagcagtgcgagagcaccgtgagaaaggtgaacaacaagaccctgtacagcagcatgctggccgagagcgagctgagcggctgggactacgagtacggcttctgcctgcccaagacccccagatgcgcccccgagcccgacgccttcaacccctgcgaggacatcatgggctacgacttcctgagagtgctgatctggctgatcaacatcctggccatcatgggcaacatgaccgtgctgttcgtgctgctgaccagcagatacaagctgaccgtgcccagattcctgatgtgcaacctgagcttcgccgacttctgcatgggcctgtacctgctgctgatcgccagcgtggacagccagaccaagggccagtactacaaccacgccatcgactggcagaccggcagcggctgcagcaccgccggcttcttcaccgtgttcgccagcgagctgagcgtgtacaccctgaccgtgatcaccctggagagatggcacaccatcacctacgccatccacctggaccagaagctgagactgagacacgccatcctgatcatgctgggcggctggctgttcagcagcctgatcgccatgctgcccctggtgggcgtgagcaactacatgaaggtgagcatctgcttccccatggacgtggagaccaccctgagccaggtgtacatcctgaccatcctgatcctgaacgtggtggccttcttcatcatctgcgcctgctacatcaagatctacttcgccgtgagaaaccccgagctgatggccaccaacaaggacaccaagatcgccaagaagatggccatcctgatcttcaccgacttcacctgcatggcccccatcagcttcttcgccatcagcgccgccttcaaggtgcccctgatcaccgtgaccaacagcaaggtgctgctggtgctgttctaccccatcaacagctgcgccaaccccttcctgtacgccatcttcaccaagaccttccagagagacttcttcctgctgctgagcaagttcggctgctgcaagagaagagccgagctgtacagaagaaaggacttcagcgcctacaccagcaactgcaagaacggcttcaccggcagcaacaagcccagccagagcaccctgaagctgagcaccctgcactgccagggcaccgccctgctggacaagaccagatacaccgagtgctag

SEQ ID NO: 4813 - DNA, 978 bp, Artificial Sequence
  derived and/or modified sequence
atgaagcagagattcagcgccctgcagctgctgaagctgctgctgctgctgcagccccccctgcccagagccctgagagaggccctgtgccccgagccctgcaactgcgtgcccgacggcgccctgagatgccccggccccaccgccggcctgaccagactgagcctggcctacctgcccgtgaaggtgatccccagccaggccttcagaggcctgaacgaggtgatcaagatcgagatcagccagatcgacagcctggagagaatcgaggccaacgccttcgacaacctgctgaacctgagcgagatcctgatccagaacaccaagaacctgagatacatcgagcccggcgccttcatcaacctgcccagactgaagtacctgagcatctgcaacaccggcatcagaaagttccccgacgtgaccaaggtgttcagcagcgagagcaacttcatcctggagatctgcgacaacctgcacatcaccaccatccccggcaacgccttccagggcatgaacaacgagagcgtgaccctgaagctgtacggcaacggcttcgaggaggtgcagagccacgccttcaacggcaccaccctgaccagcctggagctgaaggagaacgtgcacctggagaagatgcacaacggcgccttcagaggcgccaccggccccaagaccctggacatcagcagcaccaagctgcaggccctgcccagctacggcctggagagcatccagagactgatcgccaccagcagctacagcctgaagaagctgcccagcagagagaccttcgtgaacctgctggaggccaccctgacctaccccagccactgctgcgccttcagaaacctgcccaccaaggagcagaacttcagccacagcatcagcgagaacttcagcaagcagtgcgagagcaccgtgagaaaggtgaacaacaagaccctgagcaagcccagaatcaacggctaccagtag

SEQ ID NO: 4814 - DNA, 990 bp, Artificial Sequence
  derived and/or modified sequence
atgaagcagagattcagcgccctgcagctgctgaagctgctgctgctgctgcagccccccctgcccagagccctgagagaggccctgtgccccgagccctgcaactgcgtgcccgacggcgccctgagatgccccggccccaccgccggcctgaccagactgagcctggcctacctgcccgtgaaggtgatccccagccaggccttcagaggcctgaacgaggtgatcaagatcgagatcagccagatcgacagcctggagagaatcgaggccaacgccttcgacaacctgctgaacctgagcgagatcctgatccagaacaccaagaacctgagatacatcgagcccggcgccttcatcaacctgcccagactgaagtacctgagcatctgcaacaccggcatcagaaagttccccgacgtgaccaaggtgttcagcagcgagagcaacttcatcctggagatctgcgacaacctgcacatcaccaccatccccggcaacgccttccagggcatgaacaacgagagcgtgaccctgaagctgtacggcaacggcttcgaggaggtgcagagccacgccttcaacggcaccaccctgaccagcctggagctgaaggagaacgtgcacctggagaagatgcacaacggcgccttcagaggcgccaccggccccaagaccctggacatcagcagcaccaagctgcaggccctgcccagctacggcctggagagcatccagagactgatcgccaccagcagctacagcctgaagaagctgcccagcagagagaccttcgtgaacctgctggaggccaccctgacctaccccagccactgctgcgccttcagaaacctgcccaccaaggagcagaacttcagccacagcatcagcgagaacttcagcaagcagtgcgagagcaccgtgagaaaggtgaacaacaagaccctgctgctgcacggcgccctgagcgccgcccacagcctgagctag

SEQ ID NO: 4815 - DNA, 2019 bp, Artificial Sequence
  derived and/or modified sequence
atgaagcagagattcagcgccctgcagctgctgaagctgctgctgctgctgcagccccccctgcccagagccctgagagaggccctgtgccccgagccctgcaactgcgtgcccgacggcgccctgagatgccccggccccaccgccggcctgaccagactgagcctggcctacctgcccgtgaaggtgatccccagccaggccttcagaggcctgaacgaggtgatcaagatcgagatcagccagatcgacagcctggagagaatcgaggccaacgccttcgacaacctgctgaacctgagcgagatcctgatccagaacaccaagaacctgagatacatcgagcccggcgccttcatcaacctgcccagactgaagtacctgagcatctgcaacaccggcatcagaaagttccccgacgtgaccaaggtgttcagcagcgagagcaacttcatcctggagatctgcgacaacctgcacatcaccaccatccccggcaacgccttccagggcatgaacaacgagagcgtgaccctgaagctgtacggcaacggcttcgaggaggtgcagagccacgccttcaacggcaccaccctgaccagcctggagctgaaggagaacgtgcacctggagaagatgcacaacggcgccttcagaggcgccaccggccccaagaccctggacatcagcagcaccaagctgcaggccctgcccagctacggcctggagagcatccagagactgatcgccaccagcagctacagcctgaagaagctgcccagcagagagaccttcgtgaacctgctggaggccaccctgacctaccccagccactgctgcgccttcagaaacctgcccaccaaggactacagcagcatgctggccgagagcgagctgagcggctgggactacgagtacggcttctgcctgcccaagacccccagatgcgcccccgagcccgacgccttcaacccctgcgaggacatcatgggctacgacttcctgagagtgctgatctggctgatcaacatcctggccatcatgggcaacatgaccgtgctgttcgtgctgctgaccagcagatacaagctgaccgtgcccagattcctgatgtgcaacctgagcttcgccgacttctgcatgggcctgtacctgctgctgatcgccagcgtggacagccagaccaagggccagtactacaaccacgccatcgactggcagaccggcagcggctgcagcaccgccggcttcttcaccgtgttcgccagcgagctgagcgtgtacaccctgaccgtgatcaccctggagagatggcacaccatcacctacgccatccacctggaccagaagctgagactgagacacgccatcctgatcatgctgggcggctggctgttcagcagcctgatcgccatgctgcccctggtgggcgtgagcaactacatgaaggtgagcatctgcttccccatggacgtggagaccaccctgagccaggtgtacatcctgaccatcctgatcctgaacgtggtggccttcttcatcatctgcgcctgctacatcaagatctacttcgccgtgagaaaccccgagctgatggccaccaacaaggacaccaagatcgccaagaagatggccatcctgatcttcaccgacttcacctgcatggcccccatcagcttcttcgccatcagcgccgccttcaaggtgcccctgatcaccgtgaccaacagcaaggtgctgctggtgctgttctaccccatcaacagctgcgccaaccccttcctgtacgccatcttcaccaagaccttccagagagacttcttcctgctgctgagcaagttcggctgctgcaagagaagagccgagctgtacagaagaaaggacttcagcgcctacaccagcaactgcaagaacggcttcaccggcagcaacaagcccagccagagcaccctgaagctgagcaccctgcactgccagggcaccgccctgctggacaagaccagatacaccgagtgctag

SEQ ID NO: 4816 - protein, 219 aa, Artificial Sequence
  derived and/or modified sequence
MKMRFLGLVVCLVLWTLHSEGSGGKLTAVDPETNMNVSEIISYWGFPSEEYLVETEDGYILCLNRIPHGRKNHSDKGPKPVVFLQHGLLADSSNWVTNLANSSLGFILADAGFDVWMGNSRGNTWSRKHKTLSVSQDEFWAFSYDEMAKYDLPASINFILNKTGQEQVYYVGHSQGTTIGFIAFSQIPELAKRIKMFFALGPVASVAFCTSPMAKLGRL

SEQ ID NO: 4817 - protein, 399 aa, Artificial Sequence
  derived and/or modified sequence
MKMRFLGLVVCLVLWTLHSEGSGGKLTAVDPETNMNVSEIISYWGFPSEEYLVETEDGYILCLNRIPHGRKNHSDKGPKPVVFLQHGLLADSSNWVTNLANSSLGFILADAGFDVWMGNSRGNTWSRKHKTLSVSQDEFWAFSYDEMAKYDLPASINFILNKTGQEQVYYVGHSQGTTIGFIAFSQIPELAKRIKMFFALGPVASVAFCTSPMAKLGRLPDHLIKDLFGDKEFLPQSAFLKWLGTHVCTHVILKELCGNLCFLLCGFNERNLNMSRVDVYTTHSPAGTSVQNMLHWSQAVKFQKFQAFDWGSSAKNYFHYNQSYPPTYNVKDMLVPTAVWSGGHDWLADVYDVNILLTQITNLVFHESIPEWEHLDFIWGLDAPWRLYNKIINLMRKYQ

SEQ ID NO: 4818 - protein, 357 aa, Artificial Sequence
  derived and/or modified sequence
MKLRTLAVSATVVKDGVSGVCSFRCSDVSGVLPSGPKPVVFLQHGLLADSSNWVTNLANSSLGFILADAGFDVWMGNSRGNTWSRKHKTLSVSQDEFWAFSYDEMAKYDLPASINFILNKTGQEQVYYVGHSQGTTIGFIAFSQIPELAKRIKMFFALGPVASVAFCTSPMAKLGRLPDHLIKDLFGDKEFLPQSAFLKWLGTHVCTHVILKELCGNLCFLLCGFNERNLNMSRVDVYTTHSPAGTSVQNMLHWSQAVKFQKFQAFDWGSSAKNYFHYNQSYPPTYNVKDMLVPTAVWSGGHDWLADVYDVNILLTQITNLVFHESIPEWEHLDFIWGLDAPWRLYNKIINLMRKYQ

SEQ ID NO: 4819 - protein, 343 aa, Artificial Sequence
  derived and/or modified sequence
MACLEFVPFDVQMCLEFLPSGPKPVVFLQHGLLADSSNWVTNLANSSLGFILADAGFDVWMGNSRGNTWSRKHKTLSVSQDEFWAFSYDEMAKYDLPASINFILNKTGQEQVYYVGHSQGTTIGFIAFSQIPELAKRIKMFFALGPVASVAFCTSPMAKLGRLPDHLIKDLFGDKEFLPQSAFLKWLGTHVCTHVILKELCGNLCFLLCGFNERNLNMSRVDVYTTHSPAGTSVQNMLHWSQAVKFQKFQAFDWGSSAKNYFHYNQSYPPTYNVKDMLVPTAVWSGGHDWLADVYDVNILLTQITNLVFHESIPEWEHLDFIWGLDAPWRLYNKIINLMRKYQ

SEQ ID NO: 4820 - protein, 401 aa, Artificial Sequence
  derived and/or modified sequence
MACLEFVPFDVQMCLEFLPSGEFVVLLTSGVQLQTFTVSVTDLKGGASGVVRSSRWVRGFTDFRSKAVDLCGPKPVVFLQHGLLADSSNWVTNLANSSLGFILADAGFDVWMGNSRGNTWSRKHKTLSVSQDEFWAFRVPFLDYSYDEMAKYDLPASINFILNKTGQEQVYYVGHSQGTTIGFIAFSQIPELAKRIKMFFALGPVASVAFCTSPMAKLGRLPDHLIKDLFGDKEFLPQSAFLKWLGTHVCTHVILKELCGNLCFLLCGFNERNLNMSRVDVYTTHSPAGTSVQNMLHWSQAVKFQKFQAFDWGSSAKNYFHYNQSYPPTYNVKDMLVPTAVWSGGHDWLADVYDVNILLTQITNLVFHESIPEWEHLDFIWGLDAPWRLYNKIINLMRKYQ

SEQ ID NO: 4821 - protein, 290 aa, Artificial Sequence
  derived and/or modified sequence
MKMRFLGLVVCLVLWTLHSEGSGGKLTAVDPETNMNVSEIISYWGFPSEEYLVETEDGYILCLNRIPHGRKNHSDKGPKPVVFLQHGLLADSSNWVTNLANSSLGFILADAGFDVWMGNSRGNTWSRKHKTLSVSQDEFWAFSYDEMAKYDLPASINFILNKTGQEQVYYVGHSQGTTIGFIAFSQIPELAKRIKMFFALGPVASVAFCTSPMAKLGRLPDHLIKDLFGDKEFLPQSAFLKWLGTHVCTHVILKELCGNLCFLLCGFNERNLNMSRVDVYTTHSPAGTSV

SEQ ID NO: 4822 - protein, 28 aa, Artificial Sequence
  derived and/or modified sequence
LCFLLCGFNERNLNMAVKFQKFQAFDWG

SEQ ID NO: 4823 - protein, 136 aa, Artificial Sequence
  derived and/or modified sequence
MKMRFLGLVVCLVLWTLHSEGSGGKLTAVDPETNMNVSEIISYWGFPSEEYLVETEDGYILCLNRIPHGRKNHSDKGPKPVVFLQHGLLADSSNWVTNLANSSLGFILADAGFDVWMGNSRGNTWSRKHVTLEPGC

SEQ ID NO: 4824 - DNA, 657 bp, Artificial Sequence
  derived and/or modified sequence
atgaagatgcgcttcctgggcctggtggtgtgcctggtgctgtggaccctgcacagcgagggcagcggcggcaagctgaccgccgtggaccccgagaccaacatgaacgtgagcgagatcatcagctactggggcttccccagcgaggagtacctggtggagaccgaggacggctacatcctgtgcctgaaccgcatcccccacggccgcaagaaccacagcgacaagggccccaagcccgtggtgttcctgcagcacggcctgctggccgacagcagcaactgggtgaccaacctggccaacagcagcctgggcttcatcctggccgacgccggcttcgacgtgtggatgggcaacagccgcggcaacacctggagccgcaagcacaagaccctgagcgtgagccaggacgagttctgggccttcagctacgacgagatggccaagtacgacctgcccgccagcatcaacttcatcctgaacaagaccggccaggagcaggtgtactacgtgggccacagccagggcaccaccatcggcttcatcgccttcagccagatccccgagctggccaagcgcatcaagatgttcttcgccctgggccccgtggccagcgtggccttctgcaccagccccatggccaagctgggccgcctg

SEQ ID NO: 4825 - DNA, 1197 bp, Artificial Sequence
  derived and/or modified sequence
atgaagatgcgcttcctgggcctggtggtgtgcctggtgctgtggaccctgcacagcgagggcagcggcggcaagctgaccgccgtggaccccgagaccaacatgaacgtgagcgagatcatcagctactggggcttccccagcgaggagtacctggtggagaccgaggacggctacatcctgtgcctgaaccgcatcccccacggccgcaagaaccacagcgacaagggccccaagcccgtggtgttcctgcagcacggcctgctggccgacagcagcaactgggtgaccaacctggccaacagcagcctgggcttcatcctggccgacgccggcttcgacgtgtggatgggcaacagccgcggcaacacctggagccgcaagcacaagaccctgagcgtgagccaggacgagttctgggccttcagctacgacgagatggccaagtacgacctgcccgccagcatcaacttcatcctgaacaagaccggccaggagcaggtgtactacgtgggccacagccagggcaccaccatcggcttcatcgccttcagccagatccccgagctggccaagcgcatcaagatgttcttcgccctgggccccgtggccagcgtggccttctgcaccagccccatggccaagctgggccgcctgcccgaccacctgatcaaggacctgttcggcgacaaggagttcctgccccagagcgccttcctgaagtggctgggcacccacgtgtgcacccacgtgatcctgaaggagctgtgcggcaacctgtgcttcctgctgtgcggcttcaacgagcgcaacctgaacatgagccgcgtggacgtgtacaccacccacagccccgccggcaccagcgtgcagaacatgctgcactggagccaggccgtgaagttccagaagttccaggccttcgactggggcagcagcgccaagaactacttccactacaaccagagctacccccccacctacaacgtgaaggacatgctggtgcccaccgccgtgtggagcggcggccacgactggctggccgacgtgtacgacgtgaacatcctgctgacccagatcaccaacctggtgttccacgagagcatccccgagtgggagcacctggacttcatctggggcctggacgccccctggcgcctgtacaacaagatcatcaacctgatgcgcaagtaccag

SEQ ID NO: 4826 - DNA, 1029 bp, Artificial Sequence
  derived and/or modified sequence
atggcctgcctggagttcgtgcccttcgacgtgcagatgtgcctggagttcctgcccagcggccccaagcccgtggtgttcctgcagcacggcctgctggccgacagcagcaactgggtgaccaacctggccaacagcagcctgggcttcatcctggccgacgccggcttcgacgtgtggatgggcaacagccgcggcaacacctggagccgcaagcacaagaccctgagcgtgagccaggacgagttctgggccttcagctacgacgagatggccaagtacgacctgcccgccagcatcaacttcatcctgaacaagaccggccaggagcaggtgtactacgtgggccacagccagggcaccaccatcggcttcatcgccttcagccagatccccgagctggccaagcgcatcaagatgttcttcgccctgggccccgtggccagcgtggccttctgcaccagccccatggccaagctgggccgcctgcccgaccacctgatcaaggacctgttcggcgacaaggagttcctgccccagagcgccttcctgaagtggctgggcacccacgtgtgcacccacgtgatcctgaaggagctgtgcggcaacctgtgcttcctgctgtgcggcttcaacgagcgcaacctgaacatgagccgcgtggacgtgtacaccacccacagccccgccggcaccagcgtgcagaacatgctgcactggagccaggccgtgaagttccagaagttccaggccttcgactggggcagcagcgccaagaactacttccactacaaccagagctacccccccacctacaacgtgaaggacatgctggtgcccaccgccgtgtggagcggcggccacgactggctggccgacgtgtacgacgtgaacatcctgctgacccagatcaccaacctggtgttccacgagagcatccccgagtgggagcacctggacttcatctggggcctggacgccccctggcgcctgtacaacaagatcatcaacctgatgcgcaagtaccag

SEQ ID NO: 4827 - DNA, 1203 bp, Artificial Sequence
  derived and/or modified sequence
atggcctgcctggagttcgtgcccttcgacgtgcagatgtgcctggagttcctgcccagcggcgagttcgtggtgctgctgaccagcggcgtgcagctgcagaccttcaccgtgagcgtgaccgacctgaagggcggcgccagcggcgtggtgcgcagcagccgctgggtgcgcggcttcaccgacttccgcagcaaggccgtggacctgtgcggccccaagcccgtggtgttcctgcagcacggcctgctggccgacagcagcaactgggtgaccaacctggccaacagcagcctgggcttcatcctggccgacgccggcttcgacgtgtggatgggcaacagccgcggcaacacctggagccgcaagcacaagaccctgagcgtgagccaggacgagttctgggccttccgcgtgcccttcctggactacagctacgacgagatggccaagtacgacctgcccgccagcatcaacttcatcctgaacaagaccggccaggagcaggtgtactacgtgggccacagccagggcaccaccatcggcttcatcgccttcagccagatccccgagctggccaagcgcatcaagatgttcttcgccctgggccccgtggccagcgtggccttctgcaccagccccatggccaagctgggccgcctgcccgaccacctgatcaaggacctgttcggcgacaaggagttcctgccccagagcgccttcctgaagtggctgggcacccacgtgtgcacccacgtgatcctgaaggagctgtgcggcaacctgtgcttcctgctgtgcggcttcaacgagcgcaacctgaacatgagccgcgtggacgtgtacaccacccacagccccgccggcaccagcgtgcagaacatgctgcactggagccaggccgtgaagttccagaagttccaggccttcgactggggcagcagcgccaagaactacttccactacaaccagagctacccccccacctacaacgtgaaggacatgctggtgcccaccgccgtgtggagcggcggccacgactggctggccgacgtgtacgacgtgaacatcctgctgacccagatcaccaacctggtgttccacgagagcatccccgagtgggagcacctggacttcatctggggcctggacgccccctggcgcctgtacaacaagatcatcaacctgatgcgcaagtaccag

SEQ ID NO: 4828 - DNA, 870 bp, Artificial Sequence
  derived and/or modified sequence
atgaagatgcgcttcctgggcctggtggtgtgcctggtgctgtggaccctgcacagcgagggcagcggcggcaagctgaccgccgtggaccccgagaccaacatgaacgtgagcgagatcatcagctactggggcttccccagcgaggagtacctggtggagaccgaggacggctacatcctgtgcctgaaccgcatcccccacggccgcaagaaccacagcgacaagggccccaagcccgtggtgttcctgcagcacggcctgctggccgacagcagcaactgggtgaccaacctggccaacagcagcctgggcttcatcctggccgacgccggcttcgacgtgtggatgggcaacagccgcggcaacacctggagccgcaagcacaagaccctgagcgtgagccaggacgagttctgggccttcagctacgacgagatggccaagtacgacctgcccgccagcatcaacttcatcctgaacaagaccggccaggagcaggtgtactacgtgggccacagccagggcaccaccatcggcttcatcgccttcagccagatccccgagctggccaagcgcatcaagatgttcttcgccctgggccccgtggccagcgtggccttctgcaccagccccatggccaagctgggccgcctgcccgaccacctgatcaaggacctgttcggcgacaaggagttcctgccccagagcgccttcctgaagtggctgggcacccacgtgtgcacccacgtgatcctgaaggagctgtgcggcaacctgtgcttcctgctgtgcggcttcaacgagcgcaacctgaacatgagccgcgtggacgtgtacaccacccacagccccgccggcaccagcgtg

SEQ ID NO: 4829 - DNA, 408 bp, Artificial Sequence
  derived and/or modified sequence
atgaagatgcgcttcctgggcctggtggtgtgcctggtgctgtggaccctgcacagcgagggcagcggcggcaagctgaccgccgtggaccccgagaccaacatgaacgtgagcgagatcatcagctactggggcttccccagcgaggagtacctggtggagaccgaggacggctacatcctgtgcctgaaccgcatcccccacggccgcaagaaccacagcgacaagggccccaagcccgtggtgttcctgcagcacggcctgctggccgacagcagcaactgggtgaccaacctggccaacagcagcctgggcttcatcctggccgacgccggcttcgacgtgtggatgggcaacagccgcggcaacacctggagccgcaagcacgtgaccctggagcccggctgc

SEQ ID NO: 4830 - DNA, 1197 bp, Artificial Sequence
  derived and/or modified sequence
atgaaaatgcgcttcttagggttagtggtctgcctggtgctgtggacccttcactcagagggttcccgtgggaaactgaccgccgtggacccagaaacaaacatgaatgtgtctgaaatcatttcttattggggttttcccagtgaggagtacctcgtagagacagaggacgggtacatactttgtctgaatagaattcctcacggtagaaagaatcattcagataagggcccaaagccagtggtgttcttgcagcacggcttactggctgattcaagtaactgggtcaccaacttggcaaatagttctctgggatttattctcgctgacgcggggttcgatgtctggatgggcaattcccgaggcaacacttggagcagaaagcacaagacgctgtcggtgagtcaagatgagttttgggctttcagctatgatgaaatggccaagtacgatctgccggctagcatcaactttattctgaacaagaccggacaagagcaggtttattatgtcggacactctcagggaactacaattggtttcatcgccttttcccagatccccgagttagccaaacgcataaaaatgtttttcgcactgggtccagtggcgagcgtcgcattctgcacgagccccatggccaagttgggccgcctccctgaccacctcattaaagatctgttcggggacaaggagttcctaccccagagtgcgtttcttaagtggttagggacccatgtgtgcacgcatgtaatcctcaaggaactctgcggcaatctgtgttttctgctctgcgggtttaatgagaggaacctcaacatgagccgggtggacgtctacaccacccattcacccgctggaacatccgtgcagaatatgcttcattggtcgcaggctgtcaaattccagaagttccaagctttcgattggggaagttctgcgaagaattatttccactataatcagtcatatccacccacatacaatgtgaaggacatgctcgttcccaccgcagtttggtccgggggacatgattggttagccgatgtgtatgacgtgaacatacttttgacacagataactaaccttgtgttccatgaatccattcctgagtgggagcacctagattttatatgggggctggatgcgccttggagactctacaacaagatcatcaacctgatgcggaaataccaa

SEQ ID NO: 4831 - DNA, 1197 bp, Artificial Sequence
  derived and/or modified sequence
atgaaaatgcgatttcttggattagtggtttgtttagttctttggacattacatagtgaaggatctagaggaaaacttactgctgttgatccagaaacaaatatgaatgtgagcgaaattatttcttattggggatttccatctgaagagtaccttgtcgaaacagaagatggatacattttatgtcttaatagaattccacatggtagaaagaatcattcagataagggtccaaaacctgttgtttttttacaacatggtcttttggcagattcatcaaattgggtaacaaatttagcaaattcatctcttggatttatacttgcagatgctggttttgatgtctggatgggaaattcaagaggaaatacatggtcaagaaagcataaaacacttagtgtttctcaagatgagttttgggctttttcatatgatgaaatggcaaaatatgatttacctgcatcaatcaatttcattttaaataaaactggtcaagaacaagtttattacgttggacattctcaaggtacaacaattggttttattgcattctcacaaattccagagcttgcaaaaagaattaaaatgttttttgctttaggtcctgttgcttcagttgctttttgtacatctcctatggcaaaattaggtcgtttaccagaccatttaattaaagatttattcggagataaagaatttttacctcaatctgcatttttaaaatggcttggaacacatgtatgtactcatgttatacttaaggagttatgtggtaatttatgttttttactttgtggattcaatgaaagaaatcttaatatgagtcgtgttgatgtttatactactcattcaccagctgggacatcagttcaaaatatgcttcattggagtcaagcagttaaatttcaaaagtttcaagcatttgattggggaagttcagctaagaattattttcattataatcaatcatatccaccaacttataatgtaaaggatatgcttgtaccaacagcagtttggagtggaggacatgattggcttgcagatgtttacgatgttaatatacttcttactcaaataacaaatcttgttttccatgaatcaattccagaatgggaacatcttgattttatttgggggttagatgctccttggagactttataataaaattattaatttaatgagaaaatatcaa

SEQ ID NO: 4832 - DNA, 1197 bp, Artificial Sequence
  derived and/or modified sequence
atgaaaatgcggtttctgggcctggtggtgtgtctggttctgtggaccctccacagcgaaggttcccgaggcaaactgactgccgtcgacccggaaaccaacatgaacgtttcggagatcatttcgtactggggattcccgtccgaagaatacctcgtggaaaccgaggacggatacattctgtgcttgaatcgtatcccgcatggtcggaagaaccacagcgacaaaggccctaagccggtggtgtttctccagcacggcctgctggccgactcctcaaattgggtcaccaatctcgctaatagcagccttggattcatactggccgatgcaggatttgacgtctggatgggcaattcacgtggaaacacctggtcacggaaacacaagaccttgtcagtctcgcaagatgagttttgggcattctcatacgacgagatggctaaatacgacctgccggccagcattaacttcatcttgaataagactggccaagaacaggtgtattacgtgggccattcccaagggaccaccatcggtttcatcgcgttctcgcagatcccggaacttgcaaagaggatcaagatgtttttcgcactgggaccagtcgcttctgtcgccttctgtacgtcgcctatggccaagttggggagactcccagaccatttgatcaaggatctcttcggtgataaggagtttctgccgcagtcagctttcctgaagtggctgggaactcatgtgtgcacccatgtcatccttaaagagctgtgcggcaacctgtgcttcctgctctgtggattcaacgaacgcaacctgaacatgagcagggtggatgtgtatactacccattcccccgctggcactagcgtgcagaatatgttgcattggtcacaggccgtgaaatttcagaagttccaggccttcgactggggatcgtccgccaagaactacttccactacaaccaaagctacccacctacttacaacgttaaagatatgctggtgcctaccgcggtgtggtcggggggacacgactggctcgctgatgtctacgatgtgaacatcctgctcactcagatcactaatttggtctttcacgaatcgatccctgagtgggaacacctggactttatctggggactcgacgcgccttggagactttacaacaaaatcatcaacctgatgcgcaagtaccaa

SEQ ID NO: 4833 - DNA, 1197 bp, Artificial Sequence
  derived and/or modified sequence
atgaaaatgaggttccttggactcgttgtctgtttagtattgtggaccttgcattctgaagggtcccgaggaaagctgaccgcggtcgaccctgagaccaatatgaacgtgtcggaaatcatctcatattggggctttccatccgaagagtatttagtggagaccgaagatggctacatactctgtctgaaccgcattcctcacgggcgtaagaatcacagtgacaagggaccaaagcccgttgtctttcttcagcatggactgttggcagattcaagtaactgggtcacgaatctcgccaactcatctctgggtttcatcctggcagatgcgggctttgatgtgtggatggggaatagtcgtgggaacacttggtcccggaaacataaaacactgagtgtttcccaggacgagttttgggctttttcatacgacgaaatggcaaagtacgacctcccagcatccatcaatttcatacttaacaaaactgggcaggaacaggtctactatgtcggacactctcagggtacaacaatcgggttcatcgcattcagtcaaataccggagctggccaagcggatcaagatgttcttcgcactcggacccgttgcctccgtagcgttttgtacaagccccatggctaagctagggcggttacccgaccacctgattaaagatttgtttggggataaagagtttttaccccagtccgcatttctcaagtggctcggtacccatgtctgtacccacgttatcctgaaggagctgtgtggtaatctttgcttccttctgtgtggtttcaacgagcgtaatctgaatatgtcaagggtagacgtgtacactactcactcccccgccggaactagcgtgcagaacatgctacattggtctcaggcagtgaagttccagaaattccaggccttcgactggggatcttccgccaagaactacttccattataatcagtcgtacccacctacgtataatgttaaggatatgctcgtccccacagctgtgtggagcggcggccacgactggctagctgacgtgtacgacgtcaacattctgcttactcagatcactaacctcgtttttcacgagtcaattccagagtgggagcatttggattttatctggggccttgatgccccctggcggctgtacaataaaataatcaatctaatgcgaaaataccag

SEQ ID NO: 4834 - DNA, 1197 bp, Artificial Sequence
  derived and/or modified sequence
atgaaaatgagattcctggggcttgtggtctgtctggtcctgtggactctccattccgaggggtcgcgtggtaagctcactgcagtggatccagaaactaacatgaacgtttcggaaatcatctcgtactggggcttcccatccgaggagtacctggttgaaaccgaagatggctacatcctgtgtctcaaccgaattccccacggacggaagaaccattcagataagggccctaaacctgtggtgtttctccagcatgggttgcttgcagattcctccaactgggtgactaatctggccaattcatctctggggttcattctggccgacgcaggattcgacgtgtggatggggaatagccggggtaacacctggagtcgcaagcataagactctcagcgtgtcccaggatgaattttgggcattctcctacgatgaaatggccaagtacgatcttcccgccagcattaactttattcttaacaagactgggcaagaacaagtgtactacgtcggacattcccaggggacgaccattggctttatcgcattcagccaaattcctgagctcgcaaagagaattaagatgtttttcgcgctcgggcctgtggcctcagtcgcgttttgtacttcacctatggctaagttgggacggcttcctgatcacctgattaaggacctttttggagacaaagaattcctccctcaatcagcatttctgaagtggctcggaacccatgtgtgcacccacgtgatccttaaggaactttgtgggaatctctgtttcctcctttgtggctttaacgaaagaaatctgaatatgtcaagggtcgatgtgtacactacccattcgcccgcaggtacctccgtccagaatatgttgcattggagccaggcagtcaagtttcaaaagtttcaggctttcgattggggttcctccgcaaagaattactttcattacaatcagtcctaccctcctacctataatgtgaaggacatgctggtgccgactgcagtgtggagcggaggtcacgactggttggccgatgtctacgatgtgaatatcctgttgacccaaattaccaatctcgtgtttcacgaatccattccagaatgggagcatctcgatttcatatgggggcttgatgcaccatggaggctttacaacaagatcattaatctcatgcgcaaatatcaa

SEQ ID NO: 4835 - DNA, 1197 bp, Artificial Sequence
  derived and/or modified sequence
atgaagatgcgtttccttgggctcgtggtgtgccttgttctgtggacccttcattctgagggctctaggggaaagttaacagctgtcgaccccgaaaccaacatgaatgtgtcagagataatcagttattggggctttccttctgaggagtatctcgtcgagaccgaggacggttacatcctttgtctaaataggatcccccacgggcgtaagaaccactccgacaagggacccaagccagtggtctttctgcagcacggactgctggctgactcttcaaactgggtgactaacctggctaattcatctctcgggtttattctggctgacgcagggtttgatgtctggatgggaaactctagaggcaacacatggtcccgcaagcacaaaactctctctgtgagccaagatgagttctgggccttcagctatgacgagatggccaaatatgatttgccagcctcaattaactttatattaaataagacaggccaggagcaggtctactatgtgggccacagccaggggacaaccattgggtttattgccttctctcagatccccgaattagctaaacgtatcaagatgtttttcgccctcggccctgtagcatcagtggcattttgtacatcacccatggccaagctgggaagactgcctgatcacctgattaaagacttgttcggcgataaagagttccttccacagagtgcctttctgaagtggctcggcacacatgtgtgcactcacgtaatcctaaaagaactctgcggcaacctgtgcttcctcctatgtggtttcaacgagagaaatcttaacatgagtagggttgatgtttacacgactcactctcccgccggaacctcggttcagaacatgctgcattggtcccaggccgtcaagttccagaaattccaggctttcgattggggaagcagcgctaaaaattatttccattacaaccagtcctaccccccaacttacaacgttaaagatatgctggtacctacagccgtgtggtccggagggcatgattggcttgcggacgtctatgacgttaatatcttactaacccaaattaccaatctggtattccacgagagcatccccgagtgggaacacctggactttatatggggcctagatgcgccctggcgtctgtataataagatcatcaatctcatgaggaaatatcag

SEQ ID NO: 4836 - DNA, 1197 bp, Artificial Sequence
  derived and/or modified sequence
atgaaaatgaggtttctgggtctggtggtttgtctggttctgtggacgttacattcagaaggttctaggggaaaacttactgctgttgatccagagacaaacatgaacgtgtcggaaattatcagctattggggcttcccgtccgaggagtatctcgttgagacagaggatgggtatatactatgtctgaatcgcatcccccacggccgaaaaaaccattctgacaagggtcctaaacccgtcgtctttctccaacatggcctgctcgcagactctagtaactgggtgaccaatctggcaaactccagcttaggttttatcctcgccgatgctggcttcgatgtttggatggggaatagtcgggggaacacatggagtaggaaacataaaactttgagtgtgagtcaggacgaattctgggccttctcttacgacgaaatggccaagtacgatctgccggcctctattaattttatcctgaataagactgggcaagagcaggtgtattatgtcggccactcccaggggaccaccatcggcttcatcgctttcagtcagatccctgagctagccaagcgaatcaaaatgttcttcgccttgggtccagtagcgagcgtggccttctgcacatctcctatggcaaagctgggacgactgccagaccacctgattaaggacctgtttggtgacaaagaatttcttcctcagtctgcttttctcaaatggctgggcacacacgtctgtacccatgtcattctaaaagaactgtgcggtaacttgtgtttcctgctgtgtggatttaatgagagaaacttgaatatgagccgggttgacgtctacacaactcacagtcccgccggaactagcgtgcagaatatgctccactggtcacaggccgtgaagttccaaaagtttcaggcctttgactggggatcgagtgcaaagaattactttcattacaatcagagttatccaccaacttacaacgttaaagatatgttggtcccgaccgcagtctggtctggaggccacgattggctggctgacgtctacgatgtcaacatacttctgacacagattaccaacctggtgttccatgagtccatccctgaatgggaacaccttgactttatctggggcttagatgccccctggcggctgtataataagataataaacctcatgcgcaaatatcag

SEQ ID NO: 4837 - DNA, 1197 bp, Artificial Sequence
  derived and/or modified sequence
atgaagatgcgatttctggggcttgtggtgtgccttgtgctgtggactcttcactcagaaggcagcaggggtaaactgaccgctgtcgaccccgaaactaacatgaatgtgtcagagattatcagctactggggctttccttcagaggagtacctcgtcgaaaccgaggacggttacattctttgtctcaaccgcatcccacacggacgaaaaaaccatagtgacaaagggccgaagcctgtggtatttctgcagcatggtctgcttgcagattcgtcgaattgggtaactaacctcgcgaactcgtccttgggattcatactcgcagatgcgggatttgatgtttggatgggaaactcgcggggcaatacttggtcgcggaagcataagaccctttctgtgagccaggatgaattttgggccttctcatatgatgagatggcaaagtacgaccttcctgcctctatcaactttattctgaacaagaccggtcaagaacaagtctactacgtgggtcattcgcaggggacgaccataggattcattgcatttagccaaatccctgaactcgccaagcgtattaagatgttcttcgcactgggacctgtggcttccgtcgcattttgtacctcgcctatggcgaagctgggtcgcctccctgaccacttgattaaagatctttttggcgataaggaatttctgccgcaatcagcattccttaagtggctcggcacgcacgtgtgtactcatgtgatcctgaaggaactgtgtggtaatctttgctttctgctctgcggcttcaacgaacgtaatctcaacatgtcgcgggtcgatgtctacaccactcattcccccgcgggaacctcagtgcagaatatgctccactggtcccaggctgtgaagtttcagaaattccaagcatttgactgggggtccagtgcaaagaattactttcattacaaccagtcctacccacctacttacaatgtgaaggacatgctggtgccgactgcagtgtggtcgggcggacatgattggttggctgatgtctatgacgtgaacattttgctgactcagataaccaacctggtctttcacgaaagcatacctgagtgggaacatctggatttcatttggggtttggatgcaccatggagactttacaataagattatcaacctgatgcgcaaataccaa

SEQ ID NO: 4838 - DNA, 1197 bp, Artificial Sequence
  derived and/or modified sequence
atgaagatgcgcttcctcggcctggtcgtttgtttggtgctgtggacccttcactcggagggatcccgcggcaagctcaccgcggtggacccagaaaccaacatgaatgtctcggaaatcatctcctactggggcttcccgagcgaggagtacctcgtcgaaactgaagatggatacatcctgtgcctgaatcgcattccgcatggaaggaagaatcactcggacaaaggcccaaagccggtcgtgttcctgcagcacggtttgctggctgactccagcaactgggtcactaacctcgccaactcaagcctgggatttatcctggcggacgcaggcttcgacgtgtggatgggcaactcccgcggtaacacttggtcccgcaaacacaagactctgtccgtctcacaggacgagttctgggcattttcgtatgacgagatggccaagtacgatcttccagcgtcaatcaactttatcctgaataagacgggacaggagcaggtgtactacgttggacactctcagggcaccacgatcgggttcatcgccttctcccagattccggaactcgccaagagaatcaagatgttctttgcgctgggcccggtcgctagtgtggccttctgcacctcgccgatggcgaaacttggacggttgccggaccatctgatcaaggacctctttggcgataaagaatttctcccccagagcgccttccttaaatggctgggaactcacgtgtgcacccatgttatcctgaaggaactttgcggtaacctctgctttctcctctgcggattcaatgaacggaacttgaacatgagcagggtggacgtgtacaccacccactccccggccggaaccagcgtgcaaaacatgctgcactggtcacaagcggtcaagtttcagaaattccaggcattcgattggggtagctcggcaaagaactacttccactacaaccagtcctaccctccgacttacaacgtgaaagatatgctggtgccgaccgctgtgtggtcaggaggacacgattggttggcagacgtgtacgacgtgaacatcctcctgacccagattactaacctcgtctttcacgagagcatcccagaatgggaacatctggacttcatctgggggcttgatgccccttggcgcctttacaataagatcatcaatctcatgcgcaaataccag

SEQ ID NO: 4839 - DNA, 1197 bp, Artificial Sequence
  derived and/or modified sequence
atgaagatgcgatttctggggctggtcgtctgtttggtgctttggacgctgcattcagaaggttcacgaggcaaacttactgccgtggaccctgagactaacatgaacgtgtcggagataatcagctattggggttttccgtcggaagaatatctcgtcgaaaccgaagatggctacatcctttgtctcaataggatccctcacggacgcaagaaccattcagataaaggccctaaacccgtcgtctttctgcagcacggcctgttggctgactcgtcgaattgggttactaaccttgccaattcgtccttgggatttatcctggcagacgctggttttgatgtgtggatgggaaatagccggggcaacacttggtcaagaaagcacaagaccttgtccgtgagccaggatgagttctgggcattttcgtacgacgaaatggcaaagtacgacctccctgcatcgataaacttcatcctcaataagacggggcaagaacaagtgtactacgtgggacattcccaaggaaccactataggttttatcgcgttttcacaaattcctgagctcgcaaagagaattaagatgttttttgcgctcgggcccgtggcctccgtggcattttgcacttcccctatggcaaagctgggcagactgcctgatcaccttatcaaggatctcttcggtgataaagagtttttgccacaatcggcgttccttaagtggctgggtacccatgtgtgcacccatgtgatacttaaagaactttgtggaaacctgtgctttctgctttgtgggttcaatgagcgtaacttgaatatgtcgcgcgtggatgtgtacaccactcattctccagcgggaacctcggtccagaatatgttgcattggtcacaagcagttaagttccaaaagttccaggccttcgattggggatccagcgcgaagaactacttccattacaaccaaagctacccaccaacctacaatgtgaaggacatgctggtgcccaccgccgtgtggtccggaggccatgactggctcgccgacgtttacgatgtgaacattctgttgacgcagattactaacctcgtttttcacgagtcgatccccgaatgggaacatctggatttcatatggggactggatgcaccgtggcgcctctacaacaagatcattaatcttatgcgaaaataccag

SEQ ID NO: 4840 - DNA, 1197 bp, Artificial Sequence
  derived and/or modified sequence
atgaaaatgcgttttcttggcttagtcgtgtgcctggttctatggacgcttcattccgaaggctctcggggaaagttaacagcggtcgatccagaaacaaatatgaacgtgagtgaaatcatatcctattggggctttccgtccgaggaatatttagtggaaacagaagacggatatattctttgtttaaataggattccgcatggaagaaaaaaccattcagataaaggcccgaagcctgtagtctttctgcagcatggccttcttgcggatagctccaattgggttacaaacctggctaattcttccctcggcttcattcttgcagatgctggctttgatgtatggatgggaaactcccgcggaaacacatggagtcgtaaacataaaacgctttctgtttctcaagacgagttctgggcttttagctacgatgaaatggccaaatatgacctgccggcatcaataaatttcatcctgaacaaaacgggtcaggaacaagtctattacgtgggtcacagccaaggtacgactattgggtttatcgcattttcgcaaattccggaattagcgaagcgcattaaaatgttttttgcgttaggccccgtagcctctgtggcattctgtacgtccccgatggctaagttaggcagattacccgaccatttaataaaggatttatttggggataaagaatttctcccacaaagcgcctttcttaaatggctaggcacacatgtttgcactcatgtaattctgaaagaactttgcggtaatttgtgctttttgttgtgtggatttaacgaacgtaacttaaatatgtcgagagttgatgtgtacacaactcacagcccggccggtacaagtgtgcagaacatgctacattggagccaagctgtgaagttccagaaatttcaggcctttgattggggatcgtctgcaaagaattatttccactacaatcaatcctacccgcctacctacaatgtcaaagacatgttagtaccgacagcagtttggagcgggggacatgattggttagcggatgtatatgacgtaaatatattacttacacaaattacgaaccttgtttttcatgaaagcatcccagaatgggaacatttggatttcatttgggggctagatgccccctggagattatataataagatcattaaccttatgcgaaaataccag

SEQ ID NO: 4841 - DNA, 1197 bp, Artificial Sequence
  derived and/or modified sequence
atgaaaatgcggttccttggtctggtggtgtgtctggttctgtggacactccacagtgaggggtccagaggaaagctgactgcagtggaccccgagacgaacatgaatgtcagcgagataatcagttattggggattccccagtgaagaatacctggttgagaccgaagacggctatatcctctgccttaaccggattccccatgggagaaagaaccactctgacaaaggccctaaacctgtagtgttcctgcagcacggtctcttggcggacagtagtaattgggtgaccaatctggccaactcttccctgggattcattctcgccgacgcaggctttgatgtctggatgggtaatagcaggggaaacacttggagtagaaaacacaaaacattgtccgttagccaggacgaattttgggccttcagttatgacgaaatggctaagtatgatctccccgcttcaatcaattttatcctgaataagacaggccaggagcaagtgtactacgtgggacactctcagggcaccacgatcggtttcattgccttctcacagattcctgagttggccaaaagaatcaaaatgtttttcgccctcgggcctgtggcaagcgtagcattttgcacttccccaatggccaaactcggccggctcccagaccatctcattaaggatttgtttggggataaagagttcctgccgcagtccgcttttctgaaatggctcggcacccatgtatgcacccatgtcatccttaaggaactgtgtggcaacttgtgtttcctgctgtgtggcttcaatgagcggaacctcaacatgtcaagggtggacgtctataccacccactcccccgcaggcacgtcagtccagaacatgctccattggagccaggctgtgaaattccagaagttccaagccttcgactggggtagctccgcaaagaactacttccattataatcagagctacccacctacttacaatgtgaaagacatgctggtgccgacggccgtgtggtcaggtggccatgactggctggcagatgtctatgatgttaatattctgctcacacaaataacaaacctggtgttccatgagtctatcccagagtgggaacacctcgattttatctggggcctcgatgctccctggagactgtacaacaaaattatcaatctgatgcggaagtaccag

SEQ ID NO: 4842 - DNA, 1197 bp, Artificial Sequence
  derived and/or modified sequence
atgaaaatgcgatttctcggcttggttgtgtgcctggtcctgtggaccctgcactcagagggcagtaggggcaaactgactgccgtcgatcctgagaccaacatgaacgttagcgagattataagttactggggcttcccatccgaagaatacttagttgagaccgaagacggctacatcctgtgcctgaatcggatacctcacggacgcaaaaatcatagtgacaaaggcccaaaaccagttgtgtttctgcagcatggtctgctggccgactccagcaactgggttacaaaccttgcaaattcttccctgggctttatactggccgatgctggctttgacgtgtggatgggcaacagccgcggtaatacttggtcaaggaagcacaaaacactgtctgtatctcaggatgaattttgggcattttcctatgacgagatggcaaagtatgatttgcccgccagcattaacttcatcttaaataaaactggccaggagcaagtgtactatgtgggccacagccaaggaaccaccattggatttatcgccttcagccaaatcccagagctcgcaaaaagaattaaaatgttcttcgccctggggcccgtcgcctccgttgccttctgcacatcaccaatggcaaagctcggccgcctgccagatcatctgataaaggacctatttggcgataaagaatttctgccgcaaagcgccttcctgaaatggctgggcacccacgtttgtacacatgttattctgaaagaactgtgtggcaacctgtgttttctgctctgcggctttaatgagcggaaccttaatatgagtcgcgtagacgtgtatacaacacacagccctgctggcacaagcgttcagaacatgctacactggagtcaggctgtgaagtttcagaaattccaggccttcgattggggaagttccgcaaaaaattactttcactacaatcagtcctatcctcctacatataacgtgaaggatatgcttgtccctaccgccgtatggtctggcggacatgattggctagccgacgtctacgatgtcaacatattgctgacacagataacaaatctcgtgttccacgagtccatcccagaatgggagcacctggacttcatttggggcctggacgctccttggcgactgtacaataaaataattaatctgatgaggaaataccaa

SEQ ID NO: 4843 - DNA, 1197 bp, Artificial Sequence
  derived and/or modified sequence
atgaagatgaggttcttgggactggtcgtctgcctggtgttgtggaccctgcatagtgaggggagtaggggaaaactcaccgcagttgaccccgaaacaaatatgaacgtatctgagatcatcagctactggggcttcccttcagaagagtacttagtcgaaacagaggatggctacatcttatgtctaaatcgcatcccccacgggcgcaaaaaccatagcgataaaggaccaaaacccgtcgtatttctccaacacggcttgctcgctgatagctccaactgggtgactaatctggcaaattcctctctagggttcatacttgcggacgccggtttcgacgtgtggatgggcaactccaggggtaacacttggagccggaagcacaagacactgagtgtgagtcaggatgagttctgggccttctcatacgatgaaatggccaagtacgaccttcccgcatctatcaactttatcttgaataagacaggtcaggagcaggtctattacgtgggacactcacagggcaccaccatcggattcattgcatttagccagatccctgagctggccaagaggatcaaaatgttttttgcgctcgggcctgttgctagcgtggctttttgtacttcacctatggcaaaactgggccgcttgcccgatcatctgatcaaagatctcttcggcgacaaagagtttctgccacagtcggcgtttctgaagtggctgggcacccacgtatgcacccacgtgatcttaaaagagctctgcggcaacttatgcttcttgctgtgcggattcaacgagcgtaacctcaacatgtccagagtggacgtgtatacaacacacagcccggcaggtactagtgtccagaatatgctgcactggagccaggcagtaaaattccaaaaatttcaggcctttgattgggggtcctctgctaagaactatttccactataaccagtcttacccgcctacttataacgttaaggatatgcttgtacccacggccgtatggagtggggggcatgattggcttgcagacgtttacgatgtcaatattctgctaacccagatcacaaacctggtgtttcatgagtcgattcccgaatgggagcatctcgactttatttggggtttggatgccccttggcgtttgtataataaaatcattaaccttatgaggaagtatcag

SEQ ID NO: 4844 - DNA, 1197 bp, Artificial Sequence
  derived and/or modified sequence
atgaagatgcggtttctcgggttggtcgtctgcctcgtcctgtggaccctccactccgaagggagccggggaaagttaacagcagtcgaccctgagacaaatatgaacgtgtccgaaatcatctcctactggggtttccctagcgaggaatacctggtcgaaaccgaggacggctacatactgtgtctgaatcgcatacctcatggaaggaaaaaccacagtgacaaggggccaaagcctgtggtttttctccagcacgggcttctggccgacagttcgaattgggtgacaaatctggcgaactcctcgctgggattcatcctagccgacgctggcttcgatgtgtggatgggcaactctaggggtaacacgtggagcaggaaacacaagacactctcagtcagccaagacgagttctgggcctttagctacgatgaaatggctaaatacgacctccccgcgtccatcaatttcatcttaaacaagacggggcaggaacaggtgtactatgtcggacattcacaaggtactacgatcggattcatcgcgttctcccagattcccgaactagccaaacggattaaaatgtttttcgcactgggtcctgtggcctcggttgcgttctgcaccagccctatggccaaactggggcggctgcccgaccacctgattaaggatctgttcggagacaaggaattcctcccacaaagcgcattcctgaagtggttgggtacacacgtttgtacccacgtcatcctgaaggaactatgtgggaatctctgttttctcctctgtggcttcaacgagaggaatctcaacatgtcccgagtcgatgtgtatactacgcacagcccagctggaacgtcagtgcagaatatgctgcactggtcacaggccgtgaagtttcagaagttccaagcattcgactggggctccagcgctaagaattacttccattacaatcagagctatccgccaacatataatgtgaaagatatgctggtgcctactgccgtgtggtccggtgggcacgactggttggcagacgtgtacgacgtgaacattttgctcacccagattacaaacttggtgtttcacgaatcgattccggagtgggagcatctggactttatatggggtctggacgcgccctggcgcttgtacaacaagatcattaatctgatgcgtaaatatcaa

SEQ ID NO: 4845 - DNA, 1197 bp, Artificial Sequence
  derived and/or modified sequence
atgaagatgcgcttccttggtttggtcgtgtgcctggtcctgtggactctgcactccgaagggtcgagaggaaaactgactgcggtggacccggaaaccaatatgaacgtgtccgaaatcatctcgtactggggctttcctagcgaggagtacctcgtcgaaaccgaagatggctacattctctgcctcaacaggattcctcatggacgcaagaatcactcggacaagggaccgaaaccggtcgtctttcttcagcacggtctgctcgcagatagcagcaactgggtcacgaacctcgctaactcatcactgggcttcatcctggctgacgcagggttcgacgtgtggatgggtaactcacggggaaatacttggtcacggaagcataagaccctgagcgtcagccaagacgagttctgggcgttctcgtacgatgaaatggccaaatacgatctgcctgccagcatcaatttcatcttgaacaaaacgggacaggaacaggtgtactacgtggggcacagccaaggaaccaccatcgggtttatcgcgttctcgcagatccctgaattggccaagagaatcaagatgttctttgctctgggaccagtagcaagtgtggccttctgcacgtcgccaatggcgaaactgggccggctcccggaccacctgatcaaggacctgttcggtgataaggagttcctcccgcagtcagcgttcctcaagtggttgggaacccacgtctgcactcatgtcatcctgaaagaactgtgtggtaatctgtgtttcctcctctgcggattcaacgagcgcaatttgaatatgtcccgagtcgacgtgtacactacccactccccagcaggcacctcggttcagaacatgctgcattggagtcaggcagtgaagttccaaaagttccaagccttcgactggggatcgtccgcaaagaactacttccactataaccaatcctacccgccgacctacaatgtcaaggacatgctcgtgccaaccgcagtgtggagtggaggacatgactggctcgcggacgtgtacgacgttaacatccttttgacgcagatcaccaacctggtgttccacgaaagcattccggagtgggagcacctggactttatctggggactcgacgcgccgtggcggctgtacaacaagatcatcaaccttatgcggaagtaccag

SEQ ID NO: 4846 - DNA, 1197 bp, Artificial Sequence
  derived and/or modified sequence
atgaagatgagatttctgggtttggtggtgtgtcttgtactttggactctccattcggaaggttcgcgtgggaaacttacggcggttgacccagagactaatatgaatgtgtcggagattatctcctactggggtttcccatccgaagagtacctcgtggaaactgaagatggctacatcctgtgcctcaacaggatcccacacggaaggaagaaccattccgacaagggacccaagccggtcgttttcttgcagcatggactgttggcagattcgtcaaattgggtgaccaatcttgccaattcgtccctgggtttcatactcgcagatgcaggttttgatgtgtggatgggaaatagcagagggaacacttggtcacggaagcacaaaaccctgtcggtgtcacaagacgaattttgggcattttcgtacgatgaaatggccaagtacgatctccctgcaagcataaacttcatcttgaacaagaccggtcaggagcaggtgtactacgtggggcattcccaaggtactactatcggctttatcgcatttagccaaatcccggaactggccaagcgaatcaagatgtttttcgcactggggcctgtggcgtctgtggcattctgcacttcccctatggccaagctgggcagacttcctgatcatctgattaaggatctgtttggagacaaggaattcctgccccagagcgcctttcttaagtggctggggacgcatgtgtgcacccatgtgatactgaaggagctctgtggcaacctgtgttttctgctttgtggatttaacgagcgaaatctgaacatgtccagggtggatgtgtacaccacccattccccagcaggtactagcgtgcaaaacatgctgcattggtcgcaggcagtgaagttccaaaagtttcaggccttcgattggggctcctcagcaaagaactattttcactacaatcagtcataccctcccacttacaacgtcaaggacatgctcgtgcctaccgctgtgtggagcggggggcatgactggctggcggatgtctacgatgtcaacatccttcttactcaaatcactaacctcgtctttcatgaatcaattccggaatgggagcatcttgactttatctggggtcttgacgcaccatggagactgtacaacaaaatcattaatctgatgcggaagtatcaa

SEQ ID NO: 4847 - DNA, 1197 bp, Artificial Sequence
  derived and/or modified sequence
atgaagatgcgttttctggggttagtagtctgtttggtgctgtggactctgcacagcgaagggtccagggggaagctgaccgccgttgaccccgagacgaatatgaatgtgagcgagattatctcatattgggggttcccctctgaggagtatctcgttgagacagaggacggctacatcctgtgcttgaaccggataccccacggacgcaagaatcattctgacaaggggccaaagcccgtcgtgttcttacagcatggactgctcgcggactcctccaactgggtcacgaacctggcgaactccagtttggggtttatcctagccgatgctggatttgacgtctggatgggaaacagtaggggaaacacatggagtaggaaacataagacactatccgtgagccaggatgagttctgggcttttagttacgatgaaatggccaagtacgatttacccgctagcatcaactttattctaaataagacaggccaggagcaggtttattacgtaggccactcacagggaaccacaatcggatttatcgccttttcacagatccccgagctagccaaacgtattaaaatgttctttgcacttggcccggtggcaagcgtggcgttttgcacaagcccaatggctaagcttgggagactccctgaccacttgatcaaggacctgttcggcgacaaagagtttctccctcagtctgccttcctgaagtggctcggcactcacgtctgtacccacgtgatcctgaaagagctctgtgggaatctttgctttctgctttgtggcttcaatgaacgcaacctgaacatgtctcgcgtggacgtctacactactcactcgccggccggcaccagcgtgcaaaacatgctgcactggagtcaggcagtgaagttccagaaattccaagcgttcgattggggctcaagtgccaagaactacttccattacaatcagtcgtatcctcctacttacaacgtcaaggatatgcttgtgcctacagccgtgtggagtggtgggcacgactggctggccgacgtgtatgacgtcaacatcctcctcacgcagatcacgaatctggtgttccacgagtccatacccgagtgggagcatctggatttcatttggggcctggatgcaccttggaggctgtacaacaagattattaatctcatgcgtaagtatcaa

SEQ ID NO: 4848 - DNA, 1197 bp, Artificial Sequence
  derived and/or modified sequence
atgaagatgcggttccttgggctcgtcgtgtgtttggttctgtggactctccatagcgagggttcacgcggcaagctgactgcggtcgacccagaaactaacatgaatgtgtccgagatcatctcgtattggggtttcccttccgaggaatacctggtcgagactgaagatggctacattctgtgcctcaacaggatcccgcatggaagaaagaatcactcggacaaggggcctaagccggtggtgtttctccagcatgggcttctcgcggattcatccaactgggtgactaacctggccaattcatccctgggattcatcttggctgatgccggattcgatgtgtggatgggaaactcgagaggcaacacttggtcgcgcaagcataagacgctctcagtctcacaagatgaattctgggcattctcgtacgatgaaatggcgaaatacgacctgccggcatcaatcaatttcatattgaacaaaactggacaggagcaggtgtactacgttggacactctcaaggaaccactatcggtttcatcgcattttcacagatcccggaacttgccaaacgcattaagatgttttttgccctgggaccagtcgcttcggtcgccttttgcaccagcccaatggcgaaactcgggcgcctgccggatcacttgattaaggacctgttcggcgacaaggaattcctgcctcaatccgccttcctgaagtggctcggaactcatgtctgcactcatgtgatcttgaaagaactgtgcggcaatctttgtttcctgctctgtggttttaacgagcgcaatctgaacatgtcaagagtcgacgtgtacaccactcattccccggcgggaacctccgtgcagaacatgcttcactggtcccaagcggtgaaattccagaagtttcaggcattcgactggggatcctccgctaaaaactacttccactacaatcagtcgtacccaccgacctataacgtcaaggatatgctggtgccgactgcggtgtggtccggaggacatgactggttggccgacgtgtatgacgtcaacatcctgctgacgcaaatcaccaatctcgtgttccacgagagcatccctgaatgggagcacctggactttatctggggactggacgccccttggcgcctgtataacaagattatcaatctcatgcggaagtaccag

SEQ ID NO: 4849 - DNA, 1197 bp, Artificial Sequence
  derived and/or modified sequence
atgaagatgcgttttcttgggttggttgtctgtctggtcctatggactttacattccgaggggtcgcgagggaaacttacagcagttgatccagaaactaatatgaatgtatccgagattatctcgtattggggtttcccgtctgaggaatacctcgttgagacagaagatggttacatcctctgtctgaaccgaatcccacacggccgtaagaatcattccgataaaggacctaaacctgttgtttttcttcagcatggtcttctagcagatagctcgaattgggttacgaatttggctaattccagtctggggtttatcctcgccgatgccggatttgatgtttggatgggtaacagccgtggtaatacatggagcagaaagcacaagactctatcagtttcacaagacgagttctgggcttttagctatgacgaaatggccaaatacgaccttcccgctagcattaacttcatcctcaacaagaccggtcaggagcaagtatactacgtagggcactctcaagggacgaccatcggcttcatcgctttctcacaaatcccggagttggctaagcgtatcaagatgttcttcgctttgggaccggttgcttccgtagctttctgcacgtcgcccatggcgaagctcggacggttacctgatcacctcattaaagatctgttcggtgataaggagtttctgccgcaatccgcgttcttgaagtggctcgggacccatgtttgtacgcacgtcatcctgaaggagttgtgcggaaatctttgctttctattatgcggattcaatgaaaggaatctcaacatgtcccgtgtcgatgtatatacaacccatagccctgctggtacttctgtccagaacatgctacattggagccaagccgtcaaattccagaaatttcaggctttcgattggggcagctcggctaagaattattttcattataatcagagctacccacctacctacaatgttaaggatatgcttgttcccaccgcagtctggtccggggggcatgattggttagcggacgtatacgacgttaacattcttcttactcaaatcacaaacctagtgttccacgagtctatccctgaatgggagcacctagattttatctggggtcttgacgcgccttggaggctctacaataagattattaaccttatgcgcaagtatcag

SEQ ID NO: 4850 - DNA, 1197 bp, Artificial Sequence
  derived and/or modified sequence
atgaaaatgcgtttcctggggctggtggtttgtctggtgctctggactctgcatagcgagggctcccgtgggaagctgaccgccgtggacccagagacgaatatgaatgtaagcgagattatctcctattggggattcccttcggaagagtatcttgttgagacagaggacggatacatcttgtgcctgaaccggattccccatggtcgcaagaatcattctgataaagggccaaaaccagtcgtgttcctacaacacggcttactggccgatagctctaactgggtgacgaacctcgctaatagcagccttggtttcatcctggccgatgccggattcgatgtgtggatggggaattctagggggaacacctggtctaggaaacacaagacattgagcgtctctcaggatgaattttgggctttctcctacgacgagatggccaagtatgacttaccagctagcatcaactttattttgaacaaaactggccaagagcaagtgtactacgtcggacatagccagggcactactatagggtttatcgccttttctcagatcccagagttggccaaacggatcaagatgttcttcgctctggggccggtcgccagcgtggctttttgcacctcaccaatggccaagctgggccgtctccccgaccacctgattaaagatttgtttggggacaaggaatttctaccacagtccgccttcctgaaatggttgggaacccacgtgtgtacccatgtgattctgaaagaactgtgtggcaatctttgcttccttctgtgtgggtttaacgagcggaatctcaatatgtcgcgtgtcgacgtctacacaactcacagcccagcaggaacaagtgtccagaatatgcttcactggagccaagctgtaaaatttcagaaattccaagctttcgattggggtagcagtgcgaaaaactatttccactacaaccagagttacccacccacatataacgtaaaggacatgctcgtccctaccgcggtctggtccggcggacacgactggttagctgacgtgtacgacgtgaatattctgcttactcaaattacgaatctggtgtttcatgagagcattcccgaatgggagcacctagactttatctgggggctcgatgccccatggagactttacaacaagataataaacctgatgcgtaagtaccag

SEQ ID NO: 4851 - DNA, 1197 bp, Artificial Sequence
  derived and/or modified sequence
atgaagatgcggtttttaggcctagtggtctgtctggtactctggacactacacagcgaagggagcagagggaagttaacagccgtggaccctgagaccaacatgaatgtctcagaaataatctcttactgggggtttccaagcgaagaatatctcgtggagacggaggacggctatatcttatgtcttaacaggattccgcacgggcgcaaaaaccacagcgataaggggcccaaacctgtggtgttcttacagcacggcttgctcgctgattcatctaattgggtcaccaatctcgccaactccagtctcggattcatcctagcagacgcaggtttcgacgtgtggatgggcaactcccggggaaacacgtggtcaaggaaacataaaaccctctctgtttcgcaggacgagttctgggccttttcatatgatgaaatggccaagtacgaccttcctgcctccatcaatttcatcctgaataaaaccgggcaggagcaggtctattatgtggggcactcacagggcaccaccattggattcatcgcattcagccaaattccagaactcgcaaaacgcatcaaaatgttttttgcacttggtccagtggcctcagtggccttctgcacatcaccgatggctaaactgggccgactgcccgaccacctgatcaaagacctgttcggagacaaggagttcttgccgcagtctgccttcttaaagtggttgggtacgcatgtgtgtactcacgtgattctcaaagaactgtgcggaaatctgtgttttcttctctgcgggttcaatgaacgaaacctgaacatgagtagagtcgatgtatacacgacgcactctcccgctggaacaagtgtccagaatatgctccactggagccaggcggtgaaatttcagaagttccaggcctttgattggggctcttccgcaaagaattattttcattacaatcaatcatatccaccaacctacaatgtgaaggatatgttggttccaacggcagtgtggtctggcgggcacgactggttagccgatgtatatgacgtaaacattctgctcactcagataacaaatcttgtctttcacgagagcatccccgagtgggaacacctcgattttatctggggtctggacgcgccatggagattatataacaagattatcaacctgatgcggaaataccag

SEQ ID NO: 4852 - DNA, 1197 bp, Artificial Sequence
  derived and/or modified sequence
atgaagatgcgctttcttggcttggtagtgtgtctggtgctgtggaccctacacagcgagggctccagggggaagctgacggccgtggaccccgaaaccaacatgaatgtgtcagaaatcatcagttattggggtttcccttccgaggaatacctcgtggagaccgaagacgggtacattctgtgcctgaatcgcatcccacacggcaggaagaatcattccgataaaggcccaaagccagttgtcttcttacagcacggactcctggccgattcgtctaattgggttacaaatctcgcgaatagttcattaggctttatccttgccgatgccggatttgatgtttggatgggtaactctcggggcaacacatggagccgcaaacacaaaacactgagtgtaagccaggacgagttctgggctttctcatacgacgagatggctaaatatgatctccccgcctccatcaattttatcctgaataagactggccaagagcaagtttattatgtggggcactcccagggtaccactataggatttatagctttcagccagatcccagagctggcgaaaagaatcaaaatgtttttcgccctgggtcccgtcgctagtgttgctttttgcacatccccaatggccaagcttggaaggctgccagaccacctgatcaaggacctgtttggcgataaagaatttctgccccaatctgcctttctcaagtggctcggaactcacgtgtgcacacacgtgatcttaaaggagttgtgtggcaatctgtgctttctactctgtgggttcaatgaaaggaacctgaacatgtcgcgggtcgatgtgtacactacacattcaccagcagggacctccgtacaaaatatgttgcactggagtcaggcggtgaagttccagaagtttcaagctttcgactggggatcgagcgcaaagaattatttccactacaaccagtcctatccacccacatataacgtgaaggatatgctggttccaacggcagtctggagtggcggccacgactggctggccgacgtctatgacgtgaacatcctgttgacccagatcacgaatctcgtttttcacgagtcgataccggagtgggagcatttggattttatttggggacttgatgccccatggaggctatacaacaagattatcaacctgatgaggaaataccag

SEQ ID NO: 4853 - DNA, 1197 bp, Artificial Sequence
  derived and/or modified sequence
atgaaaatgaggttcctgggacttgttgtgtgtctggtgctgtggactttgcattcagaaggaagccgaggaaagctcaccgcagtggaccccgaaactaacatgaatgtcagcgagataatcagctactgggggtttccatccgaagagtaccttgtcgaaactgaggatggttacattctttgtctgaatcgtattccgcacggacggaaaaaccatagcgataagggacccaagccagtggtgttcttgcaacatggcctccttgcggactcaagcaattgggttactaacctggcaaactcctcactgggctttatacttgccgatgcggggtttgacgtgtggatggggaactcgcgaggcaatacctggtcccggaaacacaaaaccctgtcggtgtcgcaagatgaattctgggcattctcgtacgacgagatggccaaatacgatttgccggcatccataaacttcatcctcaataagactggccaggaacaggtctactacgtcggtcatagccaaggaaccacgattggatttatcgcattttcccaaattcctgaattggctaaacggattaagatgtttttcgcattgggaccagttgcctccgtggcattttgtacctcgccaatggcaaagctgggacgccttcctgatcatctgattaaggatctgtttggggataaggagttcctccctcaatcagcattcctgaagtggttggggactcatgtgtgtacccacgtgatccttaaggaactttgcgggaacctttgctttctcctttgcggttttaacgaacgcaatctgaatatgtcgcgcgtggacgtgtacaccacccactcgccggcgggtacttcggtgcagaacatgctgcattggtcgcaggcagttaagtttcaaaagttccaggcattcgattggggatcgtcggccaagaactactttcactacaaccagtcgtaccctcccacctataatgtcaaggacatgcttgtcccaactgctgtctggtctggcggtcacgactggctggcagatgtgtacgatgtgaacattcttttgacgcagattaccaaccttgtctttcatgaatcgataccagagtgggaacaccttgactttatctggggcctggatgcgccttggcgactgtataacaaaatcatcaacctcatgcggaagtaccaa

SEQ ID NO: 4854 - DNA, 1197 bp, Artificial Sequence
  derived and/or modified sequence
atgaaaatgcggttccttggtcttgtggtgtgccttgtgctgtggactctccattcagaaggatctcgaggtaagctgacggcggtggacccggaaactaatatgaacgtgtcagaaatcatttcctactggggatttccctctgaagagtacctcgtggaaactgaagatggctatattctgtgtctcaaccgcatcccccatggacgcaagaatcactcggacaaaggcccgaagccagtggtgttccttcagcatgggttgctggcagattcgtcgaactgggtgaccaaccttgcaaactcctcattgggctttattctcgccgatgcggggtttgacgtctggatggggaactcgcgtggaaacacctggtcgcgaaagcataagacccttagcgtgtcgcaagatgaattctgggcattttcctacgacgaaatggccaagtacgatcttcctgcttcaataaactttatcctgaataagaccggacaagaacaagtctattatgtgggtcattcgcaaggaaccaccatagggtttatcgccttctcccagattcctgaactcgcaaagcgcattaagatgttttttgctctggggccagtggcatccgtggccttttgtacctccccgatggccaagctgggcagacttcccgaccatttgattaaggatctgttcggcgacaaggagtttcttccacaaagcgcgttccttaaatggcttggaacgcatgtctgtactcatgtgatactcaaagaactctgcggtaatctttgttttctgttgtgtggattcaacgaacgtaatctgaatatgtcaagagtggatgtctacacgacccattcccccgcaggtaccagcgtacagaatatgttgcactggtcgcaggcggtcaaattccaaaagtttcaagcatttgactggggttcgtccgcaaagaactactttcattacaatcaaagctaccctcctacttataacgtgaaggatatgctggtgcccaccgcagtgtggagtgggggccatgattggctcgctgatgtctacgatgtgaatattctgctgactcaaatcaccaacctggttttccatgaatcgatacctgaatgggaacaccttgacttcatttggggtctggatgcaccttggcgtttgtacaacaagatcattaacctgatgcgaaagtaccag

SEQ ID NO: 4855 - DNA, 1197 bp, Artificial Sequence
  derived and/or modified sequence
atgaagatgaggttcttgggactggtagtttgtctggtgctctggacactgcacagcgaaggctcacgcggcaagcttacagctgtcgatcccgagaccaacatgaacgttagcgagataatatcttactggggcttcccatcagaagaatacctggtggaaacagaggatggttacatactgtgcctcaataggatacctcacggaagaaaaaatcactctgacaagggacccaagcctgtcgtgttcctccaacacggccttctggccgattcatctaactgggtgaccaatcttgccaacagcagcttgggttttattctcgctgacgctggttttgacgtttggatgggaaattctaggggaaacacttggtcccgcaagcataagaccctgagtgtgagccaagacgaattttgggccttctcctacgatgagatggctaaatatgacctgcccgctagtattaacttcattctgaacaagaccggccaggagcaggtttactacgtgggacactcccaaggcactacaatcggtttcatcgccttttcacagattccagagctggccaaaaggatcaagatgttcttcgcgctcggtcctgtggcatccgtggccttttgcacgtccccaatggctaagctgggccgcctgcccgaccatctgattaaagacttgtttggagacaaggagttcctccctcagagtgccttcttgaagtggctcggtacccacgtgtgcacgcacgtcatcttgaaggaattgtgcggaaatctctgcttcctgctctgtggatttaacgagcgcaacctgaacatgtccagagtagacgtatataccacccactctccggccggtacctccgtgcagaacatgctccattggtcccaggccgtcaagttccagaagttccaagcattcgactggggctctagtgcgaagaattattttcattacaatcaatcttaccccccaacatacaacgttaaggacatgttggtcccgactgcggtgtggtccggtggccacgattggctcgcggatgtttacgacgtgaatatattgttgactcaaattactaacctggttttccatgagagtatacctgagtgggaacatctggatttcatttggggcttggacgctccttggaggctctacaacaagattatcaacttgatgagaaagtaccaa

SEQ ID NO: 4856 - DNA, 1197 bp, Artificial Sequence
  derived and/or modified sequence
atgaaaatgagattccttggactcgtggtgtgtctggtgctttggacgcttcattcggaggggtctcgcgggaagctgactgcagtcgaccctgagactaacatgaatgtcagcgagatcattagctactggggctttccctccgaggaatacctggtggagacagaagacggctatatcctttgtctcaaccggattcctcacgggcggaagaatcattcagataagggcccaaaacctgtagtgtttctgcagcatggcctgcttgccgacagttcgaactgggtgacaaatctggccaactcttctctggggttcatccttgcagacgcgggatttgatgtgtggatgggaaattctagaggcaatacatggagccgtaaacacaaaacactctccgtttcccaagacgaattttgggccttctcttacgacgagatggcaaaatatgacctccccgcaagcatcaacttcatattgaataaaaccggtcaagaacaggtgtattacgttggtcactcacagggcacaacaatcggctttatcgccttctctcagattccagaattggcaaaacggataaagatgtttttcgccctggggcccgtggcttctgtcgcattttgtacctcccctatggccaaacttggacgtctgcccgaccacctgatcaaagacttgttcggcgataaggagttcctgccccagtcagcgttcctgaagtggctgggaacacacgtctgtacccatgttattctcaaagaactctgcgggaacctatgttttctgctttgcgggtttaacgagcgcaatctgaatatgagtagagtggatgtctataccacacactccccggccggtacctccgtacagaacatgctccattggagccaggcggtaaagttccagaagttccaagcgtttgactgggggtcctcagctaagaactatttccactataatcagagttatccccctacatacaacgttaaagacatgctggtgcccacagccgtgtggagtggcgggcacgattggttagctgatgtctacgatgtaaatatccttttgacacagatcacgaacctggtgttccacgagagcatccccgagtgggagcacttggacttcatatggggtttggatgctccgtggcgattatataacaagatcataaaccttatgagaaaatatcag

SEQ ID NO: 4857 - DNA, 1197 bp, Artificial Sequence
  derived and/or modified sequence
atgaaaatgaggttcctgggccttgtggtgtgtctggtcctgtggaccctgcactccgaaggcagcagaggcaaactcactgctgtcgacccagaaacaaacatgaacgttagtgagattattagctattgggggttcccttccgaggagtatctggtcgaaacagaagacgggtacattctgtgcctgaaccgaatcccccacggcaggaagaaccattctgataaaggaccaaagcccgtcgtgtttttgcagcatggactccttgccgacagttccaattgggttactaatctggccaatagcagtctgggctttatcttagcagatgcgggattcgacgtttggatggggaattcacgcgggaatacctggtcccgtaaacataaaactctgtccgtttctcaggatgagttctgggcattttcttatgacgagatggccaaatatgacttacctgccagtattaacttcatactcaacaaaaccgggcaggagcaagtttactacgtgggccacagccagggtaccacaatcggttttatagcttttagccagatccccgaattggccaaaaggattaagatgttcttcgccctgggcccagtggccagcgtggcgttttgcacatccccaatggctaaactgggcagactgcctgaccacctcatcaaagacctgttcggggataaagaattcctgccccaatcggccttccttaaatggctgggcacccacgtgtgcacccacgtgattctgaaagaactgtgtggaaatctgtgctttctgctttgcgggtttaacgagcgaaacctgaacatgagcagggttgacgtttacacgacacattcccctgccggcaccagcgtgcagaatatgctacactggtcccaagccgtgaagtttcagaaatttcaagcattcgactggggttcgagcgcgaagaattacttccactataaccagtcatatccacctacatacaacgtgaaggatatgctggttccaacagcggtctggtcaggaggtcatgactggcttgcggatgtgtacgatgttaatattctgctcacacagataactaacctcgtttttcacgagagcatcccggagtgggaacatttggatttcatctggggtttggatgctccttggagactgtataataagattattaatcttatgagaaagtatcag

SEQ ID NO: 4858 - DNA, 1197 bp, Artificial Sequence
  derived and/or modified sequence
atgaagatgcgcttcttggggcttgtggtctgccttgttctctggactctgcactcggagggttcgagaggtaagctcaccgccgtcgaccccgagactaacatgaacgtttccgagatcatctcctactggggtttcccctcggaggagtacctggtagagaccgaagacggctacatcctgtgcctcaacaggataccgcacggacgcaagaaccactctgacaagggccccaaacctgtggtcttcctgcagcacggactgctcgctgactcttccaattgggtcactaacctcgcaaattccagcctcggtttcatcctagctgatgccggtttcgatgtgtggatgggtaactccagaggcaacacatggagccgcaagcacaagacgctctcggtcagccaggacgaattctgggcattctcctatgacgagatggctaagtatgacctgcctgcaagcatcaacttcattttgaacaagaccggccaggagcaagtgtactatgtcggccactcccagggtactacaattggctttatcgccttcagccaaatccccgagttggcaaaaaggatcaaaatgtttttcgctctgggtcctgtcgcctcggtggccttttgcaccagcccgatggcgaagctcggacgtctgcccgatcacctcattaaggatctctttggcgacaaagaattccttccccagtccgcgttcctgaagtggctcgggacgcacgtctgtacacacgttatcttaaaggagctgtgcggtaacctgtgtttccttctgtgcgggtttaacgagcgcaatcttaacatgagcagagtcgacgtctacaccacacactcacccgccggcacttctgtgcaaaatatgctgcattggtcccaggcggtgaaattccagaagttccaggccttcgattggggtagtagtgccaagaactacttccactacaaccagtcctaccccccgacatacaatgtcaaggatatgctcgtccctaccgcagtctggtccggtggccacgactggctggccgatgtctacgacgtaaacattctcttgacccaaataacgaacctcgttttccacgaatctattcctgagtgggagcatctcgatttcatctggggcttggacgcgccctggcgattgtataacaagatcattaatcttatgcgcaagtaccag

SEQ ID NO: 4859 - DNA, 1197 bp, Artificial Sequence
  derived and/or modified sequence
atgaaaatgcgctttctgggactcgtcgtctgccttgtgctgtggacccttcactccgagggcagccgcggaaaactgactgccgtcgatcctgaaactaacatgaacgtcagcgaaatcatctcctactgggggttcccatctgaagagtaccttgttgaaactgaggatgggtacattctttgcttgaatcgcatcccacatggaagaaagaatcactccgacaaaggacccaagccggtggtctttcttcagcatggactcctcgcagactcctcgaattgggtgacgaatctggccaactcgagcctcggcttcatcctcgctgatgccggctttgatgtgtggatgggaaactcacggggaaacacttggtcgcgtaaacacaaaacgctgtcagtttcacaagacgaattctgggcgttcagctacgatgaaatggcgaaatacgacctgcccgcttcaatcaatttcatcctcaacaagaccgggcaggaacaagtgtactatgtgggtcacagccagggcactaccattggattcattgccttctctcagattccggaacttgccaagagaatcaaaatgttcttcgcactgggtccggtcgcgtcggtcgcattctgtacctcaccgatggcaaaactcggccgcttgccggaccacctgatcaaggatttgttcggagataaggagttcctcccgcaatcagcattcctcaagtggttggggacgcatgtctgcacccatgtcatcctgaaggagctgtgtggaaatctgtgtttcttgctctgcggcttcaacgagaggaacttgaacatgtcgcgcgttgacgtgtacaccacccatagcccggccgggacctctgtgcagaatatgctgcactggtcgcaggctgtgaagtttcaaaagttccaggcctttgactggggaagctccgccaaaaactacttccactacaatcagtcatacccgccaacctacaatgtcaaggacatgctggtgccgactgcggtctggagcggcggtcacgactggctggccgacgtgtacgacgtgaatattctgctgactcagatcacgaatctggtgttccacgagtccatccctgaatgggaacatctcgactttatctggggactggacgcgccgtggcgcctgtacaacaaaatcattaacctgatgagaaaataccaa

SEQ ID NO: 4860 - DNA, 1197 bp, Artificial Sequence
  derived and/or modified sequence
atgaagatgcggttccttgggctggtggtgtgtctggtgctgtggaccctgcattccgaaggtagccgaggtaagttgacggcagtcgaccctgaaaccaacatgaatgtcagcgagatcattagctactggggcttccctagcgaagaatacctcgtggaaactgaggatggctacattttgtgtctcaaccgcattccacatgggagaaagaatcattcagataaaggaccgaagcccgtggtttttcttcaacatggactccttgccgattcatccaattgggtcactaacctggcaaactcgtcattgggattcattttggcagacgctgggtttgatgtctggatgggaaacagccgtgggaatacctggtcgcgaaagcacaagaccttgtcggtgtcccaagatgagttctgggcattttcgtacgatgagatggcgaaatatgatctgcctgcatcaattaactttatccttaacaagactggacaggaacaagtctattacgtgggccatagtcaaggaactactatcgggtttattgcatttagccagattcccgaacttgccaagcgaattaagatgtttttcgcactcggaccagtggcatccgtggcattctgtacgtcgccaatggcaaagttgggtagacttccggatcatctgattaaggacctgttcggagataaggaatttctgccccagtcggcgtttttgaaatggcttggtactcatgtgtgcacccacgtgattcttaaggaactgtgcggcaacctgtgttttcttctttgtggtttcaatgagcggaacctcaatatgagcagggtggatgtgtacacgacccactccccggctgggacttcggtccaaaacatgctccattggtcccaggccgtgaaatttcaaaagtttcaggcatttgactgggggtcaagcgccaagaactacttccactacaaccaatcgtaccctccaacctacaatgtcaaggacatgctggtgcctacggccgtgtggagcggcgggcacgattggcttgccgatgtgtacgatgtcaacattctcctgacccagatcactaaccttgtgtttcatgaatcgattccagaatgggaacacttggactttatctggggactggacgccccttggagactgtacaataagatcatcaacctcatgcgcaagtaccaa

SEQ ID NO: 4861 - DNA, 1197 bp, Artificial Sequence
  derived and/or modified sequence
atgaagatgaggtttctcggcctcgtcgtatgtctcgtcctgtggaccctccattccgaggggtcgaggggcaagttaaccgcagtggaccctgagaccaacatgaatgtgtccgagattatctcctattggggcttccctagcgaagagtatctggtggaaacagaagacggttacattttgtgcctgaatagaattccccatggccggaaaaatcactcggacaaggggccaaagcctgtggtgtttctgcagcatggacttctcgccgattcctctaactgggttacaaatttggccaatagttctttgggttttattttggccgatgctggatttgatgtgtggatgggaaactcccgcggtaatacctggagccgtaagcataagaccctctccgtgtcccaggatgaattttgggcgttttcttacgatgagatggccaagtatgacctgcccgcgagcatcaattttatccttaacaagacgggccaggagcaggtctactacgtgggccactcccaaggcaccactattgggtttatcgccttctctcaaatcccagaactggcaaaacggataaagatgtttttcgctctaggacccgtcgcaagcgtcgccttctgtacaagccccatggccaaactggggcgcctcccagatcatctcatcaaagacttatttggtgataaggagttcctgccgcagagcgctttcttaaagtggctcggtacgcatgtgtgtacacacgtcatactcaaggagttatgtggaaacttgtgctttttactgtgcggctttaatgaacgaaacctaaatatgtccagggtcgatgtttacacaacacatagtcccgcgggcacatccgtgcagaacatgctgcactggagccaagctgtgaagtttcagaagtttcaggcgttcgactggggatccagcgcgaagaactacttccactacaaccagtcttacccccccacctataatgtgaaagacatgcttgtaccaacagccgtgtggagtggaggacatgattggcttgcagatgtgtacgacgttaatatcctgctcactcagataactaacctcgtattccatgaaagtatacctgagtgggaacaccttgacttcatatgggggctcgacgccccttggaggctgtacaacaagatcataaaccttatgaggaaataccag

SEQ ID NO: 4862 - DNA, 1197 bp, Artificial Sequence
  derived and/or modified sequence
atgaagatgagattcctgggcctggttgtgtgcctcgtcctgtggactcttcatagcgaaggtagcagaggaaaacttactgcggtcgacccagagactaatatgaacgtgtcggagattatctcgtactggggttttccgtcagaagaatatctggtcgaaactgaggacggatacattctctgtctcaatcgcatccctcatggtcgcaagaaccactcagacaagggcccaaagccggtcgtgttcctgcagcatgggctgctcgccgatagctcaaactgggtgactaacctggccaactcgtcactcggattcatcctggctgatgcaggattcgatgtctggatgggcaacagccggggaaatacttggtcacgcaagcacaaaaccctgtcagtgtcgcaggacgagttctgggctttcagctacgatgaaatggccaagtacgatttgccagcctcaatcaatttcattctcaacaagactggccaggaacaagtgtattacgtcggacactcacagggaactaccatcggatttatcgcgttttcacagatcccggaacttgccaagcggatcaaaatgttcttcgctcttgggcccgttgcatcggtggcgttttgtacgtcacccatggcgaagctgggccggctgcccgatcatctgatcaaggacttgtttggcgacaaggagttcctgcctcaatccgctttcctcaagtggctcggtactcacgtgtgcacccacgtaatcctgaaggagctgtgcggaaatctctgttttctgctgtgtggattcaatgaaagaaacctcaatatgtccagggtggacgtgtacactacccactcgccagccggcacttcagtccagaacatgcttcactggtcccaggccgtgaagttccagaagttccaggcgttcgattggggttcttcggccaagaattacttccattacaaccagtcgtacccgccgacgtacaatgtgaaggacatgctggtccctaccgccgtgtggtcgggaggacacgattggctggctgacgtgtacgacgtgaatatcctgctcactcaaatcaccaacctggtgttccacgagtcaatcccagaatgggagcacctggatttcatctgggggctcgacgcgccttggaggctctacaacaagattatcaacctcatgagaaagtaccag

SEQ ID NO: 4863 - DNA, 1197 bp, Artificial Sequence
  derived and/or modified sequence
atgaagatgcggttcctgggactcgtggtgtgcctggtgctttggaccctgcactcggaaggttcgagaggaaagctgaccgcggtggacccagagactaatatgaacgtgtcagagatcatcagctactgggggtttccgtccgaggagtacctggtggaaaccgaagatggatacatcctgtgcttgaatcggattccgcacgggcgcaagaatcacagcgataaggggccgaagccagtggttttcctgcagcatggactgctggcagactccagcaattgggtgacgaacctggcgaattcctccctgggattcattctcgcagacgcgggattcgacgtgtggatgggcaactcaagggggaatacctggtcgcgtaagcacaagacgctgtcagtgtctcaggatgaattctgggccttctcctacgacgagatggccaaatacgatctgccggcctcaatcaacttcattctcaacaagactggacaggagcaagtgtactacgtgggacatagccaagggaccaccatcgggttcatcgccttctcacagatccctgagctggccaagaggatcaagatgttctttgcactcggaccagtcgcatccgtggccttttgcacctcaccgatggccaagctgggacgcctgcctgaccatctcattaaggacctgttcggagacaaagagttcctcccacaaagcgcgtttcttaagtggctgggcacccatgtctgcacgcatgtgatcctgaaagagctgtgcggaaacctctgcttcctcctgtgcggcttcaacgagcggaacctcaatatgtccagagtggacgtttacactactcacagcccagcaggcaccagcgtgcagaatatgctccactggagccaagcggtgaaattccaaaagttccaagccttcgattggggctcgtccgccaagaattactttcattacaaccaaagctaccctccgacttacaacgtcaaggacatgctggtgccaaccgcggtctggtccggaggacacgactggctcgctgacgtctacgacgtcaacattctgctcacccagatcactaatctggtctttcacgaatcgatcccggaatgggaacacctggacttcatttggggcttggacgcgccatggaggctttacaacaagataatcaacctcatgcgcaagtaccag

SEQ ID NO: 4864 - DNA, 1197 bp, Artificial Sequence
  derived and/or modified sequence
atgaagatgcggttcttgggcttagtggtgtgtctggttctgtggaccctgcactctgagggatcccggggcaagctcacggctgtcgatccagagaccaatatgaatgtttctgagatcatcagttattggggtttccctagcgaagaatatctggtggagacagaggacggttatatactctgcttgaacagaataccccacggacgcaagaaccactcagataagggtcctaaacctgtggtcttcctgcagcatggcttacttgccgactcctcaaattgggtaactaacttggccaattcttcccttggattcattctggccgatgccggattcgacgtctggatggggaattcacggggaaatacctggagcaggaagcacaagacgctgagtgtctcgcaggacgagttttgggcattttcatatgatgaaatggctaagtatgatctgcctgcttcaattaacttcattcttaacaaaaccggccaagaacaggtttactatgttggccactcacaggggacaaccattgggtttattgccttctctcaaatccccgaactggccaagcgcataaaaatgttttttgccttgggcccggtggccagcgttgctttctgcacttccccgatggccaaattaggacgtctgcctgaccatcttatcaaagaccttttcggcgacaaggagttcttgcctcaaagtgcttttctgaaatggctaggtacacacgtgtgtacccatgtgattctgaaagagctgtgtgggaacctatgtttcctactgtgtgggtttaacgaacgcaatctcaatatgtccagggtggacgtttataccactcatagccctgctggaacgtcggtgcagaatatgctgcactggtcacaggctgtcaagtttcaaaagttccaggccttcgattggggctcctcagctaaaaactatttccattataaccagagctaccctccaacatataacgtgaaagatatgctcgttcctaccgctgtatggtcaggcggccatgattggctagctgatgtttatgatgtcaacatactgctgacgcagattacgaacctggttttccatgaaagtattcccgagtgggaacacctcgatttcatatggggcttggacgccccatggcggctctataacaaaattatcaatttaatgcgaaaatatcag

SEQ ID NO: 4865 - DNA, 1197 bp, Artificial Sequence
  derived and/or modified sequence
atgaagatgagattcctgggtctggtggtctgtctggtgctctggactctgcactcagaaggttcccgaggaaagctgactgcagtcgatcccgagactaacatgaacgtgtccgagatcatttcgtactggggtttcccttccgaagagtaccttgtggaaaccgaagatggatacatactttgtcttaacaggatccctcacggaaggaagaatcattcggataaaggccctaagccagtcgtctttctgcagcatggactgctggcagactcatcgaattgggtcaccaaccttgcaaattcctcccttggattcatactcgcagatgcagggtttgatgtgtggatgggcaactctaggggtaacacctggtcacggaagcataagaccctctcagtcagccaggatgagttctgggcattttcatacgatgagatggccaaatacgatcttcctgcctccataaactttatcctgaacaagactggacaggaacaggtttactatgtgggacattcacagggaacgactatcggcttcatcgcattctcacaaattccagaattggcaaagcgcattaagatgttctttgcactgggacccgtggcttccgtggccttttgtaccagcccgatggcaaagctcggtaggctgcctgatcacttgattaaggatctttttggtgataaagaatttcttccacaaagcgcattccttaagtggctcggtacccatgtctgcacccatgtgattcttaaggaactttgcggaaacctgtgttttctgctgtgcggtttcaatgaaagaaacctgaatatgagcagagtggatgtgtacaccacccacagcccagccggaactagcgtccagaatatgctgcattggtcccaagccgtcaagtttcagaagtttcaggccttcgactgggggtcgtcagcaaagaactatttccactacaatcagtcataccctccaacttacaacgtcaaggatatgctcgtgccaaccgcagtgtggtcgggaggacatgattggctggccgacgtctacgatgtcaacattcttctgacgcaaattactaaccttgtgtttcatgagtccatcccggagtgggaacatttggacttcatttggggactggatgcaccatggagactctacaacaagatcatcaacctcatgcgtaagtaccag

SEQ ID NO: 4866 - DNA, 1197 bp, Artificial Sequence
  derived and/or modified sequence
atgaagatgcggtttctgggactggtggtgtgcctggtcctctggaccctccatagcgaaggctcccggggcaagctgactgccgtcgacccagagactaacatgaacgtgtcagaaatcatctcgtactggggattcccatccgaagagtacctcgtcgaaactgaggatggctacatcctgtgcctgaaccgaattccccatggccggaagaaccactccgacaaaggccccaagccggtcgtctttctccagcacggactcctggccgactctagcaactgggtcaccaaccttgcgaactcgtctcttggatttatcctcgcggatgcaggtttcgacgtgtggatgggaaacagccgggggaatacctggagcaggaagcataagactctgtcggtgtcacaagatgagttctgggccttcagctacgacgaaatggcaaaatacgatctgccagcttcaatcaatttcatcttgaataagaccgggcaggaacaggtctactacgtgggtcactcccagggcactaccattggattcattgccttcagccagatcccggagttggcgaagcggatcaagatgttcttcgccctgggtcctgtcgcttcggtcgcattttgtacctcgccgatggctaaactcggacggttgcctgaccacctgatcaaagacctctttggagacaaagagtttctgcctcaatccgctttcctgaagtggctggggacccatgtttgtacccacgtcattctgaaagaactgtgcggcaacctgtgcttcctcctgtgcggattcaacgagcgcaatctgaacatgtcacgcgtggacgtttacactacccattcaccagccggtacctctgtgcaaaacatgctgcattggtcccaggccgtgaaatttcagaagtttcaggccttcgactggggcagctcggcgaaaaactacttccactacaatcagtcgtacccgcctacctacaacgtgaaagatatgctggtgccaactgcagtctggtcgggcgggcatgactggctggctgacgtgtacgacgtgaatattctgcttacccagatcaccaacctcgtgttccacgagtcaatccccgagtgggaacatctcgatttcatctggggacttgacgccccgtggcgcctttacaataagattatcaacctgatgcgcaagtaccaa

SEQ ID NO: 4867 - DNA, 1197 bp, Artificial Sequence
  derived and/or modified sequence
atgaagatgcgatttttggggctagtggtgtgtctggtattgtggacactccactctgaaggctccagaggaaaactgacagccgtggaccccgaaaccaatatgaacgtgagtgaaataattagttactggggtttcccatctgaggagtacctcgtggagacggaagatgggtatatcctgtgtctcaatcggattccccatggccgaaagaaccactccgataaaggacctaagccagtggtgtttctgcagcacggtctgctggctgattcttctaattgggtgaccaacttagccaactcatccctcggatttatccttgctgacgccggattcgacgtgtggatgggtaactccagagggaatacttggagtcgcaagcacaaaacactttctgtgtcccaggatgagttctgggcgttctcctatgatgagatggccaagtatgacctgcctgcctccatcaactttatactgaataagactggccaggagcaggtatattatgtcggacacagtcagggtactacaatagggttcatcgcctttagccaaataccagagctggctaagaggatcaaaatgtttttcgcccttggccctgtggcttccgtggcgttttgtacatctcctatggccaagttgggtcgactgccagaccacctgatcaaggacctgttcggggacaaagagtttcttccacaatcggctttcctaaaatggttggggacccacgtgtgtactcacgtgatcctgaaggaattgtgcggaaacctgtgcttcctgctgtgcggcttcaacgaaaggaacctcaatatgagcagagtcgacgtgtataccactcattctcccgccggtacctccgtacagaatatgctccactggagccaagccgtgaagttccagaagttccaggctttcgactggggctcctcagctaaaaattacttccactacaatcagagctatccccccacatataacgtgaaagacatgttggttcccacagctgtgtggtctggtggacacgattggctggctgacgtttacgacgtgaatatcctcctaacccagataaccaatctcgtattccacgaaagcatccctgagtgggaacacctcgacttcatctggggattagatgcaccttggcggctctataacaaaatcattaacctgatgagaaagtatcag

SEQ ID NO: 4868 - DNA, 1197 bp, Artificial Sequence
  derived and/or modified sequence
atgaaaatgcggttccttggtctggtggtgtgtctcgtcctgtggactctccatagcgaaggatcgagaggtaagctgaccgccgtggatccagagactaatatgaacgtctcggagatcatatcatactggggctttccatcagaagaatacctggtggaaactgaagatggatacatcctgtgtcttaacaggatcccacatggtaggaaaaaccattcggacaagggtcccaagcctgtggtgtttcttcaacacggccttcttgcagactcctcaaattgggtgaccaacctggctaactcatcccttggattcatactcgcggatgcgggctttgacgtgtggatgggaaactcgcgcggaaatacctggtcgcgcaagcataaaactctgtcggtgtcgcaggacgagttctgggcttttagctacgatgagatggctaagtacgaccttcccgcctcaatcaactttatcctcaataagactggacaagagcaagtgtactacgtgggtcattcccagggtactaccatcgggtttatcgccttctcacagatccctgaactggcaaaaagaattaagatgttcttcgcgctcgggcctgtggcatccgtggcattttgtacctcccctatggcaaagctcggccggctcccggatcatctgattaaggatttgtttggagataaagaattcctccctcaatcagcctttctcaagtggcttggaacccatgtctgcacgcacgtgattctgaaagaactttgtgggaacctgtgttttttgctttgtggattcaacgagcggaaccttaacatgtcccgggtggatgtgtacaccactcactcccctgcagggacgtccgtgcagaacatgttgcactggtcacaagcagtgaagtttcaaaagtttcaagccttcgactggggttcaagcgcaaaaaactactttcactacaatcaatcctacccaccaacgtacaacgttaaggatatgcttgtgccaacggcggtgtggtcgggaggccatgattggcttgccgatgtgtacgatgtgaacattttgctgacccaaattactaacctggtttttcatgaatcgattcctgagtgggaacatcttgacttcatatggggtttggatgcaccctggcggttgtacaataagatcatcaacctgatgcgcaagtatcag

SEQ ID NO: 4869 - DNA, 1197 bp, Artificial Sequence
  derived and/or modified sequence
atgaaaatgcggttcttgggtctagttgtatgtctcgtcttgtggacactgcactcggaagggtcaagaggaaaactgaccgctgtggaccctgaaacaaatatgaatgtttcggagattatctcctattggggctttccttccgaggagtacctagtggaaactgaggatggctacatcttatgtctgaatcgcattcctcacggaagaaaaaaccactcagacaagggccccaagccagtggtcttccttcagcacggactactggccgacagcagtaactgggtgactaacttggctaactcttcgctcggattcatcctcgcagatgcaggttttgatgtctggatgggcaactctagaggcaacacgtggtcacgcaaacacaaaacgctctctgttagccaggatgaattctgggcattttcttatgatgagatggcaaaatatgacctgcccgcgtcaataaactttattctgaacaaaacgggccaggagcaggtgtactatgtaggacactcccagggtacgacaataggcttcattgccttctctcagatccccgagcttgcaaaaagaattaagatgttttttgcactgggtccagtggcttctgtcgcattttgtacctcgcctatggccaaactcgggcgcttgcccgaccacttgattaaagatctcttcggtgacaaggaatttcttccgcagtccgctttcctaaaatggctcgggactcacgtgtgcactcatgtcatcctgaaagagctatgcgggaacctgtgtttcctgctctgtggttttaatgagcgaaatctcaatatgagcagagtcgatgtgtacaccactcattcccctgcggggacaagtgtacagaacatgttgcattggtcccaggccgtgaagtttcaaaagttccaggcgtttgattggggaagtagcgcaaagaactactttcactataatcagagctaccctcctacgtacaacgtcaaagacatgctagtgcccacagcagtttggtctggtggtcatgactggctagcagacgtgtatgatgtgaacatacttttgactcaaatcacgaacctggtctttcatgagagcatccccgaatgggaacatcttgatttcatttggggtctggatgcaccctggaggctctataacaagataataaatctgatgcgcaagtaccag

SEQ ID NO: 4870 - DNA, 1197 bp, Artificial Sequence
  derived and/or modified sequence
atgaaaatgcgcttcctcggactcgtggtgtgcctggtgctttggactcttcactcggagggatcccgagggaagctcactgcggtggacccggagactaatatgaatgtctcggagatcatcagctattggggcttcccaagcgaagagtacctggtggaaaccgaggatgggtacatactctgcctgaaccgcatcccacatggaagaaagaaccactccgacaagggcccaaagcccgtagtgttcttgcagcacggactgctggctgacagctccaactgggttacgaatttggcgaactcgtccctgggattcattttggccgacgcgggcttcgacgtgtggatgggcaactcacgcgggaatacgtggtcacgcaaacacaagactctgtccgtctcccaggatgaattttgggcattctcctacgatgagatggcaaaatacgatctcccagcatcgataaacttcatcctgaataagactggtcaggagcaggtctactatgttggccactcccaaggtaccactataggctttattgcgttttcacagatcccggaactggccaagcggatcaagatgtttttcgctcttggaccggtggcctcggtggccttctgcacctcgccgatggccaagctggggagactgccggaccatctgatcaaagacctgttcggagacaaggaatttctgccgcagtccgctttcttgaaatggctgggcacgcatgtgtgcactcacgtgattctcaaggaactctgtggtaacctctgcttcttgctgtgcggcttcaatgaaaggaacctgaacatgtctcgcgtagatgtgtacaccacgcattcgcctgccggaacttcggtgcagaatatgcttcactggtcacaagcggtcaagttccaaaagttccaggcgttcgactggggatcgtcggcgaagaactatttccactacaaccaaagctacccgcccacctacaacgtcaaggatatgctcgtccctaccgctgtgtggagcggcggacacgattggctcgccgatgtgtacgacgtcaacatcctgctgacccaaatcactaaccttgtttttcatgaatcaatcccggaatgggagcatctcgactttatctggggactggacgccccttggcgcctgtacaacaaaatcatcaacctgatgcggaaataccaa

SEQ ID NO: 4871 - DNA, 1197 bp, Artificial Sequence
  derived and/or modified sequence
atgaagatgaggtttttgggcctcgtcgtctgtctcgtgctgtggacccttcattctgaaggtagccgcggaaaactgaccgcagtcgatccggaaaccaacatgaacgtttcagaaatcatatcgtactggggattcccttccgaagaatacctggttgagactgaagatggctatattctttgccttaacagaatccctcacggtaggaaaaaccactccgataaaggccccaagcccgtggtgtttcttcaacacggacttcttgcagattcctcaaactgggtgactaatttggctaattcgtccctcgggtttattcttgcagatgcaggttttgacgtttggatgggaaactcgcgggggaacacctggtcgcgcaaacacaagactcttagcgtgtcgcaggatgaattctgggcattctcgtacgatgaaatggcaaaatacgatctgcctgcatccattaactttattctcaacaagaccggccaggagcaggtctactacgtgggccactcccaaggtaccactatcggatttatcgcattctcacaaattcccgaattggccaagcgcatcaagatgttttttgcacttggcccagtggcctcagtcgctttttgcacttcaccaatggcaaaactgggtcgcctgcctgatcatctgataaaggatctgtttggagataaagaattcctgcctcaatccgcctttcttaaatggctgggaacgcacgtctgcactcacgtgatacttaaggagctctgtggaaatctgtgctttctcctgtgcggattcaatgagcgcaatctcaatatgagccgagtcgacgtgtacaccacccactctccggcagggacctcggtccagaatatgctgcattggtcgcaggcagtgaaatttcagaagtttcaagccttcgattggggcagctcagcaaagaattacttccattacaaccagtcgtacccgcccacctacaatgtgaaggacatgcttgtgcctactgcagtgtggtccggaggacacgactggttggctgatgtgtacgatgtgaacattctcctgacccagattactaatctcgtctttcatgaatcgatcccagaatgggaacatctggacttcatatgggggctggacgcaccatggagactgtacaacaagatcatcaatctgatgcgtaagtaccaa

SEQ ID NO: 4872 - DNA, 1197 bp, Artificial Sequence
  derived and/or modified sequence
atgaagatgcggtttctgggacttgtggtttgtctggtcctgtggacgttgcattcggaaggttcgagagggaaacttaccgccgtggatccagagacgaatatgaacgtctcagaaatcatttcgtactggggtttcccttccgaggaatacctggtggagactgaagatgggtacatcctgtgtctcaaccgcattccacatggacgtaagaaccattcggacaagggtcctaaaccagtggtgtttctgcaacacggcctccttgcagattcgtccaactgggtgactaacctggcaaactcctccctggggtttattcttgcagatgccggttttgacgtgtggatggggaactcacgtggaaatacctggtcccggaagcacaagaccctttcagtttcccaagatgagttttgggccttcagctacgatgaaatggcaaagtacgacctgcctgcctccattaacttcattcttaacaagaccggtcaagagcaggtgtactacgtcggccattcccaggggactaccatcggattcattgctttttctcaaatcccagagttggcaaaaaggattaagatgttttttgcacttggtcccgtggcaagcgtggctttttgtactagcccgatggcaaaacttggtcgcttgccagatcatctgattaaggacctctttggtgataaggaatttctgccacaatccgcatttctcaagtggttgggaactcatgtctgtacgcacgtcatcctgaaggaactttgtgggaacctgtgttttcttctctgtggctttaatgaaagaaaccttaacatgtccagggtggatgtgtatacgacgcatagccctgctggcacctcggtgcagaacatgcttcactggagccaggcagtgaagttccaaaagttccaggcatttgattggggatcaagcgcaaagaattacttccattacaatcaatcctacccgccaacctacaacgtgaaagatatgctggtccctaccgcggtgtggtcgggaggacacgattggttggcagatgtgtacgatgtgaacatcctgctgacccaaattaccaatctcgtctttcatgagagcatccccgaatgggagcatcttgacttcatttggggactggatgccccttggaggctttacaataagatcatcaacctgatgcgcaaataccaa

SEQ ID NO: 4873 - DNA, 1197 bp, Artificial Sequence
  derived and/or modified sequence
atgaagatgcgcttccttgggttggtggtatgtctagtgctgtggaccttgcattccgagggctcgcgaggcaagctcacggccgtggaccccgagaccaatatgaacgtgagcgagatcatttcgtattggggatttcctagcgaagagtatcttgtggaaaccgaagacggctacatcctctgtctgaacaggatcccccatggaagaaagaaccacagtgacaagggacccaagcccgttgtgttcctgcaacatggtctgcttgccgacagcagcaactgggtcaccaatctggccaactcttctctcggttttattctggccgatgcaggctttgatgtttggatgggaaactcgaggggcaatacctggtcacgaaagcataagactctgtccgtctcgcaggacgagttctgggctttctcatatgacgagatggccaaatatgacttgcccgcgtctattaatttcatcctcaataaaaccggccaagagcaagtctattacgtgggccatagccagggcacgaccatagggttcatcgccttctcccagatccccgaactggcaaagcggattaagatgtttttcgcccttggccctgtcgccagcgtcgctttctgtacgagtccaatggcgaaactgggacggctacccgaccacctgatcaaagatttgttcggcgataaagagtttctaccccagtcagccttccttaaatggctcggtacgcacgtgtgcacgcacgtgatccttaaggaactgtgcggcaatttatgtttcctgctttgtgggttcaacgagagaaatctcaatatgagccgggtcgatgtgtacactacccacagccctgcaggaacaagcgtccagaacatgctgcattggagccaagcggtgaaattccagaaattccaggccttcgactggggcagcagtgctaagaactacttccactataatcagtcatacccacccacgtacaatgttaaggatatgctcgttcccaccgccgtgtggtctggcgggcatgactggctcgcagacgtgtacgacgtgaatattctgctgacccagattacaaacctggtttttcatgagagtattcccgagtgggagcatctggactttatttggggactcgatgccccttggagactatacaacaagattattaatctcatgaggaagtatcag

SEQ ID NO: 4874 - DNA, 1197 bp, Artificial Sequence
  derived and/or modified sequence
atgaagatgcgttttctggggctggtggtctgtctcgtactttggacgttgcattcagaaggaagccgcggaaaactgactgcagtggatccagagactaacatgaatgtgagcgagatcatcagttattggggttttccatcggaagagtacttggtggagactgaagacggttacattctgtgcctgaatagaatccctcacggcaggaagaatcattcagacaaaggccctaaacctgtggtatttcttcaacacggattacttgcggactcctcaaattgggtgacaaatctggccaattcgtccttagggtttattctggcagatgcgggattcgacgtatggatgggaaactcacggggcaatacatggagtcggaaacacaaaaccctatccgtctcacaagacgagttttgggcattctcgtacgacgaaatggccaagtacgatctgcctgcatctattaactttatcctgaataagaccggacaggagcaggtgtattatgttgggcattcccaaggcaccactatagggtttatagcgttttcgcagatcccagaactggctaaacgcatcaagatgttttttgccctcggtcccgttgccagtgtggccttctgcacatctccaatggccaaactggggcgcctgcccgaccacctgattaaggacctctttggggataaagagttcctgccgcagagcgcctttttgaaatggctggggacacatgtatgtactcatgtgatacttaaagaactctgtggaaatctttgttttcttctctgtggcttcaacgagagaaacttgaacatgtcaagggttgatgtctatacaacccactcgccggctggcacttctgtgcagaatatgctgcattggtcccaggccgtgaaattccaaaagttccaggcatttgactggggttctagcgccaagaattactttcactataatcagtcatacccgcctacatataacgtgaaggacatgttagtcccgacagctgtgtggtccggcgggcacgattggttggccgatgtgtatgacgtcaacatcctcctcacccaaatcacgaatcttgtgttccacgagtccatccccgagtgggagcacctcgatttcatctgggggttggatgctccttggcggttgtacaacaaaatcattaatctgatgagaaagtaccag

SEQ ID NO: 4875 - DNA, 1197 bp, Artificial Sequence
  derived and/or modified sequence
atgaaaatgcgctttctgggactggtcgtctgtctggtcctgtggacgctgcactctgagggcagccgcggaaaacttaccgccgtggacccagagacgaatatgaacgtcagcgaaattatcagttactggggttttccctccgaggaatacctcgttgagactgaagacggatatattttgtgcctcaatcgtatccctcacggacgaaaaaaccatagcgataaggggcctaaacctgtcgttttcctgcagcatggtctgcttgccgattcgagtaactgggttactaacctggcaaattccagcttaggatttatcctggcagacgccggttttgacgtctggatgggaaatagcagggggaatacctggagccgtaaacataaaacactgagcgtgtcgcaagatgagttttgggccttttcctatgatgaaatggcaaaatacgacctcccggcttccattaattttatcctgaataaaacgggacaggagcaagtttattatgtcggtcattcccaaggcactaccatcggctttatcgcttttagccagattccggaattggcaaaacgtatcaagatgttctttgcgctgggcccagtagcaagcgtcgcattctgtacctccccgatggccaagctgggccgcctgccggaccacctgatcaaggacctgtttggtgataaagagttcctgccacaatcagcttttctgaaatggctcggtacacacgtgtgtacccatgtgattctcaaagagctgtgcggtaacttgtgctttctgctgtgcggattcaatgagaggaacctgaacatgagccgggtggacgtttacacgacccatagcccagccggcacctctgttcaaaatatgctgcattggagccaggctgtgaagttccagaagttccaggcatttgactggggtagctctgccaagaattattttcactataatcagtcatatcctccaacctataatgtcaaagacatgctagttccgaccgcagtgtggagcggtggacacgattggctggcagacgtgtacgatgtcaacattctgttgacccagatcaccaacctggtgttccacgaaagtatcccggagtgggagcacttggatttcatctggggtctggacgccccgtggcggctgtacaataagattatcaacctaatgcggaagtatcag

SEQ ID NO: 4876 - DNA, 1197 bp, Artificial Sequence
  derived and/or modified sequence
atgaaaatgcggttcttgggtctggtggtctgtctcgtactttggaccctccactccgagggttctagagggaagctgaccgcagttgatcctgaaacaaacatgaatgtgagcgagataataagttactggggctttcccagcgaagagtatctcgtggagactgaggacggctacatcctctgccttaaccgcatacctcacggccgaaagaatcacagcgataagggccctaaacctgtcgtctttttacaacatggattactggctgactcgagtaactgggtgactaatctcgctaatagctcactgggattcattctcgcagatgctggctttgatgtttggatgggcaacagtagaggcaatacatggtctcgcaaacacaagaccctctctgttagtcaagacgagttttgggcattctcatatgacgaaatggctaagtacgatttgccagcgagcattaactttattctgaataagacagggcaggagcaagtatactatgtcggtcacagccaaggcaccaccatcgggtttattgcgttttcacagatccctgagcttgccaagagaatcaagatgttctttgccctcggtccagtggcatccgtagctttctgcacgagtccaatggcaaagcttggcagactgccggaccacctcatcaaagatctgtttggcgataaagagttcctgccgcaatccgcttttctgaagtggttaggaactcatgtatgcacacatgtcattctcaaggaactatgcggtaatttatgctttctgttatgcgggtttaatgagagaaatttaaacatgtctcgcgtggatgtgtacacaacacacagtccagccggtactagcgtccaaaatatgctgcactggtctcaagccgtcaagtttcagaaatttcaggccttcgactgggggtcatctgctaagaattactttcactataaccagtcctatccacctacctacaacgttaaagatatgttggttccaaccgcggtgtggtcgggtgggcacgattggctggccgatgtgtacgacgtgaatatcctgctcacccaaatcaccaatctcgttttccacgagagcatcccagagtgggaacacttggatttcatttggggtctggatgcaccttggcggctgtataataagatcatcaatctcatgaggaaataccag

SEQ ID NO: 4877 - DNA, 1197 bp, Artificial Sequence
  derived and/or modified sequence
atgaagatgcgcttcctgggattggtcgtctgcctcgtgctgtggaccctgcactccgaggggtcccgcggcaaactcactgcagtcgaccctgagacgaacatgaatgtgtccgagatcatctcgtactggggcttcccttcagaagaatacctggtggaaaccgaagatggctacatcctgtgcctcaaccggattccgcatggacgaaagaaccactcagataaaggaccgaagccagtggtgttcctgcagcacggacttctggctgacagctccaactgggtcaccaacctcgctaattcttcactgggattcatcttggcggacgcgggtttcgacgtctggatgggcaactcccgcggtaatacttggagcagaaagcataagacgctgtcagtgtcgcaagatgagttttgggctttctcgtacgatgaaatggcaaagtacgacctgccagcctcgatcaacttcatccttaacaagaccggacaagagcaggtttactacgtgggccactcgcaaggaaccaccattggattcattgcattctcgcagatcccagaacttgccaagagaattaaaatgtttttcgccctgggccccgtcgcctccgtggccttttgtactagccctatggcgaaactggggagactcccagaccacctgatcaaggacctgttcggagacaaggagttcctcccgcagtccgcgttcctgaaatggctcggaactcacgtgtgcactcatgtgatcctgaaggaactgtgcggaaacctctgttttctgctctgcgggttcaacgagaggaatctcaatatgagccgcgtcgatgtttacactacccacagcccagcaggtacttcagtgcagaacatgttgcattggtcgcaggccgtaaagttccaaaagtttcaagccttcgactggggcagctcagctaaaaattattttcattacaatcagagctacccgccgacctacaacgtgaaggacatgctggtgccgactgcggtgtggtccggaggacatgactggcttgccgatgtgtacgacgtcaacatcctgctgacccagatcaccaatctcgtgttccacgagtcgatcccggaatgggaacacttggattttatctgggggttggatgccccctggcggctctataacaaaatcatcaatctgatgcggaagtaccag

SEQ ID NO: 4878 - DNA, 1197 bp, Artificial Sequence
  derived and/or modified sequence
atgaaaatgagatttctcggcctagtggtgtgcctcgtgttatggactcttcactcagaaggatcacgtgggaaattgaccgccgtggatccagagaccaatatgaatgtgtcagaaatcatcagctattggggatttcccagtgaagagtatttggtggaaaccgaggatggctacatcctctgcctcaaccgtatcccacatggacgcaaaaatcactccgataagggccctaaacctgtggtgttcctgcagcacggactgttagcagatagcagcaactgggtgaccaatctcgctaacagctctttgggttttatactcgcggacgctggcttcgacgtgtggatgggtaatagtaggggcaatacctggagtaggaagcacaagacactgtcggtgtcccaggacgagttctgggctttcagttacgatgaaatggctaagtacgatctgccagccagtattaactttatcttgaacaaaacaggccaagaacaggtgtactacgtgggccacagccaaggcacaaccatcggattcatcgctttctcccagatccctgagttggccaaaagaatcaagatgttcttcgctcttgggcccgtagcgagcgtggctttttgtacttctcctatggccaagctgggaaggttgcctgatcacctcatcaaggacttgtttggcgacaaggagttcctcccccaaagcgcctttctaaagtggctggggactcatgtatgcacacacgtcattctgaaagaactgtgcggcaacctctgcttcctgctatgcggcttcaacgagcggaacctgaatatgagtagagtcgatgtgtacaccactcactcgcccgcaggcacctcggtgcagaatatgttgcactggagccaggcagtcaaatttcaaaaattccaagccttcgactggggttccagcgctaaaaattactttcattacaaccagagctacccgcctacatacaatgtgaaggacatgttggttccaacggcggtctggtcagggggacatgattggttagctgatgtttacgatgtcaacatccttcttactcaaatcacgaacctggtgtttcatgagagtattcccgagtgggaacatttagactttatttggggacttgatgccccatggagactgtacaataagatcataaaccttatgcgtaaatatcag

SEQ ID NO: 4879 - DNA, 1197 bp, Artificial Sequence
  derived and/or modified sequence
atgaagatgcgctttttggggctggtcgtttgtctggtcctgtggacgttgcatagcgaggggtctaggggaaagctgactgctgtcgaccccgaaacgaacatgaacgtgagcgagattatcagctactggggctttccatcagaggagtatctggttgagacagaggatggatacatcctgtgcctgaaccgaattccccacggccgcaagaatcactccgataaaggcccaaagcccgtagtgtttctgcagcacggtctgttggctgactcatctaactgggtcaccaacttggccaattcatccctgggcttcattctggccgacgctgggttcgacgtgtggatgggtaacagcaggggcaacacatggagccgcaagcataagaccctttctgtgagtcaggatgaattctgggcttttagctatgatgagatggcgaagtatgacctgcccgccagcatcaattttatcctgaataagactggacaggagcaggtttactatgtggggcattcccagggtaccacgatcggcttcattgcattttcccagatccccgaattggccaaacggattaagatgttctttgctcttgggccagttgcaagcgtggctttctgtacctcaccgatggccaaactcggccgcttgccagatcaccttattaaagacctgtttggcgataaggagttcttgcctcaatccgcctttctgaagtggctgggcacccatgtatgcacacacgtgattcttaaggagctttgtggcaatctctgtttcctgctgtgtggcttcaacgaaaggaatctgaatatgtcaagagtcgatgtgtacacaacgcatagccctgcgggtacctcagttcagaatatgctccactggtcccaggctgtaaaattccaaaaattccaggcgtttgactgggggagcagcgctaagaattacttccactacaatcagtcctacccacctacatataacgtcaaggatatgctcgtccctaccgccgtatggagtgggggacacgactggctggcagacgtatatgatgtgaatattcttctgactcaaataacaaacctggttttccacgaaagtattcccgaatgggagcacctggacttcatttggggcttggacgcaccctggagattgtataacaaaattataaacctcatgcgaaaataccag

SEQ ID NO: 4880 - DNA, 1197 bp, Artificial Sequence
  derived and/or modified sequence
atgaagatgcggtttctgggtcttgtggtgtgtctggtactctggaccctgcattcagaggggagccgcgggaaattgaccgcagtagatccagaaacaaacatgaacgtgtccgaaattatatcatactggggcttcccttccgaggagtacctcgtcgaaacagaggacggctatatcctttgccttaataggattccgcatggacgcaagaatcacagtgataaagggccaaagccagttgtgtttttgcagcatggactactcgcagacagctctaactgggtgactaacctcgccaacagctctctgggctttatactcgctgacgccggtttcgacgtatggatgggcaattctagagggaatacatggtctcggaaacataaaactctatccgtaagtcaggatgagttctgggccttttcatacgacgagatggccaaatacgatctgcccgcaagtataaattttatactaaacaagacaggccaggagcaggtatactatgtgggtcacagtcagggtactacgatcgggttcatcgccttttcacaaattcctgaactcgccaagagaatcaagatgttttttgcacttggtccggtggccagcgtggccttctgcacaagtcccatggccaagttgggaagactgcccgatcatctcattaaagacctgttcggcgataaagagttcttgccccagtctgcctttctgaaatggctgggaacacatgtatgcacacatgtaatcctgaaggagttatgcggcaatctctgttttcttctttgtggctttaacgagagaaacctgaatatgtctagggtcgacgtgtatacaacccactcccctgcaggtacttctgtgcagaacatgctccattggtcacaagcggttaagttccagaagttccaggcttttgactgggggtcaagcgcaaaaaactactttcactataaccaaagttaccctccgacctacaacgtgaaagacatgttggtgcctaccgctgtatggtccggcggccatgactggctggccgacgtttatgatgttaatatcctactcactcagatcacaaatcttgtgttccacgagtccatcccggagtgggagcatctcgacttcatctggggattggatgccccctggagactgtataacaaaatcattaatctaatgcgtaagtaccaa

SEQ ID NO: 4881 - DNA, 1197 bp, Artificial Sequence
  derived and/or modified sequence
atgaaaatgagatttcttgggcttgttgtgtgtctagtgctgtggactctgcactctgagggcagccgcggcaaattgaccgcagtggaccctgagacgaacatgaacgtgagcgagatcattagctactggggcttcccaagcgaggagtacctggttgaaactgaggatggatacatcttgtgccttaacagaattccccatggccggaagaaccatagtgataagggacccaaacctgtggttttcctgcagcacggcctattagccgattctagcaactgggtgactaatttagccaatagttctctgggcttcatcctcgccgatgccggcttcgatgtttggatggggaacagcaggggaaacacatggtctcgtaagcacaaaactttgtccgtgagtcaggacgaattttgggccttttcctatgatgagatggctaaatatgacctgccagccagcataaactttatcctaaacaagaccggccaggagcaggtctactatgttggacacagtcaaggcacgacgattggatttatcgctttcagccagatcccggagctagcaaagcggatcaagatgttttttgccctggggcccgtagcctcagtagcattctgtacctcaccaatggccaaactgggacggctcccagaccatttaatcaaggacctgttcggggacaaggaatttcttcctcagtcggcatttttgaaatggcttggaactcacgtgtgcacacacgtgattcttaaggagctctgtggcaatttgtgcttcctgctgtgcggatttaacgagagaaacctgaatatgtcgagagtggatgtgtatacaactcattcccccgccggaacaagtgtgcaaaatatgctgcactggtcacaggcagtcaagtttcagaaattccaggcttttgattggggatcttccgcaaagaattacttccattacaatcagagttacccaccgacttataacgtaaaagacatgctggtcccgacagccgtctggtccggcggtcacgattggctggccgatgtgtacgacgtgaacatacttctcacacaaattacaaatttggtgtttcacgagtcaatcccggaatgggagcacttagatttcatctggggattagacgcaccgtggcgactctacaataaaattatcaacctgatgagaaagtatcaa

SEQ ID NO: 4882 - DNA, 1197 bp, Artificial Sequence
  derived and/or modified sequence
atgaaaatgaggttcctcggtctcgtcgtatgcctagttttgtggacccttcactccgaaggaagtagaggtaaactgactgcggtggatccagagaccaacatgaatgtctcagagattatctcctactgggggtttccctctgaggagtacctcgttgagaccgaagatggttatatcctatgtctcaaccgtatccctcatggaagaaagaatcatagtgataaagggcctaagccagtggtgttcttacaacatggattgcttgccgactcttccaactgggttaccaatttagcaaactcatcccttggatttatactggcagatgccggctttgatgtgtggatgggtaactctagaggcaacacgtggtctagaaagcataagacactgtctgtgtcacaagatgaattttgggcattttcatacgacgaaatggcaaagtatgatttgccagctagcatcaatttcatattaaacaaaaccgggcaagagcaagtctattacgtcggacattcccaagggacaacaatcggattcattgctttttcacaaattcccgaattggcaaagcggatcaagatgtttttcgcattaggtccagttgcttcggtcgctttctgcacaagcccgatggcgaaattggggaggctgcctgaccacttgatcaaagatctcttcggtgataaagagttcttgcctcagtctgccttcttaaaatggttgggaacacacgtttgcactcacgtcattcttaaagagttgtgtgggaatttgtgctttctgttatgtggctttaacgagcgtaacttaaatatgtctagagtggacgtttatacaacacattctccagctggtacgtctgttcagaatatgttgcactggtcacaagctgttaaattccaaaaatttcaagcattcgattggggaagttctgcaaagaactattttcattataatcagtcatatcccccaacctataacgtaaaagatatgcttgtccctaccgcggtttggagtggggggcatgattggttggctgatgtgtatgatgttaacatacttttgactcaaataacaaatctggtgtttcacgagtcgattcctgagtgggaacatttggattttatttggggactggatgcaccatggcgattatacaacaaaatcatcaaccttatgaggaagtatcaa

SEQ ID NO: 4883 - DNA, 1197 bp, Artificial Sequence
  derived and/or modified sequence
atgaaaatgcggttcctcgggctggtcgtgtgcctggtcctgtggaccctgcactcggagggatcgcggggaaagctgaccgctgtggatccggagactaatatgaacgtgtcggaaatcatttcatactggggattcccctcggaggaatatctggtggagactgaagatggctacatcctgtgtctcaatcggattccacatggacggaaaaaccactcggataagggacctaaaccggtggtgtttctgcagcatgggctcctggcagacagctccaactgggtcactaacctcgcaaattcaagcctcggattcatcctcgccgacgccggcttcgacgtctggatgggtaattcaagaggcaatacttggtcccggaaacacaaaacgctgtcggtttcgcaggacgaattctgggccttcagttacgatgaaatggcaaaatacgatctgccagcgtctatcaacttcattctgaacaagaccggacaggagcaagtgtactatgtggggcattcgcagggaactaccatcggatttatcgcattcagccagatccccgaacttgcgaaacgcatcaagatgttctttgccctgggtccggtggccagcgtggcgttctgtacctccccgatggccaagctgggacgacttccggatcatctgattaaagacctgttcggcgacaaggagttcctgccgcagagcgccttcttgaagtggctgggaactcatgtgtgcactcatgtgatcctcaaagaactctgcggaaatctttgcttccttctgtgcggctttaatgagcggaacctgaatatgtcgcgcgtggatgtgtacaccactcattcccctgccggcacttcggtccagaacatgttgcactggtcgcaggcagtgaagtttcaaaagtttcaagccttcgattggggatcgtctgctaagaattactttcactacaaccaatcttacccgcctacctacaatgtgaaggacatgctcgtccctacggcggtgtggagcggaggtcatgactggctggccgacgtgtatgacgtcaatattctgctgacccaaatcaccaatctcgtctttcacgaatcaatcccggagtgggaacatctggacttcatctggggccttgacgcaccttggcgcctctacaacaagatcatcaatttgatgcggaaataccag

SEQ ID NO: 4884 - DNA, 1197 bp, Artificial Sequence
  derived and/or modified sequence
atgaaaatgcgcttcttgggactggtcgtgtgcctggtgctgtggactctgcacagcgagggttcgcgggggaaattgaccgcagtcgaccctgagacgaatatgaatgtgtccgagatcattagctactgggggttcccgtcggaagaataccttgtcgaaaccgaggacggatatatcctgtgcctgaatcggatccctcacggaagaaagaaccattcagataagggtccgaaacccgtggtgttcctccagcacggcttgcttgcagacagctcgaactgggtaactaatttggccaactcctccctcggcttcatcttggcggacgcaggcttcgacgtttggatggggaattcgaggggaaacacctggtcacgcaagcataagaccctgtctgtcagccaagacgagttttgggccttctcttacgatgaaatggcaaaatacgatctgccggcctcgatcaatttcatacttaacaagaccggccaggaacaggtctattacgttggacactcgcaaggaacgaccatcggattcattgcgttctcacagatccctgaactcgcaaagaggatcaaaatgttctttgccttgggaccggtggcatcggtggccttctgcacgtcaccgatggctaagctgggaaggcttccagaccacctcattaaggatctttttggagataaggagttcctgccacagtcagcatttttgaagtggttggggactcacgtttgcacccacgtcattctgaaagagctgtgtggaaatctgtgttttctcctctgcggcttcaacgagcgcaacctcaatatgtcaagagtggacgtgtacacgacccattctcccgccggaactagtgtccaaaacatgctgcattggtcgcaagcagtgaagttccaaaagttccaggccttcgattggggatcgtctgccaagaattactttcactacaaccagtcctatcccccaacttacaacgtgaaggacatgctcgtccctaccgctgtgtggagcggcggtcatgattggttggcggacgtatacgacgtgaacatcctgctcactcaaatcaccaatctggtgtttcacgaatccatcccagaatgggaacatctcgacttcatctgggggctcgacgcgccgtggcggctgtacaacaagatcattaacctgatgcgaaaataccag

SEQ ID NO: 4885 - DNA, 1197 bp, Artificial Sequence
  derived and/or modified sequence
atgaagatgagatttttgggactggtggtttgcctggtcctctggaccttacactccgagggaagcagaggaaaattgacggctgtcgaccccgagacaaacatgaatgtcagcgagataatttcctattgggggtttccttcggaggagtacttggtcgagacagaagatggatacatcttgtgcctgaaccggatcccacacggacgtaaaaaccactctgataaaggccctaagccagtggtcttcctgcagcatggcctgttggctgactcttctaactgggtgactaatctggccaatagctcattggggtttattctggccgacgccggcttcgacgtgtggatgggcaactctagggggaacacatggagcaggaaacacaagacactcagtgtaagccaggacgaattctgggccttttcctatgacgaaatggcaaagtatgacctgccggcttccatcaatttcatcttgaacaagacaggacaggagcaggtctactacgtgggccacagccaggggactaccatcggcttcatagcattcagccagattcctgaactggcaaagcgaataaagatgttttttgcactgggcccggttgcctctgttgcgttctgtacatctccgatggcaaaactgggaaggctcccggaccacctcatcaaggatctgttcggagacaaggagtttctgccccaaagcgccttccttaagtggttgggcacccatgtctgcacacatgtgatcttaaaggaactgtgtggtaatctctgctttctcctgtgtggctttaatgagaggaatctgaacatgtccagagtggatgtatacacaacccattctcccgccggaaccagcgttcagaacatgctacactggagccaggccgttaagtttcagaaattccaggcttttgactggggttcgtctgccaaaaattattttcactacaatcagtcctatccccccacctacaacgtgaaggatatgctcgttccaaccgctgtgtggtccggaggacatgattggcttgcggacgtatacgatgttaatatactgttgacgcaaataacaaatcttgtgttccatgagagcatccccgagtgggaacacctcgactttatctgggggctggatgcaccctggcgattgtacaacaaaattatcaatctcatgagaaaataccag

SEQ ID NO: 4886 - DNA, 1197 bp, Artificial Sequence
  derived and/or modified sequence
atgaaaatgagattcctgggcctggtcgtatgtctcgtcctgtggacgctgcactcagaaggcagtcgcggaaagcttacagcagtagatcccgaaacgaatatgaacgtttccgagataattagttactggggcttcccatcagaagagtatcttgtagagacagaggacggttatattttgtgcctcaaccgcattccccatgggcggaaaaatcactctgataagggccccaagccagtggtgtttctgcagcatggtctgctggcagacagttcaaattgggtgaccaatcttgccaacagcagcctggggtttattctggctgacgcggggtttgacgtgtggatggggaacagtcgggggaacacctggtcaagaaagcataagactctctcagtcagtcaggacgaattctgggcttttagttatgacgaaatggctaaatacgatctgcccgcctctattaacttcattctgaataagacaggccaggagcaggtttactatgtcgggcattcccaggggacaacaatcggatttatcgcctttagtcagatcccagaactcgcaaagcgcattaagatgttttttgccttaggacctgtcgcttccgttgccttttgcacgagccctatggcgaaactgggtcgcctccccgatcacctgatcaaggatctgttcggagataaagaatttcttccacagagcgctttcctaaaatggctgggcacacacgtgtgtacccatgtgatactcaaagagctctgtgggaatttgtgttttcttctgtgcggcttcaacgagcgaaacctcaatatgtctcgagtggacgtctatacaactcattcacccgccggcacctccgtgcagaatatgctgcactggtctcaggccgtgaagttccagaagtttcaggctttcgactgggggagtagtgctaaaaattattttcactataaccaaagctatcctcctacatataatgtgaaagacatgctggttccaactgctgtctggtctggtggccatgactggctggctgacgtgtatgatgtgaatattcttctcactcagataacgaatctcgtgttccacgagagtatccctgaatgggaacatctagattttatttggggactcgacgccccatggcggctctacaacaagattattaatctgatgcggaagtatcag

SEQ ID NO: 4887 - DNA, 1197 bp, Artificial Sequence
  derived and/or modified sequence
atgaaaatgcgctttcttggattggttgtgtgcctggtcctctggactctgcactcggaagggtccaggggtaagctgactgcggttgatcctgagacgaacatgaacgtgagcgaaatcatctcctactggggcttcccctcggaagagtatctggtcgaaaccgaagatggatacattctctgtctgaaccggatacctcatggacgcaaaaaccattctgacaaaggcccgaagccggttgttttcttgcagcatggcctcctggctgattcatccaactgggtgaccaacctcgctaattcgagtctgggatttatcctggccgacgcggggttcgatgtctggatggggaattcgcgcggcaacacgtggtcacggaagcacaaaaccttgtcagtgagccaggacgagttctgggccttctcttatgacgaaatggctaaatacgatcttcctgcttcaatcaatttcatccttaacaagaccggacaggagcaggtgtactacgtcggacatagccaaggtaccaccatcggttttatcgccttcagccagatccctgaactggcgaagagaatcaagatgttcttcgcactgggaccggtggccagcgtggccttctgcacttccccgatggcgaaactcggccgcctgccggaccacctcatcaaggacctgttcggagacaaggagtttcttccacagtccgcttttctgaagtggcttggcactcacgtgtgcacccatgtgattctcaaggagctctgcggaaacctctgcttcttgctctgtgggtttaacgaaagaaatctgaatatgtcccgagtcgacgtgtacactacccactcgccagcaggaacctctgtgcaaaacatgttgcattggtcgcaagcagtgaagttccaaaagtttcaagcattcgactggggctcatccgcaaagaactacttccactacaaccagtcgtacccaccgacttacaacgttaaagacatgctggtgccaaccgcggtatggtcgggtgggcacgattggctcgccgatgtctacgatgtgaacattctgcttactcagataaccaatctcgtgtttcacgaatctatcccagagtgggagcacttggacttcatttggggcctcgacgccccatggagactttacaacaagatcatcaatcttatgcggaagtaccag

SEQ ID NO: 4888 - DNA, 1197 bp, Artificial Sequence
  derived and/or modified sequence
atgaagatgcgtttcctgggcctggttgtgtgtctggtcctctggaccctccattcagaaggctcccgtggcaaattgactgccgtggaccctgaaaccaatatgaacgtgtctgagatcatctcctactggggattccccagcgaggaatacctcgtggaaacagaggatggttacatcctgtgtctcaaccgcattccccacggacgtaagaaccacagtgataagggaccaaaaccagtagtgtttctgcagcacggactgctggcagactccagcaactgggttaccaacctcgcaaattcatctctgggattcatcctggctgacgcaggcttcgatgtctggatgggcaactccaggggcaacacttggagtcgtaagcataaaactctgtctgtgtcacaggacgagttctgggctttttcttacgacgagatggctaagtatgacctccctgcatccattaacttcatcctgaataagactggccaggaacaagtctattatgtaggacatagtcagggcactaccatcggtttcatcgccttctctcagatcccagagcttgctaagagaatcaagatgttcttcgctctcggtcctgtcgccagcgtggctttctgcacaagccccatggcaaagctgggacgcctgcctgaccacttgatcaaggatctctttggagataaggagtttcttccacagtccgcctttcttaagtggctgggtactcacgtatgcacacatgtcattctcaaggagctctgcggaaatctctgtttcctgctgtgtggattcaacgagaggaacctgaatatgagcagggttgatgtgtacaccactcatagtccagccggcacctctgtgcaaaatatgttgcattggtcacaggctgtcaagttccagaaattccaggcctttgattggggctccagtgccaagaattacttccactacaaccaatcttatccaccaacttacaatgtcaaggatatgttggtacctacagcagtgtggtcaggtggtcatgattggctcgccgatgtctacgatgtgaacatcctcctgactcagataaccaacctggtcttccacgaatccataccagagtgggagcacctggattttatttggggcctggatgccccttggagactttataataagatcattaatcttatgcgcaagtaccaa

SEQ ID NO: 4889 - DNA, 1197 bp, Artificial Sequence
  derived and/or modified sequence
atgaaaatgagatttctgggactcgtggtttgcctagttctctggacactgcatagtgaggggtcaagaggaaagctgacggccgtggaccccgaaactaacatgaacgtgtccgaaatcatctcttactggggcttcccaagcgaggagtatctagtggagacagaagacgggtacatcttgtgtctaaatcgtatcccgcatggacgaaaaaaccactccgataagggccccaaacctgtggtgtttctacagcacggtctgttagccgattcctccaactgggtgaccaacctcgcaaactcttccctcggcttcattctggccgatgccggctttgacgtgtggatggggaattcccggggaaacacttggagtagaaagcacaagactctgtccgtatcccaagatgaattttgggccttttcttacgatgaaatggcaaagtatgatcttcccgcctcaatcaatttcatactgaacaagaccggccaggagcaggtgtattatgtaggccacagtcaaggcacaacgatagggttcattgccttttctcagatccccgaactggccaaaagaatcaagatgttctttgccttgggacccgtggccagcgtagctttctgcacttctccgatggcaaagttagggcgcctccccgaccacctgatcaaagatctgttcggcgacaaagagttccttccacagtccgcttttctgaagtggttgggcacacacgtgtgtacacacgtcatcctgaaagagctgtgcgggaacctgtgtttcctcctgtgtggtttcaatgagaggaatctgaatatgtctcgagtggacgtgtacaccacccactcacctgctgggacatccgtgcaaaacatgcttcactggagtcaggcggtgaagtttcagaaattccaagcgttcgattgggggtctagtgccaaaaattactttcactacaatcagtcatatcctcctacatataatgttaaagatatgctagtaccaaccgccgtgtggtcagggggccacgattggcttgccgatgtgtatgacgtgaacattttgttgactcaaattacaaacttggtgttccatgagtctatacccgaatgggagcacctggatttcatctggggtttagatgccccgtggagactgtataacaagatcattaatctgatgagaaaataccag

SEQ ID NO: 4890 - DNA, 1197 bp, Artificial Sequence
  derived and/or modified sequence
atgaagatgagatttctgggactggtggtttgcctcgtgttgtggaccctgcattccgagggatcgagggggaagctcaccgcggtggatccggaaaccaacatgaatgtgtcagagatcatctcatactgggggttcccttcggaagagtatctggtggaaactgaggacggctacatcctctgcctgaaccggatccctcatggacggaagaatcattccgataagggaccaaaaccggtggtgttcctgcagcacggcctcctggcggattcctccaattgggtgaccaacctcgccaacagcagcctcggattcatcctggcagacgcgggattcgacgtctggatgggtaacagccggggaaacacctggtcccgcaaacacaaaactttgtcggtgtcgcaggacgaattctgggctttctcatatgatgagatggccaaatacgacctgccggcctccatcaatttcattctgaacaaaaccggacaggaacaggtgtactacgtggggcactcacagggaactactatcggattcattgccttctcccagatccccgagctggcgaagcggatcaaaatgttcttcgcccttggaccagtggcctcagtcgccttctgtaccagccccatggcaaagttggggagactgccagatcatctgatcaaagaccttttcggcgacaaggagtttctgccccaatcggccttcctcaagtggctggggacccatgtgtgcacccacgtgatcctgaaggagctgtgcgggaacctgtgtttcctgctgtgcggctttaatgaaaggaacctgaatatgagccgcgtcgatgtctacactactcactccccggcggggacctctgtgcagaatatgctgcactggtcacaagccgtcaagtttcaaaagttccaggcttttgactggggatcctcggcgaagaactacttccattacaatcagtcctacccacctacttataacgtgaaagacatgctcgtcccgactgccgtgtggtccggagggcatgactggctggcagacgtctacgatgtgaacatcttgctgacccaaatcactaacctggtgttccatgaatcaatcccggaatgggaacacctggacttcatctggggactcgacgccccttggcgcctctacaacaagatcattaatctgatgaggaaataccag

SEQ ID NO: 4891 - DNA, 1197 bp, Artificial Sequence
  derived and/or modified sequence
atgaaaatgcgtttccttggattggtggtctgcctggtgctgtggacgctgcactcggagggtagcaggggaaagctcaccgccgtggatccagaaactaatatgaacgtcagcgagattatctcatactgggggtttccgtcagaggaatatctcgtggagactgaagatggatacattctttgcctgaatcgtatcccgcatggtcgcaaaaatcactcggacaagggacccaagccagtggtgtttcttcagcatggactccttgcagattcgtcgaattgggtcacgaacctcgcaaattcctcgctgggtttcattctggcagatgcaggattcgatgtgtggatgggcaacagccgagggaacacttggtccagaaaacataagactctctccgtgagccaggatgaattttgggcatttagctacgatgaaatggcgaagtacgatctcccagcctcgatcaactttattctgaataagactggacaagaacaggtgtactacgtgggtcattcacaagggaccacgatcggtttcatcgccttttcgcagatcccagagctggcaaagagaataaagatgtttttcgcgcttggacctgtcgcgtccgtggctttctgcacgtcgcctatggctaagctgggtcggctgccagatcatcttatcaaagatttgtttggagataaggaatttcttccgcaatccgccttcctgaagtggcttggcacgcatgtttgtactcatgtgattctgaaagagctgtgtgggaatctctgttttctgctgtgtggatttaacgagagaaatctcaacatgtcaagggttgatgtctacaccactcactcaccagcaggaacctccgtccaaaacatgctgcactggagccaggccgtcaagtttcaaaagtttcaggcatttgattggggttcgagcgcaaagaactactttcactacaaccagtcgtaccctccaacttataacgtgaaggacatgctcgttcctactgcagtctggtcgggtggtcatgactggctcgcggacgtgtacgatgtgaacatcctccttacgcaaatcaccaacctggtgtttcacgaaagcattccagagtgggaacacctggatttcatatgggggctggatgcgccctggaggctgtacaacaagattatcaaccttatgcgaaagtaccaa

SEQ ID NO: 4892 - DNA, 1197 bp, Artificial Sequence
  derived and/or modified sequence
atgaagatgcgcttcttgggcctggtggtgtgtctggtgctgtggactctccactccgagggatcgcggggcaagctgactgcggtggatcccgagactaacatgaacgtcagtgagatcatcagctactggggtttcccgtcagaagagtacctggtggaaactgaagacggatacatcctctgcttgaacaggatcccgcacggcagaaagaaccacagcgataagggcccgaagcctgtggtgttcctgcaacacggactcctggcggattcttccaactgggtgaccaatctggccaattcctcgctgggttttattctggccgacgccggctttgatgtgtggatgggcaattcacgcggaaacacttggtcacgcaaacacaagaccctgtccgtgagccaggatgaattctgggctttctcgtatgacgaaatggcaaaatacgacctgccggctagcatcaatttcatcctgaacaaaaccggacaggaacaagtgtactatgtcggacattctcaggggaccactatcggatttatcgcgtttagccagatacccgagcttgctaagcgcatcaagatgttcttcgccctgggccctgtggcctccgttgcattctgcacctcgccaatggccaagctcggaaggttgcccgatcatctcatcaaggatctgtttggcgataaggaattcctcccacaatcggcattcctgaaatggctggggacccacgtgtgtacccacgtgattctgaaggaactttgcggaaacctctgtttcttgctttgcggctttaacgaaagaaatctgaacatgtcccgggtggacgtgtacactacgcactcccctgcaggaacctctgtgcagaatatgctgcattggtcgcaggccgtgaagtttcaaaagttccaagcgttcgattggggctcatcggccaagaattacttccattacaatcaatcctaccccccgacctacaatgtgaaggatatgcttgtgcctacggcggtgtggtccggaggacatgattggctggcagatgtctacgatgtcaacattctcctcacccagatcaccaacctcgtgttccacgaatcgatccctgaatgggagcatctggatttcatctggggactcgatgccccgtggcgcctgtacaataagatcatcaatctcatgcgcaagtaccaa

SEQ ID NO: 4893 - DNA, 1197 bp, Artificial Sequence
  derived and/or modified sequence
atgaaaatgcgctttctcggcctggtggtctgtctcgtgctgtggactttgcactcagagggctcgagggggaagctcactgcagtcgatccagaaaccaacatgaacgtgtcagaaatcatcagctactggggcttcccgtcggaggagtatctggtggaaacggaggacggatacatcctctgcctcaaccgtatcccacacggacggaagaatcactcggacaaaggaccgaaaccggtggtgttcctgcaacatggcctcctggccgactcttcaaactgggtgaccaatctggcaaatagcagcctgggtttcatcctggcggatgcggggttcgatgtttggatgggtaacagccggggtaatacctggtcacggaagcataagactttgtccgtgtcgcaggatgagttctgggctttcagctacgacgaaatggccaagtacgatctgccggccagcatcaactttattcttaacaagactggacaggagcaggtctactacgtgggacactcccagggaaccactatcggatttatcgccttttcgcaaatcccggaattggcaaagcgcatcaagatgttttttgcccttggccctgtggcgtccgtggcgttttgcacttctccgatggccaagctcgggagactgccggatcatttgatcaaagacctgttcggggataaagaattcctcccacagtcggccttcctgaagtggctcggtactcacgtgtgcactcacgtgatcttgaaggaactctgcggaaacctgtgcttcctcctctgcgggttcaacgaaaggaacctcaatatgagcagagtggatgtctacactacccattccccggcgggaacttccgttcagaacatgctgcactggtcacaggcggtgaagttccagaagttccaggcctttgattggggctcctccgccaagaactacttccactacaatcaatcgtacccaccaacttacaacgtaaaggacatgctggtcccgacggctgtgtggtcaggaggacatgattggctggcagatgtctacgatgtcaacattctccttacgcaaatcactaacctcgtctttcacgaatccatccctgaatgggagcacctggatttcatctggggtcttgacgccccatggcggctctataacaaaatcatcaacctcatgaggaagtatcag

SEQ ID NO: 4894 - DNA, 1197 bp, Artificial Sequence
  derived and/or modified sequence
atgaagatgcgcttcctgggactggtcgtctgccttgtgctctggactctgcacagcgagggaagcaggggtaagctgaccgccgtggacccagagactaatatgaatgtgtcggagatcatctcctattggggcttcccaagcgaggaatacctggtggaaaccgaggacggctatatcctctgcctgaaccgtatcccacacgggcgcaaaaaccactcggacaagggcccgaagccggttgtgtttctccagcacggactcctcgccgacagctcgaactgggtgaccaacctggccaactcctcccttgggttcatcctggccgacgcgggattcgatgtgtggatgggaaactcccggggaaacacctggtcgcgcaagcataaaaccctgtcggtgtcgcaggatgaattctgggcgttcagttacgacgagatggcaaagtacgatttgccggcgtcgatcaacttcatcctgaacaaaacgggtcaagagcaggtgtactatgtgggacattcacaggggaccactattggattcatcgcattctcacagatcccggagctggcgaaacggatcaagatgtttttcgcactcggaccagtggcctcagtcgcattctgcacttcccctatggcgaagctgggcagattgccagaccacctgatcaaagacctgttcggggacaaggagttcctgccccaatcggcgtttttgaaatggttgggaacccacgtgtgtacccacgtgatcctgaaagaactgtgtggaaatttgtgcttccttctgtgcgggttcaatgaaagaaatttgaacatgtcgcgagtggatgtctacaccacccatagcccagcaggcacctccgtgcaaaacatgcttcattggtcccaagcagtcaagttccagaagtttcaagcgttcgattggggatcctctgccaagaactactttcattacaaccagtcgtaccccccgacttacaatgtgaaggacatgctggtccctaccgccgtctggtccgggggccatgattggttggcggatgtgtacgatgtcaacatcctgctcactcaaattactaacctggtgttccacgaatccatccccgaatgggaacatctggatttcatctggggcctcgacgccccgtggagactttacaacaagatcatcaacctgatgagaaagtatcaa

SEQ ID NO: 4895 - DNA, 1197 bp, Artificial Sequence
  derived and/or modified sequence
atgaaaatgaggtttcttgggctggtagtttgtttagtactatggacactgcactctgagggaagtcgcggaaagctaacagctgtagacccagaaactaacatgaatgtgtcagaaatcatatcttattggggatttccctctgaagaatatctcgtcgaaacagaagatggatatatcctctgtttgaatcggattccccatgggcggaaaaatcattctgataaaggacctaaacccgtggtgttccttcagcacggactcctcgctgattcttctaattgggttacaaaccttgccaattcctctcttgggtttatcttggctgatgcagggttcgatgtatggatgggaaattctagggggaatacttggtctagaaagcataaaacattgtcagtgtcccaagatgaattttgggccttctcatacgacgaaatggctaagtacgatttgcctgcatcaatcaacttcattttaaacaaaacagggcaggaacaggtgtattatgtcgggcactctcaggggacaactattggattcatcgctttctctcagataccagaacttgcgaaaagaatcaagatgttcttcgcacttggacctgtagcttcagtggcgttctgcacgagtccaatggccaaactgggaagacttcccgatcacctcattaaagatttgttcggggacaaagaatttctaccccagagtgcattccttaaatggctagggacacacgtgtgtactcacgtgattctcaaagaattatgtggaaatctctgttttcttctctgtgggtttaacgaacgaaaccttaacatgtcgagggtggacgtatatacaactcattctcccgcagggacatcagtacagaatatgcttcactggagtcaggctgtaaagtttcagaaattccaggctttcgattggggatcttccgcaaaaaattacttccattataaccagtcctatcctcccacttacaacgtgaaagatatgctggtgccaactgcagtatggtcagggggacacgattggttggctgatgtctatgatgtcaatatattgctcactcagatcacaaaccttgtgtttcacgaatccatccccgaatgggagcacctcgacttcatctggggactcgatgcaccctggcggctgtataacaaaattattaacctcatgcggaaatatcag

SEQ ID NO: 4896 - DNA, 1197 bp, Artificial Sequence
  derived and/or modified sequence
atgaagatgcgcttcctaggtctagtggtgtgtctggtactgtggacactgcattccgaaggctcacgtggcaaactgaccgccgtggatcccgagacgaacatgaatgtttcagagatcatttcctattggggattcccttccgaggagtatctcgtggagaccgaagatggctacattctgtgcttaaatcgcattccccacggaaggaagaatcactcagataaaggtcctaaaccagtggtgtttctgcaacacggactactggccgactcgagtaactgggttaccaacctggccaattcaagcttgggcttcatactcgccgatgctggctttgacgtttggatgggtaattcgcgtggaaacacttggtcgcgtaagcataagacgctgtcggtgtctcaagacgagttttgggcgttttcgtacgatgaaatggccaagtacgatttgcccgcgagtatcaactttatcctgaataagacgggccaggaacaagtttactatgtgggccacagccagggtaccacaatcggtttcatcgccttctcgcagatcccagagctagctaagcggataaaaatgttcttcgccctaggccctgtggcatccgttgccttttgcacatcgcccatggcaaagctgggcagactgcccgaccatctgataaaggacttgttcggggacaaagaatttctgccacaaagtgcctttctgaagtggctcggaacgcacgtctgcacccacgtgatcttgaaagaactgtgtggcaacctgtgcttcctgctctgtggcttcaatgagcggaatctgaatatgagtcgggtcgacgtatatacgacacactcaccggccggaacttccgttcagaacatgcttcattggagccaggctgtcaaatttcagaaatttcaggctttcgactggggcagtagtgccaagaattatttccactacaaccagagctacccgccgacctacaacgtgaaggacatgcttgtgccgaccgccgtgtggtccggcggccatgattggctggccgacgtctacgatgttaacattctgctgacccaaatcaccaatctcgtgttccacgagtccattcctgagtgggagcatctcgatttcatctggggacttgatgccccgtggcggctgtacaataagatcatcaatctgatgcgaaagtatcag

SEQ ID NO: 4897 - DNA, 1197 bp, Artificial Sequence
  derived and/or modified sequence
atgaaaatgcgatttctcggtctggttgtgtgtcttgttctctggaccctgcactcggaagggagccgggggaagttgacggcagtcgatcctgagactaatatgaacgtgtcggaaatcatctcgtattggggatttccttcagaggaatacttggtggaaactgaagatggatacattctttgccttaaccgaatcccacatggtagaaagaaccattcagacaagggacccaagccggtggtgtttcttcagcatggactcctggccgattcgtcgaactgggtcactaatcttgcgaattcatctctgggctttattctcgcagacgcgggctttgatgtctggatgggcaattcgcgcggcaacacctggtcgaggaagcacaagactctttcagtgagtcaagatgagttttgggcgttcagttacgatgagatggcgaaatacgacctgcccgcatcgatcaatttcatattgaacaagactggccaggaacaagtgtactacgtgggtcactcccaggggaccacgattggcttcatcgcattctctcaaattcctgaattggccaagagaattaagatgttttttgcgctggggcccgtggcatcagtggcattctgcacctccccaatggcaaaactgggaaggctgccagatcatctcataaaggacctttttggggataaggagtttctcccacaatcagcatttctcaaatggctgggtactcatgtctgcacccatgtaatcctcaaggaactctgtggaaatctttgttttcttctttgtggtttcaatgaacggaacctgaatatgtcgagagtggatgtttacacgactcattccccagcagggacctcggtgcagaacatgcttcactggtcgcaagccgtgaagttccagaaatttcaagcctttgattggggaagctccgcaaagaattacttccattacaaccagtcataccctcctacctacaatgtcaaagatatgctggtgcctaccgccgtctggtcaggaggacatgattggctggctgacgtgtacgacgtgaacatactgctgacgcaaattactaaccttgtctttcatgaatctattccagagtgggagcacctcgactttatctggggattggatgcgccatggcggctgtacaacaagatcattaacctgatgcggaagtaccag

SEQ ID NO: 4898 - DNA, 1197 bp, Artificial Sequence
  derived and/or modified sequence
atgaagatgagatttctgggattagtggtgtgtttagtgctttggacactacattctgagggatctagaggaaagctgacagctgtcgatcccgagacaaacatgaacgtctctgaaatcatcagctattggggttttcctagcgaagagtacctcgtcgagacggaagatgggtatattctgtgtctcaataggatcccacacggccgcaaaaatcactctgacaaaggccctaagcctgtggtgttcctccaacatggactgctggcggattcctctaattgggtgactaaccttgccaactccagtctggggtttatcctggcggacgcaggctttgatgtgtggatgggaaactcaagaggcaatacatggagtaggaaacataaaaccctctctgttagtcaggatgagttctgggcatttagctacgacgaaatggctaaatacgatctgccagcttctatcaactttattctcaataagactggacaagaacaggtgtactacgttgggcacagccaaggcaccaccatcggatttatcgcgttcagtcagattccagaactggccaagagaatcaaaatgttttttgctctcgggcctgtggcctccgtggccttttgtaccagccccatggccaagcttggaagactccctgatcatctgatcaaggatctgtttggagataaagaatttttgcctcagtcagcgttccttaagtggctcgggacccatgtctgcactcatgtgattttgaaagagctctgtggaaacctatgtttcctgctgtgtggttttaatgaacgaaatcttaacatgtcacgcgtagatgtgtatacaacccactcacctgccggcacgagcgtgcagaatatgcttcactggtcccaggccgtcaaattccaaaaattccaggcctttgattggggcagcagcgccaaaaactatttccactataatcagtcatacccccccacatacaacgttaaagacatgctggtgcctacggctgtctggtctgggggtcacgactggttggctgacgtttatgatgtgaacatattgctaacacagataacaaacctcgtgtttcacgagagcatccctgaatgggaacacctggatttcatttggggcctggacgctccatggagactgtacaacaagatcattaacctgatgaggaaatatcaa

SEQ ID NO: 4899 - DNA, 1197 bp, Artificial Sequence
  derived and/or modified sequence
atgaagatgagatttcttgggctggtcgtgtgcctcgtgctttggacccttcactccgaagggtcgagaggtaagctcactgctgtcgatcctgaaactaacatgaacgtctccgagatcatttcgtactggggttttcccagcgaggagtaccttgtggaaaccgaggatggttacatcttgtgcctcaaccgcattcctcatgggagaaagaatcactccgacaagggacccaagccagtggtctttcttcaacatggccttcttgcagattcatccaactgggtcactaacctggcaaactcctcattgggctttatcctggccgacgcaggttttgacgtgtggatgggaaattcacgggggaacacctggtccaggaagcacaaaactctgtcagtgtcgcaagatgaattttgggcgttctcctacgacgaaatggcaaagtacgatcttcctgcatcaatcaactttattctgaataagaccggacaagaacaagtgtattacgtgggtcactcgcaaggtaccaccattggtttcattgcttttagtcagataccagaactggccaagcgaattaagatgtttttcgctctgggtcctgtggcatccgttgcattctgtacttcaccaatggcgaaattgggcaggctccctgaccatttgattaaggacctctttggagacaaggaatttctcccacagagcgcctttttgaagtggcttggcacccacgtgtgcacgcacgtcatcctgaaggaactctgtgggaacctgtgttttcttttgtgtggcttcaacgaaaggaatctcaacatgtcgagagtggacgtttataccactcattcaccagctggaaccagcgttcaaaacatgcttcattggtcgcaagccgtcaaattccagaaatttcaagcattcgattggggttcatcagcgaagaattacttccactacaaccaatcgtaccctcctacctacaatgtgaaggatatgcttgtgccaacggcagtttggtcgggtggtcacgattggctggccgatgtgtatgacgtgaatattctgctcactcagatcaccaatcttgtgtttcacgaaagcattcccgaatgggaacatctggatttcatttggggtctggatgcaccctggagactgtacaataagatcatcaacctcatgcgcaagtaccag

SEQ ID NO: 4900 - DNA, 1197 bp, Artificial Sequence
  derived and/or modified sequence
atgaaaatgcgatttttaggtctagtagtttgtttagttttatggacgttacattcggaaggttcgcgtggtaaactaacggcggttgatccggaaacgaatatgaatgtttcggaaataatatcgtattggggttttccgtcggaagaatatctagtagaaacggaagatggttatatattatgtctaaatcgtataccgcatggtcgtaaaaatcattcggataaaggtccgaaaccggtagtttttttacaacatggtttattagcggattcgtcgaattgggtaacgaatctagcgaattcgtcgctaggttttatactagcggatgcgggttttgatgtatggatgggtaattcgcgtggtaatacgtggtcgcgtaaacataaaacgctatcggtttcgcaagatgaattttgggcgttttcgtatgatgaaatggcgaaatatgatttaccggcgtcgataaattttatattaaataaaacgggtcaagaacaagtatattatgttggtcattcgcaaggtacgacgataggttttatagcgttttcgcaaataccggaactagcgaaacgtataaaaatgttttttgcgttaggtccggttgcgtcggtagcgttttgtacgtcgccgatggcgaaattaggtcgtctaccggatcatttaataaaagatctatttggtgataaagaatttttaccgcaatcggcgtttctaaaatggttaggtacgcatgtttgtacgcatgtaatactaaaagaactatgtggtaatttatgttttttactatgtggttttaatgaacgaaatttaaatatgtcgcgagtagatgtatatacgacgcattcgccggcgggtacgtcggttcaaaatatgctacattggtcgcaagcggtaaaatttcaaaaatttcaagcgtttgattggggttcgtcggcgaaaaattattttcattataatcaatcgtatccgccgacgtataatgtaaaagatatgctagttccgacggcggtatggtcgggtggtcatgattggttagcggatgtatatgatgtaaatatactactaacgcaaataacgaatttagtatttcatgaatcgataccggaatgggaacatctagattttatatggggtctagatgcgccgtggcgtttatataataaaataataaatctaatgcgaaaatatcaa

SEQ ID NO: 4901 - DNA, 1197 bp, Artificial Sequence
  derived and/or modified sequence
atgaagatgcgcttcctggggctggtggtgtgtcttgtactctggactctgcactctgagggctcacgtggtaagctgaccgccgtggatcccgaaacgaacatgaatgtatctgagataatttcttactgggggttccctagtgaggaatatctggttgagaccgaagacggctacatcctatgcttaaacagaattccacacggccggaaaaaccacagtgataagggaccaaaacctgttgtatttctgcagcatggactcctggcagatagtagtaattgggtgacaaacttggccaactcctccttgggcttcattctcgctgatgctggtttcgatgtgtggatgggcaactcgcgagggaacacctggtctcggaaacacaagaccctgtcggttagccaggacgaattctgggccttcagttatgacgagatggccaaatacgacctgcccgctagtatcaacttcattcttaacaaaactgggcaggagcaggtgtattatgtgggacacagtcagggaacaacaatcggatttatcgccttcagccagatccctgaactggccaagcggattaaaatgttttttgccctgggccccgttgcttctgtggcattctgcacatccccaatggccaagctcgggaggttaccagatcacctgatcaaggacctgtttggcgataaggagtttctaccgcagtcagcatttctaaagtggcttgggacacacgtgtgtacccacgtgattctaaaggagttgtgcggtaacttgtgcttcctcctgtgcgggttcaatgagcgcaatctcaacatgtcccgtgtcgacgtgtacacaacacattcgcctgctgggacatcagttcagaatatgctacactggagccaagccgttaaatttcaaaaattccaggccttcgactggggttccagtgctaagaactatttccactataaccagagctatccaccaacttacaatgttaaggacatgctagtgcctactgccgtgtggagtgggggtcatgactggctggccgatgtgtatgacgtaaacatactactgacccagatcaccaatcttgtgttccatgagtcaataccagagtgggagcacctagactttatatgggggctggacgccccatggcgactttacaacaaaatcataaatttgatgaggaaatatcag

SEQ ID NO: 4902 - DNA, 1197 bp, Artificial Sequence
  derived and/or modified sequence
atgaaaatgaggtttttaggattggtggtatgtctcgtgttgtggaccctgcactccgagggctctcgcggaaagctaactgctgttgacccggaaacgaatatgaatgtgagcgagatcatctcttactggggcttcccctccgaggagtatctagtggagacggaagatgggtatattctgtgtttgaatcggatcccacacgggcggaaaaaccattccgataaggggccgaagccggtagtattcttgcagcacggcttgttagccgactcatctaactgggtcacaaacctcgcgaacagctcgctcggattcattctggctgatgccggcttcgacgtctggatgggtaattctcgggggaacacatggagccggaaacacaaaacactatctgtgtcccaggatgagttttgggctttcagctatgatgagatggccaagtacgatttgcctgctagtatcaacttcatcctcaacaagacaggccaggaacaagtttattatgtgggccactcacagggcactaccatcgggttcatcgctttctcccagattcccgagctcgcaaagcgaatcaaaatgttttttgccctcggccctgtggcttccgttgccttctgtacctcccccatggctaaactcgggcggcttcccgaccacctgattaaggacctgtttggggacaaggagtttcttccccagtcagcattcctcaagtggctgggcacacacgtatgcacacacgtgatactcaaggagctttgtggaaatctgtgtttcctgctgtgcggcttcaacgaacgcaacctcaatatgtcccgggtcgatgtttacaccacccacagtccggccggcaccagcgtgcagaatatgttacattggtcccaagctgtcaaatttcagaagttccaggcttttgactggggctctagtgcaaagaattatttccattataatcaaagttatccccccacttacaacgtgaaggacatgctagtgccgaccgcagtgtggtctggaggtcacgactggctggccgacgtgtatgacgtgaatattctcctcactcagatcactaacctggtgtttcatgaaagcatccctgagtgggagcacctggacttcatatggggattggacgcaccctggaggctgtacaataagattataaacctcatgcgaaagtaccag

SEQ ID NO: 4903 - DNA, 1197 bp, Artificial Sequence
  derived and/or modified sequence
atgaaaatgaggtttcttggactggtcgtctgcctagtactttggacattgcactcggagggttctcggggaaagctaactgccgtggatccagagaccaacatgaatgtgagtgagattatctcctactggggatttccgtcggaggaatatttggtggaaactgaagacggttacattctctgtcttaatcgaatcccacacggacgtaagaatcactcagacaagggcccaaagcctgtggtattcttacaacacggactactagccgattccagcaactgggttacaaaccttgccaattcatcattgggatttattctggcagatgcaggcttcgatgtgtggatgggtaatagtcgaggtaatacttggtctcgtaagcacaaaactttgtcagtttctcaagatgaattctgggcattttcctatgacgaaatggcaaaatatgatctcccagcatcgatcaattttatacttaataagactggacaggaacaagtttactacgtcggacactctcaaggtactacgatcggattcattgcattttcacagatcccagagttggctaagaggattaagatgttcttcgctctcggaccggtggcttcagtggctttttgcacctctccaatggccaaacttggacgacttccagaccatttgattaaggatttgttcggagataaagaatttctcccacagtcagcctttttgaagtggttgggaactcacgtttgtactcatgttattcttaaagagctatgtggaaacctttgctttttgctttgtggattcaatgaacgaaacttaaatatgtctcgagttgatgtctataccactcattctccagcaggtacgtcagtgcagaacatgctgcactggagtcaagcagtcaagttccagaaatttcaagcgttcgattggggatcttctgctaagaactactttcactataatcaaagctaccctccaacatataatgttaaagatatgttggttccaactgctgtctggtctggaggacacgattggcttgcagatgtgtacgatgtgaatattctcttgactcaaattacaaatcttgtgttccacgaatccatcccagagtgggaacacctggattttatttggggtttggatgccccatggcggttgtataataaaattatcaacttgatgcggaagtatcaa

SEQ ID NO: 4904 - DNA, 1197 bp, Artificial Sequence
  derived and/or modified sequence
atgaagatgcgtttcctgggattagttgtgtgccttgtgttgtggactttgcacagtgaaggatcacggggaaaactgacggcggttgatccagaaactaacatgaatgtgtctgagattatctcctattggggattccccagcgaagagtacctggttgaaacggaggacggatatatcctttgcctgaatcggattccccatgggcgtaaaaaccattcagacaagggacccaagcctgtcgtgtttttgcagcatggcctcctcgcagactcatctaattgggtcaccaatctcgccaacagttcactggggttcattctggcagatgccgggttcgacgtgtggatgggcaactctagaggtaacacctggtccaggaagcacaaaaccctatctgtatctcaggatgagttctgggccttctcatacgatgagatggcaaaatacgacctccctgcgagcataaacttcatcctgaacaagacagggcaggagcaggtttattatgtggggcactctcaaggcaccaccatcggatttatcgccttctctcaaattccagagcttgccaagaggattaagatgtttttcgcacttggacccgtggcatccgtggccttttgcacctctccaatggccaagctgggccgtctgcccgatcacctgatcaaagacctcttcggggataaggaatttttaccccagtccgcattcttgaaatggctgggaactcacgtgtgcacccacgtcatcctgaaagaactttgtggcaacttatgctttctgctatgtgggtttaacgagcggaacctgaatatgagccgggttgatgtgtacactacacattcccccgctggaacatccgtccagaatatgttgcattggtcccaggccgtgaaattccagaagttccaggcctttgactggggctccagtgctaaaaactactttcactataaccagtcctatccacctacatacaatgtgaaagacatgcttgtgccaacggccgtctggagcggcgggcatgattggctcgcagatgtatacgatgtcaacattctcctgacgcagatcaccaacttagtgttccacgagtccatacctgagtgggagcatttggactttatttggggactcgacgcaccttggaggctgtacaacaagatcataaatctgatgcgcaaataccag

SEQ ID NO: 4905 - DNA, 1197 bp, Artificial Sequence
  derived and/or modified sequence
atgaagatgagattcctgggattggtggtctgtctcgtcctgtggacccttcactcagagggatcgcgaggaaaactgaccgccgtggatcccgaaacgaacatgaacgtgtcagagattatctcctattggggcttcccgtcggaagagtacctggtcgagacggaggacggatacatcctgtgcctcaacaggatcccacatgggcgcaagaaccactcagataagggtccaaaaccagtcgtctttctccagcacggtttgctcgcggactccagcaactgggtcaccaatctggccaactcgtccttggggttcatcctggctgatgcgggatttgacgtgtggatgggcaactcgcgaggcaacacctggtcgcggaagcataagactttgagtgtctcacaggacgagttctgggccttcagctatgatgaaatggcaaagtacgatctcccagcatctattaacttcatcctgaataagacgggccaggagcaggtgtactacgtgggccattcgcaaggaaccaccatcgggttcattgccttcagccaaatccctgaactggccaagcgtatcaaaatgttttttgccctgggaccggtggcaagcgttgctttctgtacttccccgatggccaagctgggacggcttccggaccacctgattaaggacctgttcggcgataaggaatttcttcctcagagcgcattcctcaagtggctcggaactcatgtctgcacccatgtgatcctgaaggaactgtgcggaaacctgtgtttccttctgtgcggattcaatgagcggaacttgaatatgtcgcgggtggacgtgtacactactcatagcccagctgggacctcagtgcagaatatgcttcattggtcccaagccgtcaaatttcagaaattccaagccttcgactgggggagctccgcgaaaaactactttcactacaatcaatcgtacccaccgacttacaacgttaaggatatgctcgtgccgaccgccgtctggtcgggcggacacgattggctcgcggacgtctacgatgtgaacatcctgcttacccagataaccaatctcgtatttcacgaatctatccctgaatgggaacacctggacttcatttggggactcgacgccccctggagactgtataacaagatcatcaaccttatgcgcaaataccag

SEQ ID NO: 4906 - DNA, 1197 bp, Artificial Sequence
  derived and/or modified sequence
atgaaaatgcgatttctggggttagttgtatgtttagttttgtggactctccactctgaagggtcaagagggaagcttacggcagttgatcccgaaacaaatatgaatgtttcagaaataatctcatattggggattcccatctgaggaatatcttgtggaaacagaagatggatatatcttatgtctgaatcgcataccccatggacgaaagaaccattcagataaaggacccaaacccgtagtgtttctccagcatgggctcctggccgatagttcaaactgggtgacaaacctagctaatagttccctggggttcatcctggctgatgccggatttgatgtgtggatggggaactccagggggaacacttggtccaggaaacacaaaacactcagtgtgtctcaggatgagttttgggcattcagttatgatgaaatggccaagtatgacctgccagcttcaatcaattttatactcaacaaaactggacaggaacaggtatactacgtcgggcacagtcagggaactactataggatttatcgcttttagtcagatacccgaactagcaaaaaggataaaaatgttttttgcgctggggcccgtggcatcagtcgcattctgtactagtcctatggctaaactgggacgcttacccgatcatctgatcaaagatctctttggagataaagaattcctgcctcagtcagcattcctgaaatggcttgggacacacgtatgtacacacgttatcttgaaagaactgtgtggaaacctgtgtttcctgttgtgtgggttcaatgagaggaatttaaacatgtctagggttgatgtctatactactcactctccagctggaacttctgtgcagaatatgctgcactggtcacaggctgtaaaattccagaaatttcaagcctttgactgggggtcatcagccaaaaactactttcactataaccagtcttatcctcccacatataacgtaaaagatatgcttgtgccgacagccgtgtggtccggggggcacgattggttggcagatgtttatgacgtgaacatcttactcactcaaataactaatctagtgttccatgagagtatacccgaatgggaacacctcgattttatttggggacttgatgccccatggcggctttataataagatcataaacctcatgagaaaatatcag

SEQ ID NO: 4907 - DNA, 1197 bp, Artificial Sequence
  derived and/or modified sequence
atgaagatgagatttctggggcttgtggtgtgtttggtgctttggacccttcatagcgaaggttcaagagggaaactgaccgccgtggacccagaaactaacatgaacgtgagcgaaatcatctcgtactggggatttccatcggaggagtatctcgtggagactgaagatggttacattctttgcctgaatcgcattccacatggtcgcaagaaccattcggataagggaccgaagccagtggtgtttttgcaacatgggctgctggcagattcctccaactgggtgaccaatcttgcaaacagctccctcggattcattctcgcggatgcaggttttgacgtgtggatgggaaattcccgcggtaatacttggtcccgaaaacacaagactctgtcagtctcccaagatgaattttgggcctttagctacgacgaaatggcaaaatacgatttgcctgcatcgatcaactttatcctgaacaaaaccggccaagaacaggtgtactatgtcggccacagccaaggaacgaccataggattcatcgctttctcacaaattccagaactggccaagagaattaagatgttctttgcccttggtcccgtggcttccgtggccttttgcacctcgccaatggcaaagttgggacgactccctgaccatctgattaaagatctttttggagataaagaatttctgcctcagtccgccttccttaagtggctgggtacgcacgtgtgtactcatgtgatcttgaaagaactctgtggcaatctttgttttctgttgtgtggcttcaatgaaaggaatctcaatatgtcaagagtcgatgtgtacaccacccattccccagcgggtacctcggtccagaacatgcttcactggtcgcaagccgtgaagtttcagaagtttcaggctttcgactggggatcctcagccaaaaactacttccattacaatcaatcttatccccccacctacaatgtgaaagatatgctggtgcctactgcggtctggagcgggggacacgattggctcgccgacgtctacgatgtcaatattctccttacccaaatcactaatctcgtgtttcacgagtcgattccagaatgggaacatctcgatttcatttggggactggatgcaccttggcgattgtacaataagattatcaacctcatgagaaagtaccag

SEQ ID NO: 4908 - DNA, 1197 bp, Artificial Sequence
  derived and/or modified sequence
atgaagatgcggtttctgggactggtggtctgcctggttctgtggaccctgcattcggagggctcacgggggaaactgactgctgtcgatccggagactaatatgaatgtgtccgaaatcatctcctactgggggttcccatcggaagaatacctggtggaaaccgaggacggatatatcctgtgtttgaaccggatcccgcatggacgaaaaaaccattccgacaaagggccaaagcccgtggtgtttctccagcacggactgctggcggattcgtcgaactgggtgacgaatctggccaacagctcactgggattcatcctcgctgacgcaggattcgatgtttggatgggaaattcccggggcaacacctggagcagaaagcataagaccttgtccgtgtcacaagatgaattctgggcattctcatacgatgaaatggccaagtacgacctgccagcaagcatcaactttatcctgaacaagactggccaggagcaagtgtactacgtgggtcacagtcaaggcactaccatcggtttcatcgctttttcgcagattccggagttggcgaagcgcatcaaaatgttcttcgctctgggacctgtggcgtccgtagcgttctgcacctcccccatggctaagctcggacggctgcctgatcatctgatcaaagacttgtttggagacaaggaatttctgccgcagtcagcattcttgaaatggctcggaacccatgtgtgcacgcatgtcattttgaaggagctctgcggtaacctgtgtttcctgctctgcgggttcaacgaacggaatctgaacatgagccgcgtggacgtgtacactacccactccccagccggaacttcagtgcaaaacatgcttcactggtcacaggcggtgaaattccaaaagttccaggcgtttgactgggggtccagcgctaagaattacttccactacaatcaatcgtaccctccgacgtacaacgttaaggacatgctggtgccgaccgcagtctggtccggaggccacgattggctcgcggatgtgtacgacgtgaatattctcttgacccaaattactaacctcgtctttcatgaatccatcccggagtgggaacatttggacttcatttgggggctcgacgctccgtggcggctgtataacaagatcatcaatctgatgcgcaagtaccag

SEQ ID NO: 4909 - DNA, 1197 bp, Artificial Sequence
  derived and/or modified sequence
atgaagatgcgatttctggggctggtagtctgtctcgtgttgtggactcttcatagcgaggggtctaggggcaaactcaccgctgtcgatccagagaccaacatgaatgtatcagagattatctcctactggggatttccatcggaggagtatttggttgagacggaagatggttacatcttgtgcttaaatcgtatcccccacggaagaaagaatcacagcgacaagggaccgaaacctgtggtgtttcttcagcacgggttgctcgcagactcttccaactgggtgacaaacctggcaaattcttctctgggtttcatactggccgatgccgggttcgacgtttggatggggaatagccgagggaacacatggagccgaaagcacaagaccctgtcagttagccaagacgagttctgggccttttcttacgacgagatggcgaagtatgaccttccagcctccatcaacttcatcctgaacaaaactggacaggagcaggtgtattatgtggggcattcccagggcactacaattggcttcattgctttttcacaaatccccgaactagctaaacggattaagatgttcttcgcacttggacctgttgcaagcgtggccttttgtactagccctatggccaaactggggagactccctgaccacctgattaaggatctcttcggtgacaaagagtttctgccccagtctgccttccttaaatggctcgggacacatgtatgcacacacgttattctgaaggagttgtgcggtaatctgtgctttctgctctgtggcttcaacgaacgtaacttgaatatgtccagggtcgacgtttacactactcacagccccgccgggacttccgttcaaaacatgctgcactggagccaagcggttaaattccagaaattccaggcctttgattggggcagttctgccaagaattatttccactataaccagtcatatcccccaacctataatgtcaaagatatgctggtgcctaccgccgtgtggtcaggtggccacgattggctggccgatgtctacgatgtcaacatcctcctcactcagattacgaatctggttttccatgagtcgatacctgagtgggaacacttagacttcatttggggactggacgcgccatggcgcctctacaacaagatcattaatctaatgagaaagtaccag

SEQ ID NO: 4910 - DNA, 1197 bp, Artificial Sequence
  derived and/or modified sequence
atgaagatgcgcttcctcggcctcgtcgtgtgccttgtgctttggactctgcactccgagggttcccgcggaaagctgactgccgtcgaccccgaaaccaacatgaacgtgtccgaaatcatctcctactggggttttccgtccgaggaatacctcgtggaaaccgaagatgggtacattctttgccttaatcgcataccgcacgggaggaaaaaccactcggacaagggacccaaaccagtggtgtttcttcagcatgggcttcttgctgatagctccaactgggtgactaacctcgcgaatagctcgctgggattcatactggcagatgcagggtttgacgtgtggatgggaaattcgagaggtaatacttggtcgcggaagcacaaaaccctgtcagtctcgcaggatgagttttgggcgttttcctacgatgaaatggccaaatacgacttgcctgctagcataaactttattctgaacaaaactggacaggagcaggtctactacgtgggccattcgcagggcaccacgattggtttcattgccttttcgcagatcccagagctggcaaagcgcattaagatgttctttgccttgggacctgtcgcgtcagtggcattttgcacctcacccatggccaaactggggagacttcccgatcacctgatcaaggatctctttggtgataaggaattcctccctcaatcagcctttttgaagtggcttgggacgcatgtttgcactcacgtgatattgaaggaactctgcggaaacctttgttttctcctttgcggattcaatgaacgaaatctcaatatgtcgcgggtggatgtctacaccactcacagccctgctggtacttccgtgcagaatatgcttcattggtcgcaagcagtcaaattccaaaagtttcaggcatttgattggggttcctcagcaaagaattactttcattacaatcagtcatacccacctacttacaacgtcaaggatatgctcgtgcctaccgccgtgtggagcggtggacatgattggcttgcagatgtctatgatgtgaacattcttcttacccaaatcacgaacctcgttttccatgaaagcatccctgaatgggaacaccttgacttcatttggggtctggacgcaccgtggcgattgtacaacaaaatcatcaatctcatgcgaaagtaccaa

SEQ ID NO: 4911 - DNA, 1197 bp, Artificial Sequence
  derived and/or modified sequence
atgaagatgagatttctgggtctggtagtgtgtctggtgctttggacgctgcattctgaaggtagcagaggcaagttaacggcagtggatcctgaaacaaatatgaacgtatccgagattatttcatactggggatttccaagcgaagaatacctcgtggaaacggaggacggatacatcctctgcctcaacaggatccctcatggacgcaaaaaccattcggacaagggtcctaagcccgtcgttttcctgcagcacggtctgctggcagattcatctaattgggttacgaatcttgcaaactcatcactgggcttcatacttgccgacgccgggtttgatgtgtggatgggcaactctcgtggaaacacatggtcccgcaagcacaaaactctctccgtgtcgcaggacgaattctgggcattttcctatgatgaaatggctaaatacgatctgcctgcatcgattaacttcatccttaacaagactggacaggagcaagtgtactatgtaggtcatagccaagggacaaccatcggtttcattgcttttagccaaatccccgaactggccaagcggatcaaaatgttttttgcattgggacccgtggcctccgtggccttctgcacgtcaccgatggcaaagctcgggagacttcccgatcaccttataaaggacctcttcggtgataaagagttcctgccccagtccgctttcctgaaatggttgggaacccatgtgtgtacacacgtcatacttaaggaactgtgtgggaacctgtgctttctcctgtgtggctttaacgaaagaaatctgaatatgagtcgagttgacgtttacaccacccatagccccgcggggaccagtgtgcagaatatgttgcactggtcacaggcagtgaaattccaaaaatttcaggcatttgattggggtagttccgccaagaactacttccattataaccaatcctaccctcctacatacaatgttaaagacatgctggtgccgaccgcagtctggtctggcggccacgactggttggccgacgtgtacgacgttaacattctgctgacccagatcaccaacctggtgttccatgaatctatcccggaatgggaacatctggactttatttgggggctggacgccccctggcggctttacaataagattattaacttgatgaggaagtatcag

SEQ ID NO: 4912 - DNA, 1197 bp, Artificial Sequence
  derived and/or modified sequence
atgaaaatgcggtttctgggcttggttgtttgcctggtgttgtggacattgcatagtgagggtagcaggggaaaactgactgcggtcgatcccgagaccaatatgaatgtcagtgagatcatttcttactggggcttcccgtccgaagagtacctcgtggaaacagaagacggatacattctctgtctgaatcggatcccacacggacgcaagaatcattcagataagggtcccaagcctgtcgtgttcctgcagcacggacttctggctgactcatcaaattgggtgactaaccttgccaactcttccctgggttttatacttgccgacgccggattcgacgtctggatgggcaattccaggggcaacacttggagccgaaagcataagacgctctctgtgtcccaggatgaattctgggccttcagttatgatgagatggccaaatatgaccttccagcaagcataaactttatcttgaataagaccggccaggagcaggtatactatgtggggcattcacaaggcaccactattggattcatcgctttttcccaaatccccgagctggccaaaaggattaagatgttttttgctctgggacccgtcgcaagcgtggcgttctgtactagccccatggccaagctgggaaggctccctgaccacttgataaaggacctgttcggcgataaggaatttttgccccagtccgcgtttctgaagtggctgggcacccacgtctgtactcatgttatcctgaaagaattgtgcggcaacctttgttttctgctgtgcggcttcaacgagagaaacctcaatatgagcagggtcgacgtgtacacaacgcactctcctgctggcacgagtgtgcaaaacatgcttcactggtcccaagctgtgaagtttcagaagttccaggcttttgattggggttctagcgccaaaaattacttccactacaaccagtcctaccctccaacttataacgtgaaggacatgttggtgccaacagcagtgtggagtggcggtcacgactggctggctgatgtttacgatgtgaatatcctgttgacccagataacaaacctcgtttttcatgagagcattccggaatgggaacacctggacttcatatggggcctcgatgctccctggaggctctacaataagatcatcaatctgatgcgaaaataccaa

SEQ ID NO: 4913 - DNA, 1197 bp, Artificial Sequence
  derived and/or modified sequence
atgaagatgaggttcctgggactcgtggtctgtctcgtactatggactcttcattctgagggtagcagaggaaagctgactgctgttgacccagagaccaatatgaacgtgtccgaaatcatatcttactgggggttcccttcggaagaatacttggtggagaccgaggacggctatatcctctgcctgaatcggattccacacggacgcaagaatcactccgataaggggcccaagccggtagtctttctccaacatgggctattagccgactcttctaattgggttacaaatctggccaattctagcctgggatttatcttggctgacgccggtttcgatgtgtggatgggaaacagtcgtggaaatacttggtcccgaaaacataagacactgagcgtgtcccaggacgagttttgggcattcagttacgacgaaatggcaaagtatgatttacctgcctcaatcaacttcatcctgaacaagacgggccaggaacaggtttactacgtagggcactcccaagggaccaccattggcttcatcgcattttcacaaatccccgagctggccaagagaatcaaaatgtttttcgctctgggccccgtcgccagcgtagctttctgtaccagtcctatggcaaagctcggtaggcttcccgaccacctgatcaaagatctgttcggtgacaaagaatttctgccacagagtgcattccttaaatggctgggcacccatgtgtgtacgcacgttatcttgaaggagctgtgcggaaatctatgttttctcctgtgcggttttaatgagaggaatctgaacatgtctagggttgacgtttacactacccactcacctgccggcaccagcgtccagaatatgctgcattggtcgcaagctgttaagtttcagaaatttcaggcattcgattggggttccagcgctaaaaattactttcactacaatcagtcatacccacccacttacaatgtcaaggacatgcttgtccctaccgctgtatggtctggtggccatgactggctggctgacgtttatgacgtaaatattctgcttacccagatcacaaacctggtattccatgagtcgattccagagtgggagcatttagacttcatttggggcctcgacgctccgtggcgattatacaataaaatcatcaatttgatgcgaaagtaccag

SEQ ID NO: 4914 - DNA, 1197 bp, Artificial Sequence
  derived and/or modified sequence
atgaaaatgaggttcttgggccttgtcgtttgtctggtgctgtggactttgcacagtgaagggagccgcgggaagcttaccgccgttgatcccgaaaccaacatgaacgtgtccgagataatctcttactggggctttccatcagaagaatatcttgtggagaccgaagatggctatatcctatgtctcaatcggattccgcatggccgaaagaatcattctgataagggtccaaagccagtcgtgtttctacagcacggcctgctggctgatagttcgaattgggtcaccaatcttgctaacagctccctgggttttatactggcagatgccggatttgacgtgtggatgggcaacagtcgggggaatacttggagccgaaaacacaagaccctctctgtctcccaggatgagttttgggccttttcctacgacgaaatggctaaatatgacttgccagctagcatcaactttattctcaacaaaaccggacaggaacaggtgtactacgttggacattcgcaaggcacaaccatcggctttatcgcattttcccagattcccgaactggccaaacgcataaagatgttctttgcccttggccccgtagcctcagtcgcgttttgtacctcccctatggcaaaactgggtagactccctgaccatctgatcaaggacttgttcggagacaaggagttcctcccacagtctgccttcctgaaatggctggggactcacgtgtgtacccacgtgattctaaaggaactgtgcgggaatctctgttttttactctgcgggtttaatgagcgcaacctgaacatgtcacgcgtcgatgtctacactactcactcacccgcaggaacaagcgtgcaaaatatgctgcactggtcccaggctgtgaaatttcagaagtttcaggcctttgattggggatccagcgccaaaaattatttccactataaccagagctacccccccacatataatgtgaaagacatgctggtcccaactgcggtatggtcgggggggcacgattggctggccgatgtttacgacgtgaatattcttttgacgcagatcaccaatctggtattccacgagtccatccctgaatgggagcacctcgattttatttgggggcttgacgccccatggaggttatacaacaaaattattaacctgatgaggaaatatcag

SEQ ID NO: 4915 - DNA, 1197 bp, Artificial Sequence
  derived and/or modified sequence
atgaaaatgagatttcttggactcgtcgtgtgtttggtcctgtggactctgcactcagaagggtccagagggaaacttaccgcagtagatcctgaaactaatatgaacgtgtcggaaatcatctcctactggggtttcccttctgaagaataccttgtggaaaccgaagatggatacattctctgcttgaaccgcattccccatggacgtaagaaccattccgacaagggtccaaagccagtcgtgtttcttcagcatgggttgcttgctgatagctcaaattgggtgaccaacttggcaaatagctccctcggattcattctggcagatgcagggtttgatgtctggatgggtaattcgcgaggaaatacctggagcaggaagcataaaacgctttcggtttcacaggacgagttctgggcattttcatatgatgaaatggccaagtacgatctgccagcaagtatcaactttatcctgaacaagacgggtcaagagcaggtctattacgtcggccactcacagggtaccactattgggttcatagcgttcagccagattccagagctggcaaaacggatcaaaatgttctttgcgttgggaccggtggcctccgttgcattctgtaccagccctatggcaaaactcggccgcctgcctgatcatctcattaaggacctctttggtgataaggaatttctgcctcaaagcgcattccttaagtggttgggaactcatgtgtgtactcatgtgatactgaaggaattgtgtggtaacctgtgttttttgctgtgtggattcaatgagcggaacttgaatatgtcgcgcgtggacgtctacactactcactccccagccggaaccagcgtgcaaaacatgctgcactggtcccaagccgtgaaatttcaaaagtttcaggccttcgactggggtagctcagccaagaattactttcactacaaccaatcgtatccccctacctacaacgtgaaggacatgctggtgcccaccgcagtgtggtcgggtggacatgattggcttgcagatgtatacgatgtgaatattcttcttacccaaattactaaccttgtgtttcatgaatcaatccctgaatgggagcacctggacttcatttgggggctggatgccccatggcggctttacaataagatcataaaccttatgcgaaagtaccag

SEQ ID NO: 4916 - DNA, 1197 bp, Artificial Sequence
  derived and/or modified sequence
atgaagatgcgatttctcggactggtggtttgtctggtgctgtggactctgcacagtgaaggttccagaggaaagttgaccgcggttgacccggagactaatatgaatgtgagcgagattattagctactgggggttccctagcgaagaatacttggtggagactgaagatgggtacatcctgtgtctgaaccggataccccacgggcgcaaaaaccatagtgacaagggaccaaagcctgttgtcttcctgcagcacgggctgcttgcagattccagcaactgggtaaccaatctcgcgaacagttccctgggctttatcctcgccgacgccgggttcgatgtgtggatgggtaattctagaggtaatacctggtcccggaaacataaaacgctcagcgtgtcccaggatgagttttgggcattttcttatgacgagatggcgaagtatgatttgcccgccagcatcaatttcatactgaataaaacaggacaagagcaagtgtattatgtcggccattctcaaggaacgactataggatttatcgcattctcccagattcccgagcttgcgaaaagaattaagatgtttttcgcactggggccagtcgcgtcagtggctttctgtaccagccctatggctaagttgggtcggctccctgaccatcttatcaaagacttgttcggagacaaggagtttcttccccagagtgctttcttgaagtggctcggcactcatgtgtgtactcatgtaatcctgaaggagttgtgtggtaacctctgtttcctcctgtgtggatttaacgaacggaacctgaatatgtcacgggtggatgtctacacaacacacagtccagcaggcacctctgtgcagaacatgctgcactggtcacaggccgttaaatttcagaagttccaggctttcgattggggttcttccgcgaaaaattactttcattataatcagtcttaccccccaacctataacgtaaaagacatgctggttccaaccgcggtgtggagcggcggtcacgactggctggcagatgtgtatgacgtgaatattctcctgacacagatcactaatctggttttccacgagtccatcccagagtgggagcacctggatttcatctggggcctggacgctccctggagactctacaacaaaattatcaatctcatgcggaagtaccag

SEQ ID NO: 4917 - DNA, 1197 bp, Artificial Sequence
  derived and/or modified sequence
atgaaaatgcgctttcttggcctcgtcgtgtgcctggttctctggacacttcactctgaaggctcccgcgggaagttgacggctgtggacccagagacaaacatgaacgtttccgagatcatctcttactggggcttcccgtccgaggagtacctggttgagaccgaagatggctacatcctctgtctgaaccgaattcctcacggacgcaagaatcactcagataaggggccaaagcccgtggtttttttacagcatggtcttctggcggacagctctaactgggtaactaacttggccaactcttcactgggcttcattctggcggatgccgggtttgacgtctggatgggaaactcccgtggtaatacctggtcaaggaaacataagaccctgtccgtgagccaagatgagttttgggcattctcatacgacgaaatggctaaatatgacctccctgccagtataaactttattctgaataaaacaggccaagaacaggtgtactacgtaggccattcacagggaacaaccatcgggtttatagctttctcacagatcccagaactggcgaagcggataaaaatgtttttcgccctgggaccagtggcatccgtggctttttgcacctcgcccatggctaagctggggcggctgcccgaccacctaatcaaagacctgttcggggacaaagagttcctgccgcaatctgcctttcttaaatggctcggtacgcacgtatgtacacacgtgattttgaaggagttatgtggaaatctttgcttcctgttgtgcggttttaatgagcgcaacttgaacatgtctcgtgtggacgtgtatactacccacagccccgcaggcacaagcgtgcaaaatatgttacattggagtcaggcggtgaagtttcaaaaatttcaagccttcgactggggttccagcgcgaagaactactttcactacaaccagtcctatcccccaacctataacgtgaaggatatgcttgtgccaactgcagtgtggagcggcggtcatgattggcttgcagacgtgtacgacgtgaatatcctgctgactcagattactaatctggtattccacgaatctattccagagtgggaacacttggattttatttggggcttggatgctccgtggagactctataacaaaataattaatctaatgcgaaaataccag

SEQ ID NO: 4918 - DNA, 1197 bp, Artificial Sequence
  derived and/or modified sequence
atgaagatgcgcttccttggtctggtcgtctgcctggtgctttggactttgcattcggaaggatcgcgaggaaagctgaccgccgtggatccggaaaccaatatgaatgtgtcagagatcattagttactggggatttccaagcgaagaatacctggtcgaaaccgaagatgggtacatcctttgcctgaaccgaataccccatggtcggaagaaccatagcgataaaggcccgaaacctgtggtgttccttcagcatggactccttgcggattcgtccaactgggtgacgaatctggcaaattcatcgctgggattcatcctggcggatgccggttttgacgtgtggatgggcaactccagaggcaacacttggtccagaaagcataagaccctttccgtcagccaagacgaattttgggcattttcctacgatgaaatggccaagtatgatctccccgcgtcgatcaactttattctgaacaaaaccgggcaagaacaagtgtactacgtcggccactcgcaaggaaccaccattgggtttatcgccttctcgcagattcccgaactggccaagagaattaagatgtttttcgcactgggacccgtggcatcagtggccttctgtacttcgcctatggccaaacttggacgactccctgatcacctgattaaggacctgtttggtgataaggaatttctcccgcaatcggcgtttcttaagtggctgggtacccatgtctgtactcacgtcatcctcaaggaattgtgtggaaatctttgctttctgttgtgcggattcaatgagagaaatctcaacatgagccgagtcgacgtgtacaccacccactcaccagcgggtacctcggtgcagaacatgcttcattggtcccaggcggtgaagtttcagaaatttcaagcattcgattggggcagctccgcaaagaactacttccactacaatcaatcctacccacccacttacaatgtcaaggacatgctggtgccaaccgcagtgtggagcggaggacatgattggctggcagatgtgtacgatgtgaacatacttcttacgcaaataactaacctcgtgtttcacgagagcattcccgagtgggagcatctcgatttcatttggggcctggacgcaccgtggagactgtacaacaagatcattaaccttatgcggaagtaccag

SEQ ID NO: 4919 - DNA, 1197 bp, Artificial Sequence
  derived and/or modified sequence
atgaagatgcgctttctgggactggtggtatgtctcgttctgtggacactacacagcgaaggcagtagagggaaactcactgccgtcgatcccgagactaatatgaacgtgtcagagatcatttcttattggggctttcccagtgaggagtatctcgtcgaaaccgaggatggatacattttgtgcttgaaccgaatccctcatggccgcaaaaatcattctgataaaggaccaaagcccgtcgtcttcctgcaacacggactgctcgctgacagttcaaactgggtcaccaatctggcgaattccagcctggggttcattctggctgatgccggattcgacgtatggatgggcaactctaggggcaatacctggtctcggaagcacaaaaccctgtccgtgtcacaggacgagttttgggcattttcctatgatgagatggctaaatatgacctgcccgcgagcataaatttcatcctgaataaaactggtcaggagcaggtgtattacgttgggcactctcagggcaccaccattggatttatcgcgttcagccagatacccgagctagcaaagagaataaaaatgtttttcgcgttgggacctgtggcatcagttgcattttgcactagcccaatggccaagctggggcgcctgcctgatcaccttattaaagacttattcggagataaggagttccttccccagtccgcattcctgaagtggctcggaactcacgtctgcacacacgtgatcctgaaggaactgtgcggtaacctttgctttctgttgtgtggattcaatgaacggaatcttaacatgtcccgcgtagacgtttacacaacacattccccggctgggacgagtgtgcaaaatatgctgcactggagtcaggccgtgaaatttcagaaatttcaggcatttgattggggaagctctgccaagaactattttcactataatcagtcgtacccgccaacatataatgtcaaggacatgttggtaccaactgcggtttggagcggtgggcacgactggttggccgatgtttatgacgtgaacattctcctgacacaaatcacaaacctcgtgttccacgaatctataccagaatgggaacacctagatttcatctggggccttgacgcaccgtggagactgtataataaaattataaatctgatgaggaaataccag

SEQ ID NO: 4920 - DNA, 1197 bp, Artificial Sequence
  derived and/or modified sequence
atgaaaatgaggttcctcggcttagtggtgtgcctggtgctttggacactacatagtgagggtagccgagggaaattgaccgctgtagatccggaaaccaacatgaacgtgagcgaaattatttcatactggggctttccctctgaggaatatctggtcgaaaccgaggacggctatatcctgtgcctgaaccgaatcccccatggtagaaagaatcacagtgataaaggaccaaaaccagtcgtgttcctgcagcacggtttgctggcagactcctcgaactgggtgactaatttggctaacagcagcttggggtttattctggcagatgccgggtttgacgtatggatgggcaattccagaggaaacacctggagccgcaagcataaaactctgtccgtatctcaagacgagttctgggctttttcttatgacgaaatggctaaatacgaccttcctgcttcaatcaatttcatcctgaataagactggtcaggagcaagtgtattacgtggggcattctcagggtaccacaattgggtttatcgcgttcagtcagattccagagcttgctaaaaggataaaaatgttttttgccctgggaccggttgcatcagtggcattttgtacaagcccaatggcaaagttagggagactgccagaccaccttatcaaggatctgtttggcgacaaagaatttttacctcaatctgcgtttctgaagtggctgggaactcatgtttgtacccacgtaatccttaaagaactctgcggaaatttgtgtttcctcctctgcggattcaatgagcgaaacctgaatatgtctcgagtggatgtgtatacgacacactcacctgccgggacttctgtgcagaacatgctgcactggtcccaggcagtgaaattccagaaattccaggcattcgattgggggtcttccgccaaaaactattttcactacaatcagtcttatccaccaacatataatgtaaaggacatgctggtgcctacggctgtatggagcggggggcacgactggttagctgacgtatacgatgtgaatattttactgacacaaatcaccaacctggtgttccacgagtctataccggaatgggagcacttagattttatttggggcttggacgcgccctggaggctatataataaaataatcaatctgatgcgaaaataccaa

SEQ ID NO: 4921 - DNA, 1197 bp, Artificial Sequence
  derived and/or modified sequence
atgaagatgagatttctgggacttgtcgtgtgtctcgtgctgtggactttgcatagcgaagggtccaggggcaaacttaccgccgtggatccggagactaatatgaacgtgtcggagatcatttcgtactggggatttccatccgaagaatacctcgtggaaaccgaagatggatacattctgtgccttaaccgaattccacatggcagaaagaatcatagcgacaaaggtcctaaacccgtcgtctttctccaacatggacttctcgccgattcctcaaactgggtgaccaaccttgcaaacagcagcctggggtttattcttgcagatgccggtttcgatgtgtggatgggcaactcaaggggtaatacttggtccaggaagcacaagacccttagcgtgagccaagacgagttttgggcattttcatatgatgagatggctaaatacgatctcccagcttctatcaacttcatccttaacaagaccggacaagagcaagtgtactacgtgggtcattcgcagggtactaccattggtttcattgcatttagccagattccagagcttgccaagagaatcaagatgtttttcgcgctgggtcccgtggcctcagtcgcattctgtacttcccctatggccaagctgggtagacttccagatcatctgatcaaggacctgtttggcgataaggaattcctgccgcagagcgccttcctgaagtggctcggtacccatgtgtgcactcacgtgatccttaaggagctctgtggaaacctgtgttttcttctctgtggattcaacgaacgaaacctgaatatgtcacgggtggatgtgtacactacccattctccagcaggaaccagcgtgcagaatatgcttcattggtcgcaggcagtcaagtttcagaagtttcaggcttttgattggggatcctccgcgaaaaactattttcattacaaccaatcgtaccctcctacttacaacgtgaaagacatgctggtccctactgccgtgtggtccggcggacatgattggttggcagatgtgtatgatgtcaacatactcctcacccaaattacgaatctggtgtttcacgagagcataccggaatgggaacatctggactttatctggggactggacgcaccctggcggctttacaacaagatcattaacctcatgaggaagtatcag

SEQ ID NO: 4922 - DNA, 1197 bp, Artificial Sequence
  derived and/or modified sequence
atgaaaatgcggtttctgggattggtcgtctgcctggtgctttggaccttgcatagcgaaggatcacgcggaaagctgactgccgtggatcctgaaaccaacatgaacgtgtcggaaatcatttcatactggggatttccatctgaagagtacctcgtggagacggaggacgggtacatcctgtgtctcaatcgaatcccacacgggaggaaaaatcattccgacaaggggcccaaaccggtggtgttcttgcagcacggccttttggccgacagcagcaactgggtaaccaatctggccaactcctcgctgggtttcatcctggccgacgccggcttcgacgtgtggatgggaaattcccggggaaatacctggtcccggaagcataaaactctgagcgtctcacaagacgaattctgggctttctcgtacgacgagatggctaagtatgatctcccggcatcgatcaacttcattctgaataagaccgggcaggaacaggtgtactacgtgggccactcccaggggactaccatcgggttcatcgcattctcccagatcccagagcttgccaagcgtatcaagatgttctttgccctcggacccgtcgcatccgtcgccttctgcacttccccaatggctaaactgggtaggctgcctgaccatctgatcaaagatctgtttggagataaggagttcctgccgcaaagcgccttcctgaaatggctcggtacccacgtgtgtactcatgtcattctgaaggaactctgcggaaacctgtgctttctcctgtgcggattcaatgagcggaatctgaacatgtccagagtggatgtgtataccactcactcccctgccgggacttccgtgcagaacatgctgcactggtcccaggcagtcaagttccaaaagtttcaagcgttcgactgggggagctccgcgaaaaactacttccattacaaccagagctaccctcctacttacaatgtgaaggacatgctcgtcccgaccgctgtgtggtctggaggccacgactggttggcggacgtttacgatgtcaacatcctgctcacgcagatcaccaacctggtgttccacgaatccatcccagagtgggaacacttggatttcatctggggcctggacgctccgtggcggctgtacaacaagatcattaacttgatgcgaaagtatcag

SEQ ID NO: 4923 - DNA, 1197 bp, Artificial Sequence
  derived and/or modified sequence
atgaagatgcgcttcttagggctggttgtgtgcctggtgctgtggaccctgcacagtgaagggtctcggggtaagctgacggcagtggatcctgagaccaacatgaacgtgtctgagatcatatcttattgggggtttccctccgaggagtacctggttgagaccgaagacgggtacattctgtgtctgaacaggatcccacacggaaggaaaaatcacagcgacaaggggccaaagcccgtggtttttctgcagcacgggctcctggcagactcctccaactgggtgacgaacctggccaattcaagcctggggttcattctggcggatgctggcttcgatgtatggatggggaacagccgaggcaacacttggagccgcaaacacaagacgttgtccgtaagccaggacgagttctgggctttttcctacgacgagatggcaaaatatgatctccccgcctccataaactttattctgaacaaaaccggacaagagcaggtgtattacgtgggacattcccagggcactacaattgggtttatcgcatttagccaaatacctgagctggcgaagaggattaagatgtttttcgccctaggccctgttgctagtgtggcattttgtactagccccatggcaaagctggggaggttgccagaccacctgattaaggacttgttcggggacaaggagttcctcccccagtcagcctttctgaaatggctcgggacacatgtgtgtacacacgtaatcctcaaggagctctgcggaaacctctgtttcttactttgtggctttaatgaaagaaatcttaacatgtccagagtggacgtgtatacgacacatagcccggccggcacgtccgtgcaaaacatgcttcactggtcgcaggctgtcaagttccagaagttccaagcatttgactggggtagctccgccaagaattactttcattacaatcagagctacccaccaacatacaacgtgaaagacatgctcgtccctaccgcagtatggtccgggggacatgactggctggcagacgtgtacgacgtgaacatcctgttgacacagattactaacttggtgttccacgagtccatccccgaatgggagcatctggatttcatttgggggttggacgccccatggcgtctctacaataaaatcattaatctcatgcggaaataccag

SEQ ID NO: 4924 - DNA, 1197 bp, Artificial Sequence
  derived and/or modified sequence
atgaagatgcgtttcctggggctcgtggtgtgcttggtgctatggaccctccatagtgaaggctcacgtggcaagctcactgccgtcgatcccgaaaccaacatgaacgtgtctgagattatttcctattggggatttccgtctgaagaatatttggtggaaaccgaagacgggtacatcctgtgtctgaacagaattccccacggaaggaagaatcacagcgacaagggacctaaacccgtggtttttctgcaacacggactcctagctgactccagcaactgggtgacgaatttggccaactcttcactggggtttatcctggccgatgctggattcgacgtttggatgggaaactcacggggaaatacctggtctcggaagcacaagactctgtcagtatcccaggacgaattctgggctttctcttatgatgagatggcaaaatatgaccttccagccagtattaatttcatactcaataaaactggacaggagcaggtttactacgttgggcatagtcagggcactacaattgggttcattgctttctcccaaatcccagaactcgccaagcggataaaaatgttttttgctcttggccctgtcgcgagcgtggctttctgcacctctcccatggcgaaactggggcgtctccccgaccacctcatcaaggatcttttcggtgataaagaatttctcccccaaagcgcctttctgaagtggctggggacccacgtttgcacccacgttatcctcaaggagctgtgcggcaatctttgtttccttctttgtggatttaatgagaggaacttaaacatgtcgagggtggatgtgtatacaacccactctccggcagggacctctgtgcagaacatgcttcattggtcacaggccgtgaaatttcagaaattccaggcgtttgactgggggtctagcgcaaagaattattttcattataaccagagttacccccccacttataacgtgaaggacatgttggtaccaactgccgtgtggtcaggaggccatgactggctggccgatgtttatgacgtgaacattcttctgacgcaaattacaaacttggtctttcacgagtcaatccccgagtgggagcaccttgacttcatctggggcctggatgccccctggcgactgtacaacaaaattattaacctgatgaggaagtatcag

SEQ ID NO: 4925 - DNA, 1197 bp, Artificial Sequence
  derived and/or modified sequence
atgaaaatgaggtttctgggcctggtggtctgtttggtcctttggacccttcactccgagggatcgagaggtaaacttaccgcggtggatcctgaaaccaatatgaatgtgtcggagattatctcgtactggggctttccatcggaagaataccttgtggaaaccgaagatgggtacattctgtgccttaatcgaatccctcacggtcgcaagaaccattcagacaaaggacccaagccagtggtgtttcttcaacatggactccttgcggacagctcaaactgggtgaccaatctcgcgaactcatcccttggctttattcttgccgatgcaggcttcgatgtctggatgggtaacagcagaggaaacacctggtcacgaaaacacaaaacgctctcggtgagccaggatgagttttgggcattttcatacgatgaaatggcaaagtacgacctccccgcatcgattaactttatcctgaacaagaccggtcaagagcaggtgtactacgtgggacattcccagggaactaccatcggctttattgcgttttcacaaatacctgaacttgctaagagaatcaagatgttttttgcattgggtccagtggcctccgtcgccttttgtacttcgccgatggcaaaacttggtcggcttcccgatcatctcattaaagacctgttcggagacaaggaatttctgccacagagcgcctttcttaagtggctgggaacgcatgtttgcactcacgtgatcctcaaagagctgtgtggcaatctttgctttcttctctgtggttttaacgagcggaaccttaacatgtcgcgggtggacgtgtacacgacccatagccccgccggaacgtcagttcaaaacatgctgcattggtcccaggcagtgaagttccagaaatttcaagcattcgattggggatcctccgccaagaactactttcactacaaccaatcgtatccccccacttacaatgtcaaagatatgcttgtgcctacggcagtgtggtccggtggccacgattggctggccgatgtctacgacgtgaatatactcctcacccagatcactaatctggtgttccatgaatccattcctgagtgggagcatctcgatttcatatggggacttgatgcaccttggcgcctttacaacaagataatcaatcttatgcgtaagtaccaa

SEQ ID NO: 4926 - DNA, 1197 bp, Artificial Sequence
  derived and/or modified sequence
atgaagatgcggttcctaggactcgtagtttgtcttgtcctgtggacgctccacagcgagggctctagggggaagctgacggcggtcgatcccgagactaatatgaatgtgagcgagattataagctactgggggttcccaagcgaagagtatctcgtggaaactgaagacggatatatcttgtgcctgaatcgaatcccacatggcaggaaaaaccactcagacaagggtcccaagccagtggtctttttgcagcatgggctactagctgactcatccaattgggtcacgaatctcgccaactcatcactgggatttattctggccgacgccggatttgacgtgtggatgggcaactccaggggaaacacctggagtagaaagcacaagactcttagcgtatcccaggacgaattttgggcgtttagctatgacgagatggccaaatacgatctgcccgcctccatcaatttcattcttaacaagacaggtcaggagcaagtgtattacgtggggcacagtcaaggcacaacaattggcttcatagcattttctcaaatacccgaacttgcgaaacgcattaaaatgttttttgctctcggcccagtggcctcagtggccttttgtaccagccctatggccaaactcggccgcctgccagaccatctcatcaaggatctgttcggcgacaaggagtttcttccacagtcagctttcctgaaatggctcgggacccacgtgtgcactcatgtaattctgaaggaactgtgtggaaacctgtgcttcctgttgtgtggcttcaacgagaggaacctgaatatgagtagggttgatgtgtacactacgcacagtcccgcgggcactagcgtgcaaaatatgctccattggtcccaggcggtaaaattccagaaattccaggccttcgactggggtagctccgctaagaactacttccactacaatcagagctatccaccaacctacaacgtgaaagatatgctggtgcctactgctgtctggagtgggggacacgactggttagccgacgtgtatgatgtaaacattctgctcacacaaatcactaatttggtcttccacgagtccatccctgaatgggagcacctcgacttcatttggggtctggatgctccctggcggctctacaataaaattatcaatctcatgcgcaaataccag

SEQ ID NO: 4927 - DNA, 1197 bp, Artificial Sequence
  derived and/or modified sequence
atgaaaatgcggttcctcggactggtcgtctgtttggtgctgtggactctgcactcagagggctctagaggaaaattaactgctgtagaccccgaaacgaacatgaacgtgtctgaaataatttcttattggggctttcctagcgaggagtacctggtagaaaccgaggatgggtatatcctttgcctaaaccgtattccacatggaaggaaaaaccatagcgacaaaggtcccaagccggtggtgtttctacagcacggcttgttggctgattcatcaaattgggtgacaaatctcgccaattcttccctgggattcatcttagccgacgcgggttttgatgtctggatgggtaattctcgtgggaacacatggtctaggaaacacaaaacactgtctgtaagccaggatgagttctgggccttcagctatgatgagatggctaaatacgacttacctgccagcattaactttatccttaacaagaccggacaagaacaggtgtactacgtaggccatagccaaggaaccaccatcggatttatcgctttcagtcaaattcccgagctcgctaagcgcatcaagatgttcttcgccctgggccccgtcgcttccgtcgcgttctgtacgtcaccgatggccaaactgggaagactgccagatcacctgataaaggatttattcggggataaagagtttctcccccaaagcgcgtttttgaagtggctgggcacacatgtatgtacccatgtgatactcaaagaactctgcggaaatctgtgttttctcctgtgcgggttcaatgagcgaaacctgaacatgtctagggtagacgtatacacgacacatagccccgctggtacaagcgtacagaacatgcttcattggtcacaagctgtgaaatttcagaagtttcaagctttcgattggggctcctctgctaagaattacttccattacaaccagtcatacccacccacctacaatgtgaaggacatgcttgtccctacggctgtgtggtctggcggccacgattggctggcagacgtgtatgatgtgaacatactgcttacgcagatcactaacctagtgtttcacgagtcgatccctgagtgggaacaccttgacttcatatggggcttggatgctccgtggcgcctgtataataaaattatcaacctgatgcgaaaataccag

SEQ ID NO: 4928 - DNA, 1197 bp, Artificial Sequence
  derived and/or modified sequence
atgaaaatgcgttttttaggtctagtagtatgtttagttttatggacgctacattcggaaggttcgcgaggtaaattaacggcggtagatccggaaacgaatatgaatgtatcggaaataatatcgtattggggttttccgtcggaagaatatttagttgaaacggaagatggttatatactatgtttaaatcgtataccgcatggtcgtaaaaatcattcggataaaggtccgaaaccggtagtatttctacaacatggtttactagcggattcgtcgaattgggttacgaatttagcgaattcgtcgttaggttttatactagcggatgcgggttttgatgtatggatgggtaattcgcgtggtaatacgtggtcgcgaaaacataaaacgttatcggtttcgcaagatgaattttgggcgttttcgtatgatgaaatggcgaaatatgatctaccggcgtcgataaattttatattaaataaaacgggtcaagaacaagtttattatgtaggtcattcgcaaggtacgacgataggttttatagcgttttcgcaaataccggaattagcgaaacgaataaaaatgttttttgcgctaggtccggttgcgtcggttgcgttttgtacgtcgccgatggcgaaactaggtcgtctaccggatcatttaataaaagatctatttggtgataaagaatttctaccgcaatcggcgtttttaaaatggttaggtacgcatgtttgtacgcatgtaatactaaaagaattatgtggtaatctatgttttttactatgtggttttaatgaacgtaatttaaatatgtcgcgtgtagatgtttatacgacgcattcgccggcgggtacgtcggtacaaaatatgctacattggtcgcaagcggtaaaatttcaaaaatttcaagcgtttgattggggttcgtcggcgaaaaattattttcattataatcaatcgtatccgccgacgtataatgtaaaagatatgttagttccgacggcggtttggtcgggtggtcatgattggttagcggatgtttatgatgtaaatatattattaacgcaaataacgaatttagtatttcatgaatcgataccggaatgggaacatttagattttatatggggtctagatgcgccgtggcgattatataataaaataataaatttaatgcgaaaatatcaa

SEQ ID NO: 4929 - DNA, 1197 bp, Artificial Sequence
  derived and/or modified sequence
atgaaaatgagattcttaggcctggtggtgtgcttggtgctttggacgctgcactccgaaggcagcagaggcaagctcaccgctgtggaccctgaaaccaatatgaatgtgagtgagatcatctcttattggggcttcccatcagaggagtatctcgtggagaccgaggacgggtacattctgtgcctgaacaggattccccacgggcggaagaaccatagcgacaaagggcccaaaccagtagtttttctgcagcatggactactagcggatagctcaaattgggttacgaatctggccaactcttcactcggtttcatcctggctgacgcgggttttgatgtgtggatgggcaactctaggggtaatacatggtcccgcaaacacaagactctgagtgtgtcccaggatgagttttgggcttttagttatgacgagatggccaagtatgacttacccgctagcataaatttcatcttgaataagaccggacaggaacaggtctactatgtgggacactctcaaggcaccacgatcggcttcatagctttcagccagataccggagttggcaaagcggatcaagatgttttttgcactggggccagtagcctctgtagcattctgtacttccccaatggcgaaactcggcaggctgcccgatcacttaattaaagacttatttggtgacaaggagtttttgccacagagtgccttcttgaaatggttagggacccacgtatgcacccacgtgatcttgaaagagctgtgtggcaatctgtgcttcctgttgtgcggctttaacgaacggaacctgaacatgagcagggtggacgtctatacgacacactcacctgcaggcactagcgttcaaaacatgctgcattggtcgcaagccgtgaagtttcagaaatttcaagcttttgattggggatccagtgcaaagaactactttcattacaatcagtcttacccccccacctacaacgtgaaggatatgctcgttcccaccgccgtgtggtccggaggccacgattggctggcagacgtgtacgacgtgaatattctgctcacacaaattactaatctggtcttccacgaatccattcctgagtgggaacacctggacttcatatggggcctggatgcaccttggagactctataataagataataaacctgatgagaaaatatcag

SEQ ID NO: 4930 - DNA, 1197 bp, Artificial Sequence
  derived and/or modified sequence
atgaagatgcggtttctgggattggtcgtgtgtcttgtgctgtggacgcttcatagcgaaggttcgcgcgggaagctgactgccgtggatccagagacgaacatgaacgtgagcgaaatcatctcttactggggtttcccgagcgaggagtacctggtggagactgaggatggctatatactctgtcttaatcgcatcccacacggcagaaagaaccattcggataagggacctaagccagtcgtgttcctgcagcatggactgctggcggactcctcaaactgggtgaccaacctcgcaaattccagcctcggatttatcctggcggacgccggcttcgatgtctggatgggaaactcgagaggaaacacctggtcccgcaaacacaagactctgagcgtctcccaggacgaattctgggcgttctcgtacgacgaaatggcgaagtacgatctcccagcatccattaactttatcctgaacaagacgggacaagagcaagtgtactacgtgggacattcccaaggaactactatcgggtttatcgctttttcacaaattccggagctcgcgaagaggattaagatgttcttcgccctgggtcctgtggcatcagtcgccttctgcactagccctatggcaaaactgggccggctgcctgaccatttgatcaaggatctttttggtgataaggagtttctcccccagtcggccttcctgaagtggctgggaacccacgtctgcactcacgtgatcctgaaagagctgtgcggaaacttgtgcttcctgctgtgcggattcaacgaacggaacctcaacatgtcccgggtggacgtgtacaccacccatagcccggccggaacttccgtgcagaacatgttgcactggagtcaggccgtgaagttccaaaagttccaggccttcgattggggatcgtcagccaaaaactacttccactacaaccagtcttacccaccaacttacaatgtcaaggacatgctggtgccaaccgccgtgtggtccggggggcacgactggctcgccgatgtgtacgatgtgaatattctcttgacccaaatcaccaatctcgtgttccacgagagcatccctgagtgggaacacctcgatttcatctggggcctcgatgcaccgtggcgcctgtacaacaagattatcaacctgatgaggaagtaccaa

SEQ ID NO: 4931 - DNA, 1197 bp, Artificial Sequence
  derived and/or modified sequence
atgaagatgcgcttcctgggactcgttgtgtgcctagtgctgtggacactccattcagaagggagtcgagggaaacttactgccgttgatccggaaacaaacatgaacgtgtctgagatcatttcttactggggtttcccttcggaggaatatctggttgagacagaggatgggtacatactgtgcctcaacagaataccacatggaaggaagaaccattcagataaaggcccgaagcctgtcgtgttcctgcaacacggcctcctggcagactcttcaaactgggttaccaatctggccaattcatcattaggcttcatattggccgacgctggctttgatgtgtggatgggaaatagccgggggaacacctggagtagaaaacataagaccttgtccgtatcccaggacgagttctgggccttctcctatgacgagatggccaaatatgacctccccgccagcatcaattttattcttaacaaaaccggacaggaacaagtatattatgtcgggcactctcaggggaccaccattggatttatcgccttctcccagatacccgagctggcgaagagaataaaaatgttcttcgcactggggcctgtcgctagcgtcgccttctgtacctctccaatggccaagctgggccgcctccctgaccatttgatcaaggacctcttcggagacaaagaatttctaccacagtcagcctttctcaagtggctggggacccatgtgtgtacacatgttatattgaaggaactgtgcggcaacctctgctttcttctgtgcggcttcaatgagcgcaacctaaatatgtccagggtggatgtgtacacaacccattctccggcaggaacaagtgtccagaacatgctacattggagtcaggctgtcaaatttcagaagtttcaggccttcgattggggcagctccgccaagaactactttcattataaccagagttacccccctacctataacgtgaaggatatgctggtgcctaccgcagtctggtccggtggccacgactggctcgcagatgtgtacgacgtgaatatcctcctcactcagatcacaaacctggtgtttcatgagagtattccggagtgggaacaccttgacttcatctgggggcttgacgccccctggcgactgtacaataagataattaacctcatgcgtaaataccag

SEQ ID NO: 4932 - DNA, 1197 bp, Artificial Sequence
  derived and/or modified sequence
atgaaaatgaggtttctgggtcttgtggtctgccttgtgttgtggaccctccactcagagggatcccgtggtaagctgactgctgtagaccccgagaccaacatgaatgtatcagagatcatcagctattggggcttcccatccgaagaatacttggtggagacagaagatggatatatcttgtgtctgaacagaatccctcatggccgcaaaaaccatagcgacaagggacccaagccagtcgtattcctgcaacacggacttctcgctgactcttccaattgggtgaccaacctggccaacagttcactcggatttatcctcgctgatgccggctttgacgtctggatgggtaatagccgcggaaacacttggagtaggaagcacaaaaccctctcagtgtcacaggacgaattctgggctttctcctacgacgaaatggctaagtatgacctgcccgctagcatcaactttattttgaacaagaccggacaggaacaagtgtattacgtcggacactcccagggtaccaccataggcttcatcgccttcagtcaaatccccgagcttgctaaacgcataaagatgttctttgcacttggacccgtggcaagtgttgctttctgcacttcccctatggcaaagctgggtagacttcctgaccatctgattaaggacctctttggtgataaggaatttctcccccaatccgccttcctcaagtggctgggaacacacgtctgtacccacgtgattctgaaagagctttgcggaaatttgtgctttcttttgtgcggtttcaacgaaagaaaccttaacatgtcccgtgtagatgtgtatactacccactcaccagctggcacatccgtccaaaacatgcttcattggtctcaggcagtcaagtttcaaaagtttcaagcttttgactggggctcatccgccaaaaactattttcattataatcaatcatatccccctacttacaatgttaaggacatgctcgtgccaactgctgtgtggagtggaggtcacgattggcttgctgacgtctatgacgtcaatattcttctcactcagatcactaatttggtgttccacgaaagcattcccgagtgggaacacctggacttcatctggggcctggatgcaccttggcgcctgtacaacaaaatcattaacctgatgaggaaatatcag

SEQ ID NO: 4933 - DNA, 1197 bp, Artificial Sequence
  derived and/or modified sequence
atgaagatgaggttcttgggactggtggtgtgtctcgtgctgtggactctgcattcagagggttcccgaggcaaactgaccgccgtcgatccagagaccaatatgaacgtctcagagatcatctcttattggggctttccatccgaggaataccttgtggaaacagaagacgggtacatcctgtgcttgaaccgcataccgcacgggcgcaagaatcactctgataaaggccctaaaccggtggtgttccttcagcatggcctgttagccgattcctcgaattgggttacaaacctggcaaatagttcgttgggtttcattttggccgatgcagggttcgacgtttggatgggcaactctaggggcaatacatggtcgcggaaacataagacgctctcagtgtcacaggacgagttttgggcattcagttatgacgaaatggccaagtatgatctgcctgccagcattaattttattctgaacaagacggggcaagagcaggtgtattacgtaggacacagccaggggaccaccatagggtttattgcattctcccagattcctgagctggctaaaagaatcaaaatgtttttcgctctgggtcccgtggcaagtgtcgctttctgtacttcccccatggctaagcttggccgtctgccggatcacctgatcaaagatctgttcggcgacaaggagttcctaccccagagtgcctttttaaagtggctaggcactcatgtgtgtacccacgtgattttaaaggaactatgtggaaacctgtgttttctgctgtgcgggtttaacgagcggaatttgaatatgtcaagggtcgacgtgtataccacccacagtccggcaggcacctctgtacaaaatatgctgcactggagccaggccgttaaattccagaagttccaggctttcgactggggatctagtgccaagaactatttccactacaaccagtcttatccccctacatacaacgttaaagatatgttggttccgaccgctgtctggtccggaggacacgactggctggccgatgtgtacgacgtgaacatcctgctcacccagatcaccaatctggtctttcacgagtctatacccgagtgggagcaccttgacttcatctggggcctcgatgctccatggcgcctctataataagattataaatcttatgcgaaagtaccag

SEQ ID NO: 4934 - DNA, 1197 bp, Artificial Sequence
  derived and/or modified sequence
atgaagatgcgttttctcggcctcgtcgtttgcctcgtgctttggaccttacactccgaaggatctcgaggaaagctgaccgccgtggatccagagactaatatgaatgtgtctgagatcatcagctattgggggtttccgagcgaggaatacctcgtggagaccgaggacggatatatattgtgcctgaatcggattcctcacggcagaaaaaatcacagcgacaaggggccaaagcccgtggtcttcctgcagcacgggctgcttgcggattcttcaaattgggttacaaatctggccaatagttctctggggttcatcctcgctgatgcaggattcgatgtttggatggggaattctagggggaacacatggagtcgaaagcataagaccctctctgtaagccaggatgaattttgggcttttagctatgatgaaatggctaaatatgatttgcccgcatccataaactttattctgaataagaccggccaggagcaggtctactacgttggacactcccagggtacgacaatagggtttattgctttttcacagatccccgaactggccaaacgcattaagatgtttttcgctctgggtcccgtcgcttcagtggcattctgtaccagcccaatggctaagctgggacgattgcctgaccatttgattaaggacctattcggagataaagagttcctgccacagagtgccttcctgaaatggctgggcacacatgtgtgcacgcatgtgatactgaaagaattgtgcggaaatctgtgcttcttgctctgcggcttcaacgaaagaaacctgaacatgtccagagtggatgtgtacactacccattctcccgctgggacttctgtccaaaacatgctgcattggtcacaagccgtgaaatttcagaagtttcaggctttcgattggggtagtagtgccaagaactatttccattataaccagtcttatcctcctacttataatgttaaggacatgctagtccccaccgcagtgtggtctggtggtcacgactggctggcggacgtttacgatgtgaacattttgctgacgcagattacgaacctggtcttccatgagtctattcctgagtgggaacacctggacttcatatggggactcgacgccccctggaggctgtacaataagattattaaccttatgcggaagtaccaa

SEQ ID NO: 4935 - DNA, 1197 bp, Artificial Sequence
  derived and/or modified sequence
atgaagatgcgcttcttgggactggtagtttgcttagtgctgtggacacttcactcggagggcagtaggggcaaattgacagctgtagacccggagaccaatatgaatgtcagcgagatcatttcttattggggtttcccatctgaagaatacctagtcgaaaccgaggatggttatatcctgtgtctaaatcgtattcctcatggaaggaagaatcattctgataagggtcctaagcccgtggttttccttcagcatggcctcctcgctgattccagtaattgggtcactaatttagctaatagtagtctgggcttcatccttgctgatgccggatttgatgtttggatgggcaattctcggggcaacacctggtcacgcaagcataaaacgcttagcgtgtcccaggacgagttctgggccttcagctacgacgagatggcgaaatacgatcttccagccagcattaactttatccttaacaagactggccaagaacaagtatattatgtcggccacagtcagggcactacgatcggctttatcgcattcagtcaaatacccgagttagccaaaaggatcaaaatgttcttcgcactggggcccgtggcttctgtggccttctgtaccagcccaatggccaaattgggaaggttgccagatcatctaattaaagatttgttcggcgacaaggagtttttgcctcaatccgcttttcttaaatggctgggcacgcatgtttgcacacacgtgatcttgaaggaactctgtggaaacctgtgcttcctcctttgtgggtttaacgagaggaatttgaatatgagtagagtggacgtgtacaccactcattcccctgccggaacttcagttcagaacatgttacattggtcccaagctgtgaaatttcagaaattccaagcttttgactggggatcttcagccaagaattacttccactataatcaaagctaccccccaacttacaacgtcaaagatatgcttgtgcctacagcagtgtggtcagggggccacgattggctggctgatgtttatgacgtgaatatattgctgacacagatcacaaatctcgtattccacgagtccatcccagagtgggaacacttggacttcatctggggactggacgctccttggaggctgtataacaagattattaatctgatgaggaagtaccaa

SEQ ID NO: 4936 - DNA, 1197 bp, Artificial Sequence
  derived and/or modified sequence
atgaaaatgagattccttggattggtggtatgtctcgttttgtggacactgcactccgagggaagcagaggtaaactgacagctgtggatccggagacaaatatgaacgttagtgagataattagctattggggatttccctcagaggagtacctggtggaaaccgaggatggttatatcctctgtttgaacaggatccctcatggaaggaaaaatcactccgataagggcccaaagccagtagtgtttttgcagcacggacttctcgctgactcaagcaactgggtcacaaacctcgccaactcaagcctgggattcatcttggccgacgccggctttgacgtgtggatgggcaactcacgcggcaatacctggtccaggaagcacaagaccttgtctgttagccaggatgaattctgggccttcagctacgacgagatggcaaagtacgacctgcctgcgtccattaacttcattcttaacaaaactggtcaggagcaggtgtactacgttggacactcccagggtacaacaattggttttatcgcgttctcccagatacccgagctcgccaaacgcatcaaaatgttctttgccctgggccctgtcgcctccgtggccttctgcacgtctcccatggctaagctcggaagactgccagatcacctgataaaggacctgtttggtgacaaggaattccttcctcaatccgcctttcttaagtggcttggaacacacgtgtgcacacatgtcatcttgaaggagctgtgcggaaacctttgcttcctgctgtgcggattcaatgagcgcaacctcaacatgtcacgcgttgatgtctacaccactcacagcccggctggcacctccgtgcagaatatgctccactggtcccaggctgtaaagttccagaaatttcaagccttcgactggggctcatcagcaaagaattactttcattataaccagtcatatcctcctacatataatgttaaggacatgttggtgccgactgcggtctggtctggcggtcacgactggctggctgacgtgtatgacgttaacattctcttgacccaaatcaccaacctggtcttccacgagagcattcctgaatgggaacacctcgacttcatctggggtctcgatgctccctggaggctgtataacaaaataattaatttgatgcgcaagtaccag

SEQ ID NO: 4937 - DNA, 1197 bp, Artificial Sequence
  derived and/or modified sequence
atgaagatgaggtttttgggcctggttgtgtgcttggtcctgtggaccttgcatagcgaaggttcccgaggaaaactgacggccgtggacccagagactaacatgaatgtgtccgaaatcattagctactggggtttcccaagtgaggagtatttggttgagaccgaggacggttatatcctgtgcctcaatcgaattccgcatggccgcaagaatcatagcgacaaggggccgaagcctgtggtctttctccaacacggtttgctggccgattctagcaattgggttaccaacttggccaactcttccttggggttcattctggctgatgctggttttgatgtgtggatggggaatagcagggggaacacttggtctagaaagcataaaacactgtccgtgagtcaggatgagttctgggccttttcctatgacgaaatggcaaagtacgatctgcccgcttccattaacttcatccttaataaaactgggcaggaacaggtctactatgttggtcattcccagggcacgactattggcttcattgccttctcccagatccccgaactcgctaagcggatcaaaatgttttttgcactgggccccgtggcctctgtggcattctgtacctccccaatggctaaactgggaaggctgcctgaccacctgataaaggacctctttggcgacaaagaatttctcccacagtccgcgttccttaagtggctgggcacccacgtgtgcacccatgtaatcctgaaagaactctgtgggaatctgtgcttcctgctgtgtggctttaacgagaggaatctgaatatgtccagggtggacgtatacaccacacacagcccggccggcacgagcgtccagaacatgcttcactggtcccaagccgtgaagtttcagaaattccaggccttcgactgggggagctcagccaaaaactactttcattacaaccagtcttatccacctacctacaacgtgaaagatatgcttgtccctaccgctgtgtggtcaggcggccatgactggctggctgacgtttatgatgtcaacattctgctgacacaaataacaaaccttgtcttccatgagtctattcctgaatgggaacatctggactttatctgggggctggatgccccttggcggttgtataacaagattataaatcttatgcggaagtaccag

SEQ ID NO: 4938 - DNA, 1197 bp, Artificial Sequence
  derived and/or modified sequence
atgaagatgcgattcttgggcctggttgtgtgtctggtcctttggaccctgcactcggagggttccagaggcaaactgaccgccgtggatcccgaaaccaacatgaacgtgtcagaaatcatctcatattggggttttccttcagaagaatacctggtggagactgaggacggctacatcctctgcctgaataggatccctcacgggcgcaaaaatcactcagataaaggtcctaagcctgtcgtgtttttgcagcacggactcctggccgactcatccaactgggtgaccaatcttgcaaacagttccctgggcttcattctagctgatgccggtttcgatgtgtggatgggcaacagccgtggaaatacctggtctcggaaacacaaaacactcagtgtctcacaagacgagttctgggcgttctcctacgatgagatggccaagtacgatcttcccgcatctatcaacttcattttgaataaaacaggccaggaacaagtctactatgtgggtcacagtcaggggacgacaatcgggtttatcgccttttcacagatcccagagctcgccaagcgtattaaaatgttctttgccctgggacctgtggccagcgtggcattctgcacttctcccatggccaagttgggacgcctgccagaccacttgattaaagacttattcggggacaaggagtttctgccccaatctgcattcctcaagtggctggggacccatgtatgtacgcacgtaatcttaaaggagctgtgcggcaacctttgctttctgctttgtggttttaatgagcgaaatctcaacatgtccagagtggatgtctataccacacacagtccggccggtacctcagttcaaaacatgttacactggtcccaggcagtgaaatttcagaaatttcaggcattcgactggggctcttctgccaaaaactattttcactataatcagagttatcctcccacttacaatgtgaaggacatgctggtccctacagctgtatggtccggagggcacgattggcttgccgatgtgtacgacgttaacatcttgcttacccagataacaaatctcgtcttccacgaatccattcccgagtgggagcacttggattttatatggggtttagacgctccctggcgcctatataataaaattataaatctcatgaggaagtatcag

SEQ ID NO: 4939 - DNA, 1197 bp, Artificial Sequence
  derived and/or modified sequence
atgaaaatgcggtttctgggccttgtggtctgtctggtgctgtggaccctgcactcagaggggtctcgtggaaagcttacagcagttgaccctgaaaccaatatgaatgttagtgagatcattagctactggggatttccatccgaggagtacctggtcgaaactgaagatggttatatcttatgcctcaatcgaataccacacggccggaaaaaccatagtgataagggtccaaagccagttgtttttttacagcacggtctgctggccgatagctcaaattgggttacaaacctggccaattcttcgctaggctttatcctggccgatgccgggttcgatgtgtggatgggtaacagcagaggaaatacttggtctcgcaagcacaagacgctgagcgtctcgcaggacgagttctgggctttctcctatgacgagatggccaaatacgacctgcccgcttcgataaactttatactgaacaagacgggtcaagaacaggtgtactacgtcggtcacagccagggtaccacaatcgggttcatcgcattctcgcagatccccgagctggccaagaggattaagatgttttttgctcttggacctgtggctagtgtggcattttgtactagtccaatggcaaagcttggtagactacccgaccatctgatcaaggatctttttggagacaaggagtttttaccacaaagtgccttcctcaaatggctcgggacccacgtgtgtacccacgtgatactgaaagaactctgcggtaacttatgtttcttgttgtgcgggttcaatgaacgcaatttaaatatgagcagagtggacgtatacactacacatagtccggcaggtacatcagtccagaatatgctccactggtcacaggccgtgaaattccagaagttccaggcattcgactgggggagtagtgctaaaaattacttccactataaccaatcatacccgccgacatacaacgtaaaagatatgcttgtgcctacggcagtgtggtctggtgggcacgactggctcgctgatgtgtatgatgttaacattctcctgacccagattacaaacttggtgttccatgagtccattccggagtgggagcatctcgatttcatttgggggctcgatgccccttggagactctacaataaaatcattaaccttatgcggaaatatcag

SEQ ID NO: 4940 - DNA, 1197 bp, Artificial Sequence
  derived and/or modified sequence
atgaagatgcgttttctgggattagttgtgtgccttgtgctctggaccttacactcagagggctcacggggcaagctaaccgccgtggatcccgaaactaacatgaatgtctccgaaatcatttcatattggggtttcccctccgaggagtacttggtggagacagaagacgggtatatactgtgccttaatcgcattcctcacggcagaaagaaccacagtgacaagggtccaaagccagtggtctttctgcagcacgggctcctagccgactcctctaactgggtgactaacctggcaaacagtagcctgggtttcatcctggctgacgcaggttttgacgtttggatgggtaactctagaggcaacacttggtccaggaagcacaaaactctcagtgtgagtcaggacgagttctgggccttttcatacgacgagatggcaaaatacgacctgccggcttcgatcaactttatcctcaataagaccggacaggagcaggtgtattatgtgggtcattcacagggcactacaatcggattcatagctttctcccaaattccagaactggctaagcgcattaaaatgtttttcgccctggggcccgtcgcgagcgtggcattttgtacatcccccatggcgaagctcggtcgcctgccagatcatctgattaaggacctctttggagataaggagttcctcccgcagagcgcttttttgaagtggttgggcactcatgtttgtacccatgttatcctcaaggagctttgcggcaatttgtgctttctgctgtgtggttttaacgaacggaatctgaacatgtctcgggttgacgtgtacacgacgcactctccagccggcacctctgtccagaacatgttgcattggtcccaggctgttaaatttcagaagtttcaggccttcgattggggctcttctgcgaagaattactttcactacaatcagtcttaccctccaacctacaacgtaaaagacatgttggttccaactgcagtgtggagtggagggcacgattggctcgctgacgtttatgatgtcaacatactgctgacacagataactaatctggtattccacgagagcatacctgaatgggaacatttagactttatctggggccttgacgccccatggcggctgtataataaaattattaacttgatgagaaagtatcag

SEQ ID NO: 4941 - DNA, 1197 bp, Artificial Sequence
  derived and/or modified sequence
atgaagatgcggttcctcggcctggtggtgtgtctcgtgctgtggacccttcattcagaaggtagccggggcaagctcacggccgtggaccctgagactaacatgaatgtctccgagattatctcctactggggtttcccgagcgaggagtacctggtggaaactgaggacggctacattctttgcttgaaccgcatcccacatggaaggaaaaatcatagcgataagggtccgaagccagtggtgtttctgcaacacgggctgttggctgatagctcaaactgggtgactaatctcgcgaacagctctctgggcttcatccttgctgacgcgggtttcgatgtgtggatgggaaatagccgcggaaatacttggtcccggaagcacaagaccctgtcggtcagccaggatgaattctgggcgttctcgtacgacgagatggcgaagtacgacctcccggcgtctatcaatttcatcttgaataagaccggacaggaacaagtgtattacgtgggtcactcgcaaggaaccacgatcggcttcatcgcattctcccaaattcccgagttggcaaagagaattaagatgtttttcgcccttggcccagtggcctccgtcgctttttgcacctccccaatggcgaagctgggacggctgccggatcacctcatcaaggatctcttcggagacaaggagttcttgccgcagtccgcctttcttaagtggctgggaactcacgtttgtactcacgtcatcttgaaggagctctgcggaaacctgtgcttcctcctctgcggattcaacgagagaaatctgaatatgagccgggtcgacgtctacactactcatagcccggccgggacctcggtgcaaaacatgctccactggtcccaggccgtgaagttccagaagtttcaggcctttgactggggatcatcggctaagaattactttcattacaaccaatcatacccgccgacctataatgtgaaggacatgctggtgccgaccgcggtctggtcgggagggcatgattggctggcggatgtgtacgacgtgaacatcctgttgacccagatcaccaacctggtgttccatgagtccatcccggagtgggaacacctggacttcatctggggcctggacgcaccttggcgtctgtacaacaaaatcatcaatcttatgagaaaataccag

SEQ ID NO: 4942 - DNA, 1197 bp, Artificial Sequence
  derived and/or modified sequence
atgaagatgcgctttctggggttggttgtgtgtctggttctttggacactccactccgaaggtagccggggcaagctgaccgccgtggatcccgagactaatatgaacgtgtccgaaatcatttcgtactgggggtttccatccgaagagtatctcgtggagactgaggacggctatatactgtgcctcaatcggattccacatgggcggaagaaccatagcgacaaagggccgaagcctgtggtctttttgcagcatggattgttagcagattcaagcaactgggtcaccaatctggcaaattcgtcattgggctttatacttgccgacgccggattcgatgtttggatgggaaatagtaggggcaacacatggagtcgcaagcacaaaactctgagcgtgtcccaagacgaattctgggccttcagttacgatgaaatggccaagtatgacttgccggcttctattaacttcattctgaataagaccgggcaagaacaagtctattatgtgggacattcacaaggtacaaccatcggattcattgccttcagccagatcccagaattggctaaaaggatcaagatgttctttgcgctgggcccagtggcgtccgttgcattttgcactagtcccatggccaagctgggtagactgcctgaccacctgatcaaggaccttttcggagataaggaattcttgccgcagagcgcatttttgaagtggctcgggacacatgtgtgtacccacgtcattctgaaggaattgtgcggcaacctctgcttcctgctatgcggctttaacgagcgcaacctaaatatgtccagggttgatgtatacactacgcactcaccagcaggcaccagcgttcagaatatgttgcattggtcacaggctgtgaagttccagaaattccaagccttcgattgggggtccagcgccaaaaactacttccattataatcaaagttatccccctacctataacgtgaaagacatgctcgttccaactgcagtctggagtggcggacacgactggttggctgatgtttacgacgttaacattctcctgacacagatcaccaaccttgtttttcatgagtccatccccgagtgggagcaccttgatttcatttggggtctggacgccccttggagactatataataaaattattaatctcatgcgtaagtaccag

SEQ ID NO: 4943 - DNA, 1197 bp, Artificial Sequence
  derived and/or modified sequence
atgaagatgagattcctgggacttgtggtgtgtcttgtcctgtggacattacattctgaaggatccagagggaagctaaccgccgtggacccggagaccaatatgaatgttagcgagataatttcttattggggctttcctagtgaagagtacctagtagagacggaggacgggtatatcctgtgccttaatcggatcccacacggacggaagaatcacagtgataagggcccaaagccagtggtgtttctccaacacgggctgctcgcagactcgtcaaactgggtgaccaatctggccaactcctcgctgggtttcatccttgccgacgctgggttcgatgtgtggatgggaaatagtcgggggaacacctggtcacgaaagcataagacactgtccgttagccaggacgagttctgggctttttcatatgatgagatggccaagtacgacctacctgcatccatcaatttcatcctcaataaaactggccaggaacaggtatattatgtgggccatagtcagggcactacaatcgggttcattgcatttagccagattccagagctcgccaaacggataaagatgttcttcgcattggggccagtcgcttctgtggccttctgcacctcccctatggccaaactcggccgcctgcctgatcatctgatcaaagacttgttcggcgacaaagaattcctgccccaaagcgcctttctgaaatggctgggcacacatgtgtgcacacatgtcattctgaaagagctgtgcggaaatctatgcttcctactctgtggcttcaacgagagaaacctgaacatgagcagggtggatgtgtacaccacacatagcccggctggaacaagcgtacagaatatgctgcattggagccaggctgtaaagttccagaaattccaggctttcgactggggatcctctgctaaaaactatttccattataaccaatcttacccccctacctacaatgtcaaggacatgctggtgcccactgcagtgtggagtggcggacatgattggctcgccgatgtgtatgatgtaaatattctcttaacccaaatcaccaatctggtctttcacgaaagcattccagagtgggaacacttggactttatctggggactagacgccccttggcgcctctataacaaaatcatcaatttaatgcgcaaataccag

SEQ ID NO: 4944 - DNA, 1197 bp, Artificial Sequence
  derived and/or modified sequence
atgaagatgcggtttcttggactggtcgtttgtctcgtcctttggactctgcacagcgagggcagcaggggaaagttgacagcggtggaccctgagaccaacatgaacgttagcgagattattagttattggggctttccgtcagaggaataccttgtggaaaccgaagatggatacattctgtgcctcaacaggattccacacggccgaaagaatcattctgacaaggggcctaaacccgtagtattcttgcagcatggcttactcgccgactcatctaactgggttactaatctggcgaattcatctctggggtttattctggccgacgctgggtttgatgtgtggatgggcaacagcagaggcaacacttggtcacgcaagcataagacgctttctgtatcccaggatgagttctgggctttttcctatgacgagatggccaaatatgatttaccagcgtcgattaatttcattctgaacaagacagggcaagaacaggtgtactatgtgggtcacagccaaggtacgaccattggttttatcgccttttcgcagattcctgagttagctaaacggatcaaaatgtttttcgcgctggggcctgtagcctccgtagccttctgcacatctcccatggctaagctgggtagactgcctgaccacctgataaaagatctgtttggcgacaaggaatttctaccacaatctgcatttcttaagtggcttggtactcacgtatgtacccacgtcatcctgaaggagctgtgcggtaacctctgcttccttctgtgtgggtttaacgaaaggaacctaaacatgtccagggtggatgtatataccacccactcaccagccggaacttcagttcagaatatgttgcattggtcgcaggccgttaagttccaaaagttccaggctttcgattggggaagttccgctaaaaattatttccactacaaccagtcctatcctccgacatacaacgtgaaagacatgctggtgcccaccgcagtatggagtgggggacacgactggctggcggatgtttacgatgtgaacatcctgttaactcagataaccaatcttgtctttcacgagagcatccctgaatgggagcaccttgattttatctggggcctggatgcgccatggcgtctttataacaaaataatcaatcttatgcggaagtatcag

SEQ ID NO: 4945 - DNA, 1197 bp, Artificial Sequence
  derived and/or modified sequence
atgaaaatgcgctttctgggactggtggtgtgcctggtgctgtggaccctccactcggagggatcgcggggaaagctgacggccgtggaccccgaaactaacatgaatgtgtcagagatcatttcctactggggtttcccaagcgaagagtacctggtggaaacggaggacggctacattctgtgcctgaacaggatcccccacggaaggaagaaccatagcgacaaggggccgaagcctgtggtgtttctccagcatggactgctggcggattcatccaattgggtcaccaatctggcaaactcctcgctcggcttcattctggcggatgcaggtttcgatgtgtggatgggcaacagccgggggaatacttggtcaaggaaacataaaacgctcagtgtgtcacaggacgaattctgggcgttctcctacgatgaaatggccaagtacgatctgcctgcttccatcaacttcatactgaacaagaccgggcaagaacaagtctactacgtcgggcacagccaaggaaccactatcggattcatcgcttttagccaaatccccgagctggccaaacggatcaagatgtttttcgcgctcggcccagtcgcatccgttgccttctgcacttcgccgatggccaaactggggcgcctgccggaccacctcatcaaggatctgttcggagacaaggaattcttgccgcaatccgcattcctgaagtggctgggaacccatgtgtgtactcacgttatcctgaaggagttgtgcggcaacctctgttttctgctctgcggattcaacgaaagaaacctgaacatgtcgcgcgtcgacgtgtacacgacgcactcaccggccggtaccagtgttcagaatatgctgcactggtcgcaggccgtgaagttccagaagttccaggccttcgactgggggagcagcgcgaagaactacttccattacaaccagtcctaccctccgacctacaacgtgaaagatatgttggtgccgaccgccgtgtggtccggaggccacgactggttggccgacgtgtacgacgtgaacatcctcctgacccaaatcactaacctcgttttccacgagtccattccagagtgggaacatctggattttatctggggcctggacgccccttggcggctgtacaataagattatcaatctcatgcggaagtaccag

SEQ ID NO: 4946 - DNA, 1197 bp, Artificial Sequence
  derived and/or modified sequence
atgaagatgcggttcctgggccttgtagtgtgccttgtgctttggaccctgcacagcgagggatcgcgcggaaaactgactgccgtggacccagaaactaacatgaatgtctcagaaatcatctcgtactggggctttccgtcggaagagtacttggtggagactgaggacggatacatcttgtgtttgaaccgaatcccgcacggacgcaagaatcattccgacaaggggccaaagccggtggttttcctccagcacggtttgctcgcggatagctcgaactgggtgactaacctcgccaacagctcccttggattcatcctggccgacgctggcttcgatgtctggatgggaaattcgaggggaaacacctggtcccggaagcacaaaactctgtctgtgtcgcaggacgaattctgggcgttcagctacgacgaaatggcgaaatacgacctcccggcgtccattaactttatcctcaacaagactggacaggagcaggtgtactacgtggggcacagccaggggactacgattgggttcatcgccttctcccagattccagaactggccaagcgcatcaaaatgttctttgctttgggccctgtggcgtccgtggccttctgcactagcccaatggccaaacttggacgcctgcctgaccacctgatcaaagatctcttcggggataaggaattcctcccgcagtccgcgttcctgaagtggctgggcactcatgtgtgcacccacgtgatcctgaaggagctctgcggaaacctgtgcttcctcctgtgtggcttcaacgagcggaatctcaacatgtcccgggtggacgtctacactacccactccccggccggaactagcgtccaaaacatgttgcactggtcccaggcagtgaagttccagaagttccaggctttcgactggggatcctctgcgaagaattactttcactacaatcaaagctaccctccgacgtacaacgtgaaggacatgctggtgccaactgcagtgtggtcggggggccatgactggctggctgatgtgtacgatgtcaatattctgctcacccagatcaccaacttggtctttcatgaatcaatccctgaatgggaacatctcgatttcatctggggccttgacgccccgtggcggttgtacaacaagatcatcaatctgatgcgcaaataccaa

SEQ ID NO: 4947 - DNA, 1197 bp, Artificial Sequence
  derived and/or modified sequence
atgaagatgcggttcctgggcctggtggtgtgtttggtcctttggactttacattctgagggttccagaggcaaattgaccgccgtggatcctgaaaccaatatgaacgtgtccgaaattattagctattggggtttcccatcagaggagtatcttgtggaaactgaggatggctacatcctttgtctgaaccggatcccgcacggaagaaagaatcactccgataaaggccctaaaccagtggtctttttgcagcatggtctgctggcggactcctcaaactgggtcactaacctcgctaatagctccctaggttttatacttgccgatgccggatttgacgtgtggatgggcaatagccgcggtaacacctggtctcgcaagcataaaacactgagcgtcagccaagatgaattctgggcgttttcctatgatgagatggcgaaatatgacctccccgctagtatcaactttatccttaataagaccggccaggaacaagtctactacgtcggccacagccaaggaacgaccattggattcattgccttctcccaaatccccgaactggcaaagcggataaaaatgttctttgcactgggtcccgttgccagtgtggctttttgtaccagccccatggccaaactcgggaggctccctgaccacttaataaaggatctgttcggagataaggagttcttaccgcaatccgcattcttaaaatggctgggcactcatgtgtgcacccatgtgatcctgaaggagctgtgcggtaatctgtgttttctcctttgcggctttaacgaaaggaaccttaacatgtccagggtggatgtgtacacgacgcattcaccagccggtacctcagtgcagaatatgctgcactggtctcaggcagtgaaatttcagaaattccaggcttttgattggggcagctctgcgaaaaactactttcattacaatcaaagctatcctccaacctataacgttaaagatatgcttgtgcccacagcagtctggagtggcgggcatgactggctagcagatgtgtatgatgtgaatatcttgttgacacagataaccaacctggtttttcatgagtcaatcccggagtgggaacacctcgacttcatttggggattagacgctccgtggcggctttacaataaaattatcaacttaatgaggaagtaccag

SEQ ID NO: 4948 - DNA, 1197 bp, Artificial Sequence
  derived and/or modified sequence
atgaaaatgcggttcttgggactggttgtgtgcctggtgctgtggactctgcactccgagggatcgcgggggaagctgaccgccgtggacccggaaactaatatgaatgtgtcggaaatcatctcatattggggcttcccttcagaggagtacctggtggaaaccgaggatggatatatcctgtgcctgaaccgcatcccacacgggcgcaaaaatcatagcgacaagggaccgaagcctgtcgtgttccttcagcacggactgctcgcggactcgagcaactgggtgactaatctggctaattcctcccttggtttcatcctcgcagatgcgggatttgacgtgtggatggggaactcaagaggaaacacttggtcccggaaacataagactctgagcgtgtcgcaggacgaattttgggccttttcctacgacgaaatggctaagtacgatctgccagcctccatcaacttcatcttgaataagactggacaggagcaagtgtactacgtcggccactcgcaaggaactacgatcggattcatcgccttcagccagatccctgagctggcgaaacgcatcaaaatgttcttcgcactcggtccggtggcgtccgtggccttctgtacttcgcccatggcgaaactgggccggctgccggatcacttgatcaaggacctcttcggcgacaaggaattcttgccacagtcggcattcctgaagtggctcggcactcacgtctgcactcatgtgatactgaaggagttgtgcgggaatctgtgcttcttgctttgtggattcaatgagcgcaatttgaacatgtctagggtcgacgtgtacactacccattcgcctgcaggaacttcagtccaaaacatgctccattggtcccaggcggtgaagttccagaaattccaggcgttcgattggggctcctcggccaagaattacttccattacaatcagtcgtacccaccgacttacaatgtgaaggatatgctggtcccaaccgccgtgtggtctggcggtcacgactggctcgccgacgtgtacgatgtgaatatcctcctcacgcagatcacgaacctggtattccacgagagcatccccgaatgggagcacttggatttcatctgggggttggacgccccatggcgcctgtacaacaagattatcaacctcatgcggaagtaccag

SEQ ID NO: 4949 - DNA, 1197 bp, Artificial Sequence
  derived and/or modified sequence
atgaagatgagattcctcggtttggtggtgtgtttggtgctttggactctgcattcggagggaagcagaggaaaactgaccgcagtggacccagaaaccaatatgaacgtgagcgaaatcatctcctactggggattcccatccgaggagtatctggtggaaactgaagatggctacatcctgtgccttaatagaatccctcacggccggaagaatcattcggataaaggacctaagccggtggtctttctgcagcacggcctcctcgcagactcgtcaaactgggtgactaacctcgctaactcaagcctgggcttcatcctggctgacgccggattcgatgtctggatgggaaactcgcggggcaacacttggtcgaggaaacataagactctctcggtgtcgcaggacgaattctgggcgttttcctacgacgagatggcgaagtacgacctcccggcgtctatcaatttcatcttgaacaaaaccggccaggaacaagtctactacgtgggccattcccaaggcaccactatcggatttatcgcgttctcgcaaatcccggagctcgccaaacgcattaagatgttctttgccctcggaccagtggcttctgtcgcgttctgcacttcgccgatggctaagctggggcgccttccggatcacttgatcaaagacctgtttggagataaggaattcctgccacaatcggcgtttctgaagtggttgggaacccacgtgtgcacccacgtgatactgaaggaactgtgtgggaatctctgttttctcctctgcggatttaacgaacgcaatttgaacatgtccagggtcgatgtgtacaccactcactccccagcaggaactagcgtgcagaatatgctgcactggtcacaggccgttaagttccagaagttccaggcctttgactggggttcctcagctaagaactacttccactacaaccagtcgtaccccccaacctacaacgtgaaggacatgctggtcccgactgctgtgtggtccggcggccacgactggctggcggacgtgtacgacgtcaacatcctccttacgcaaatcactaatctggtgttccatgaatcaatcccggagtgggaacatctggatttcatctggggactggacgccccgtggcgactgtacaacaaaatcatcaacctgatgcgcaagtaccaa

SEQ ID NO: 4950 - DNA, 1197 bp, Artificial Sequence
  derived and/or modified sequence
atgaagatgaggttcctgggattggtggtttgtctggtgctgtggaccctgcacagcgagggcagccggggcaagctgacggctgttgatccagagaccaatatgaatgtgagtgagattatcagctactggggtttccctagcgaagaatatctggtagaaacggaggacggatatatcctctgcctgaaccgcataccccatggtcggaagaaccacagcgataagggccctaagcccgtcgttttccttcaacatggtctgctggccgactcgtctaactgggtcacgaacctcgctaacagtagtctgggattcatactggcggacgccggcttcgacgtgtggatgggcaactcccgcggtaatacttggtcacgaaaacacaagaccctctcggtcagtcaagatgagttttgggctttctcctatgacgagatggctaaatacgacttgccggcctctattaattttatcctcaacaaaacagggcaggagcaggtctactacgtcggacactctcagggcaccaccatcggtttcatcgccttctcccagattccagaactggcaaaacggattaagatgttcttcgccttgggtccggtggcctctgtagccttctgtacctcaccgatggccaaattggggcgtctccccgatcatctgattaaagatctctttggcgacaaggaattcctcccgcagtcggcgttcctgaagtggctaggcacacacgtctgcactcatgtcatcctgaaggaattgtgcggcaacctgtgctttctgctgtgcggtttcaacgagagaaatctgaatatgtctcgcgtggatgtgtacacgacacacagcccagctggcacctcggtgcagaacatgctgcactggagccaggcagtgaagtttcagaaatttcaggcttttgattggggctcctccgcgaagaattattttcactataaccagtcgtacccaccaacttataatgttaaggatatgctggttcccacagctgtttggagcggaggccacgactggctcgcggatgtctatgatgtgaacatcctcctgacgcagatcactaacctggtattccatgagagcattcccgagtgggaacacctcgacttcatctggggtcttgacgctccgtggcggctgtacaacaagattatcaacttgatgcgcaaataccag

SEQ ID NO: 4951 - DNA, 1197 bp, Artificial Sequence
  derived and/or modified sequence
atgaaaatgagattcctaggcttggttgtgtgcttggtgctgtggacgctccatagcgaggggtccagggggaagctgacggcagtagatcctgagacgaacatgaacgtctctgagataatttcctactggggctttccatcggaggaatacctggttgagaccgaagacggatatatactatgtcttaatagaattccgcacgggagaaagaaccattccgacaaaggccccaagcccgtggtgtttcttcagcatgggttgctcgcagattctagcaactgggtgacaaatctggccaactcgagtctagggtttattctagccgacgccgggttcgacgtgtggatggggaatagtcgagggaatacctggtcacggaagcacaagaccctgtccgtttcccaggatgaattctgggccttttcctatgatgagatggccaagtatgacctccccgcttctattaatttcatactcaacaaaaccggccaggagcaagtatattacgtggggcattcgcaggggactacaataggcttcatcgctttcagccagatacctgagcttgctaaacgcattaagatgttctttgctcttggccctgttgctagcgtggctttttgcacgtctcccatggccaaattaggacgactcccagaccacctcatcaaagatctattcggcgataaggagtttctgccacagagtgctttcctgaagtggcttgggactcacgtgtgcactcacgtgattctgaaggaactctgcggcaacctgtgcttcttgctctgcggattcaacgagcgtaacctaaatatgtcaagagtggatgtttatacaactcacagtcctgctggcacgtctgtgcagaacatgctgcactggtctcaggcagtgaagttccagaagtttcaggcatttgattggggatcttctgccaagaattacttccactacaaccagtcatacccacctacgtataacgttaaggatatgctcgttcccaccgcagtctggtcagggggacatgactggctggcagacgtttatgatgttaacattctcctgacccagataacaaatttggtatttcatgagtccatccccgagtgggagcatctggacttcatatgggggttggacgcaccctggcgcttatataataagatcattaaccttatgcgcaagtaccag

SEQ ID NO: 4952 - DNA, 1197 bp, Artificial Sequence
  derived and/or modified sequence
atgaagatgcgctttctcgggctggtggtgtgcctggttctgtggaccctccacagcgaaggttcccgcggaaaactgactgctgtggacccggagactaacatgaacgtcagcgagatcatttcctactggggtttcccctcggaggagtacctggtggagactgaagatggatacatcctgtgcctgaatcggatacctcatggtcgtaagaatcactcggataagggcccaaaaccagtcgtgtttctgcagcatggactcctcgcggactcctcgaactgggtcaccaacctcgccaactcgtcgctgggattcattctggctgatgccggattcgatgtctggatgggcaactcgagaggcaacacttggagccgcaagcacaaaaccctgagcgtcagccaagatgagttctgggcattctcgtacgacgaaatggcgaaatacgatctcccggcctccattaactttatcctgaacaagactggacaggagcaggtctactatgtggggcattcccaggggacgactattgggtttatcgccttcagccaaatccccgaactggcaaagagaatcaaaatgttctttgcgctggggcccgtggcctcggtggccttctgcactagcccgatggccaagctgggccggctcccagatcacctgatcaaagacctgttcggagataaggaattcctcccacagagcgcttttttgaagtggctggggactcatgtgtgcacccacgtcattctgaaggaactctgcggaaacctgtgttttctcctgtgcggatttaacgagagaaatctcaacatgtcacgggtcgatgtgtacaccacccactcgcctgcgggcacctccgtgcagaatatgttgcattggtcgcaagccgtcaagttccagaaattccaggccttcgactggggatcgtccgctaagaactatttccactacaaccagagctacccgcctacttacaacgtgaaggatatgttggtgccaaccgcggtgtggtcaggaggacatgattggctggcggatgtctacgacgtgaacatcttgctgacccagatcaccaatctggtattccacgaaagcatccccgaatgggaacaccttgactttatctggggattggatgccccttggcggctgtacaacaagatcatcaatctcatgcgcaagtaccag

SEQ ID NO: 4953 - DNA, 1197 bp, Artificial Sequence
  derived and/or modified sequence
atgaaaatgcgctttcttggcctggtggtgtgcctggtgttatggacactgcactctgagggaagccgaggcaagcttaccgctgtggacccggaaaccaacatgaatgtcagcgaaattatatcttattggggctttccgagtgaggagtacctcgtcgagaccgaggacggctacatcctttgtcttaaccgtattcctcatggacgcaaaaatcattctgacaaaggccccaagcccgtggtctttctacagcatggacttctggctgactccagtaactgggtaactaaccttgcaaactcaagcctcgggtttatactggctgacgccgggttcgacgtttggatgggcaattctcgcggcaatacatggagcaggaaacacaagactctgtccgtgtcacaagatgagttttgggccttctcatacgacgagatggcaaagtatgacctgcctgcaagtattaactttatcttgaataagaccggtcaagaacaagtgtattacgtgggacactcccaggggactacgattgggtttatagcgttttcccagattccggagctagccaagaggattaaaatgtttttcgctctcgggccagtcgcgagcgtcgctttttgtacatcccccatggcaaaactgggaaggctccctgaccatttgatcaaggatctgttcggtgataaagagtttctccctcagagcgcctttctgaagtggctgggcacacacgtctgtacgcacgtgattctaaaagaactgtgcggcaacctatgcttcctactgtgcggtttcaatgagagaaatctcaacatgagtagagtagacgtctatacaacccattcccccgccgggacaagcgtgcagaatatgcttcactggagtcaggccgtgaagtttcagaaattccaggcattcgactgggggtcttccgctaagaactattttcactacaatcagagctatccaccaacctataacgtgaaagatatgttggtaccgaccgcagtgtggagtggtgggcatgattggctggcagatgtctatgacgtgaacatcctccttacccagattacgaatctggtgttccatgagagcatccctgagtgggagcacctcgatttcatctggggattggacgctccttggcgcctgtataacaagataattaacctgatgcgcaaatatcag

SEQ ID NO: 4954 - DNA, 1197 bp, Artificial Sequence
  derived and/or modified sequence
atgaagatgagattcctggggttggtggtctgccttgtgctctggaccttgcacagcgaaggttcgagaggcaaactgaccgcagtggacccggaaaccaacatgaacgtgtcggaaatcatttcgtactggggctttccgtcggaggaatatctggtggagactgaggacggatacatcctgtgcctgaatcgcatccctcatggacggaagaatcactcggacaaggggccgaagccggtggtgtttctccagcatggactcctggctgatagcagcaactgggtgaccaatcttgcaaactcctccctgggatttatcctggcggacgccgggtttgatgtctggatgggaaactcgcgcggcaatacttggagccggaagcacaagaccttgtctgtgtcccaagatgaattttgggcgttctcgtacgacgagatggcaaaatacgatctgccggcttcaatcaacttcatcctgaacaagactggccaagaacaggtgtattacgtgggacattcacagggaaccactatcggtttcatagccttctcgcagatccctgaactcgctaagagaatcaagatgttctttgcactcgggccggtggcctccgtggcgttttgcacttcaccgatggctaagctcgggagactgccagaccatctgatcaaagacctgttcggagataaagagtttctccctcagagcgcctttctgaaatggcttggcactcacgtctgtacccatgtcatcctcaaagagctctgcgggaatctttgcttcctcctctgtggctttaacgagcgcaacctgaatatgtcacgcgtcgatgtgtacactacccactcaccggccggaaccagcgtgcagaacatgctccactggagccaggccgtcaagttccagaagttccaggcttttgactgggggtcgtccgcgaagaattacttccactacaaccaatcgtaccctccaacttataacgtgaaagacatgctcgtaccaactgctgtgtggtccggtggacacgactggctggcggacgtgtatgatgtgaacatcctgctgacccagatcaccaacctggtctttcacgaatccattccggagtgggaacacctggacttcatttgggggctggatgcaccgtggcgcctgtacaataagatcatcaacctgatgcggaaataccaa

SEQ ID NO: 4955 - DNA, 1197 bp, Artificial Sequence
  derived and/or modified sequence
atgaagatgcgattcctggggctggtcgtttgcctggtcctgtggacacttcattccgagggatcgaggggcaaactcacagctgtggatcctgagactaatatgaatgtctcagaaattataagctactgggggtttccatctgaggagtacctcgtcgagacagaagacggctacatcctgtgtctgaacagaatcccacatgggcgaaaaaaccactcagacaaaggcccaaagccggtcgtctttctgcagcacggcctgctggccgacagtagcaattgggtgactaacctggcaaattcctccctgggattcatccttgccgatgccggcttcgacgtctggatgggtaactctcgaggcaatacttggagtagaaaacataagacattgagtgtatctcaggatgaattttgggcattctcgtatgacgagatggcgaaatatgaccttcccgcttcaatcaattttatactgaataagacgggtcaggagcaggtgtactatgtgggacactcccagggcaccaccattggcttcatagccttcagccagatccctgaactggctaaacggattaaaatgttcttcgccctgggtccagtggcaagcgtggctttttgcacttcccctatggcgaaactgggccgactcccggaccatctcattaaagacctcttcggagataaggaatttctcccacaatcggcctttttgaagtggcttggtacccatgtgtgtacacacgtcatcctgaaggagttgtgcggtaatctttgctttctgctgtgcggattcaatgaaagaaatctcaacatgtcccgggttgacgtctatacaacgcattcgccagccggcacctccgtgcagaacatgctgcactggagtcaggcggtgaaatttcagaagttccaggctttcgactgggggagttcagcaaagaactactttcattacaatcagtcttacccaccaacctacaacgtgaaagatatgctggtgcctacggcagtttggtctggtggtcatgattggttggccgatgtgtacgatgtgaatattctgctgactcagatcactaacctggtattccatgagagcatccctgagtgggaacacttggacttcatttggggcctagatgctccctggcgactgtacaataagatcattaacctgatgcgcaagtaccag

SEQ ID NO: 4956 - DNA, 1197 bp, Artificial Sequence
  derived and/or modified sequence
atgaagatgcgctttcttggacttgtggtctgccttgttctgtggactttgcactccgagggatcgagaggtaagctgaccgccgtggatcccgaaaccaatatgaatgtgagcgagataatctcgtactggggattcccttccgaagagtatctcgttgaaactgaggacggctacatcctttgtctgaacagaataccgcatggtcgaaaaaaccatagcgataagggcccaaagcctgttgtgttcctccaacacggccttctcgcagacagctccaactgggtgaccaatcttgcaaattcttcactgggttttatcttggcggacgccgggtttgatgtctggatgggtaacagcagagggaatacgtggagccggaagcacaagaccctgagcgtgtcgcaggatgagttctgggcatttagctacgacgaaatggcaaaatacgatctgccggcctctattaacttcatactgaacaagactggacaagaacaggtgtactacgtgggtcattcacaaggcactaccattggattcatcgctttttcacaaattccagagttggctaagcggatcaaaatgtttttcgcgttggggcccgtggcatcggtcgctttttgtactagcccaatggcaaagttggggcgtctgcctgatcacttgatcaaggacttgttcggagataaagaatttctgccacagtccgcctttcttaagtggctgggtacgcacgtctgtacccatgttatccttaaggaactctgtggtaacctctgttttctgctgtgcggttttaacgagagaaaccttaacatgtcccgcgtggatgtgtacaccactcattcgccagcaggaacttcggtgcagaacatgctgcattggagccaagcagtgaagttccagaaattccaggcatttgactggggaagcagcgcaaagaattactttcattacaaccaatcctatcccccaacttataacgtgaaggatatgcttgtgccaaccgcagtgtggagcggtgggcacgattggctggctgatgtatacgacgtgaacatcctcctcactcagattaccaatctcgtgtttcatgagtcaattccagaatgggagcatctcgatttcatctggggcctggacgcaccttggaggctttacaacaagattatcaacctcatgagaaagtaccaa

SEQ ID NO: 4957 - DNA, 1197 bp, Artificial Sequence
  derived and/or modified sequence
atgaaaatgcggttccttggactcgtggtctgtcttgtgctgtggaccctccactccgagggctcccgagggaagctcaccgcagtcgaccctgagacgaacatgaatgtcagcgagatcatatcatactggggattcccgagcgaagagtacttggtggaaactgaggacggatacatcctctgcctgaaccggattccgcacggaaggaagaaccatagcgacaagggccccaagccagtggtctttctgcaacacgggctcctggctgattcgtcaaactgggtgactaatctggcgaactctagtctcggattcatcctggcagacgctggtttcgatgtgtggatgggaaattcccggggcaacacttggtcgcgtaaacacaaaactctttccgtgtcgcaagacgagttctgggccttctcctacgatgaaatggccaagtacgacttgcccgcgagcattaactttatcctgaataagaccggacaagagcaagtgtattatgtgggccactcgcagggtactaccatcggatttatcgccttctcgcagattccggaactcgcaaagcgcatcaagatgtttttcgcgttgggaccggtggcttccgtcgcgttttgcaccagcccgatggcgaaacttggccggctgccagaccatctcatcaaagatctgttcggggataaagaattcctcccacagtcggcctttctgaaatggttgggcactcatgtttgcactcatgtcatcctgaaggagttgtgcggaaatctgtgttttctgttgtgcggattcaatgagcgcaacttgaatatgtcgcgcgtcgacgtctacactacgcattcgccagccggaacctcagtgcagaacatgcttcattggtcgcaagcagtgaaattccagaagttccaggcctttgattggggttcgtccgccaagaattacttccactacaaccagtcatacccaccgacttacaatgtgaaggatatgctggtgccgactgcggtctggtcgggaggccatgattggctggccgacgtgtacgatgtgaacatcctgcttacccagatcactaacctggtatttcatgaatctatcccggaatgggagcacctggacttcatatggggattggacgccccgtggcgcctttacaacaagatcattaatctgatgcggaagtaccag

SEQ ID NO: 4958 - DNA, 1197 bp, Artificial Sequence
  derived and/or modified sequence
atgaagatgcgtttcttgggacttgtggtgtgcctggtcctgtggactctccatagcgaaggctcgcgcggtaaactgactgccgtggatccagagacgaacatgaatgtgtcggagattatctcgtactggggttttccatcggaggagtaccttgtcgagacggaggatgggtacatcctctgcctgaacaggattcctcacggacgtaagaatcactcggacaagggtccaaaacccgtggtgttcctgcagcatggattgctcgcagattcgtcaaactgggtgactaacctcgcgaatagctcgcttggcttcattctggcggacgccggcttcgatgtctggatggggaactcgaggggtaacacttggtcgcgcaagcataagaccctgtctgtctcgcaggacgaattttgggcattttcatatgacgaaatggcaaagtacgatcttcctgcttccatcaacttcatcctgaataagaccggacaggaacaggtctactacgttggccatagccagggaactactatagggttcattgcattttcccaaatccccgagctcgctaagagaataaagatgttttttgcattgggccctgtcgcctcagtcgcgttctgtacctccccaatggctaagctcggcagactccctgaccatctgattaaagacctttttggcgataaagagtttctgccccaatcagccttcctcaagtggttgggtacccatgtgtgcacccatgtgattcttaaagaactgtgtggaaacctctgtttccttctttgtggatttaacgaacgaaacttgaatatgtctagggtcgacgtgtacaccacccattcccccgcggggacctcagtgcagaacatgcttcactggagccaggcagtgaagttccaaaagtttcaagcgtttgattggggtagctctgcgaagaactactttcactacaaccaatcctacccacctacgtacaacgtgaaggatatgttggtgccgaccgccgtgtggtccggcggacacgattggctcgcggatgtgtacgatgtcaacatcctgcttacccaaattacgaacctcgtgttccatgaaagcatcccggagtgggaacaccttgacttcatttggggacttgacgccccctggaggctttacaacaagatcatcaacctgatgcgaaagtatcag

SEQ ID NO: 4959 - DNA, 1197 bp, Artificial Sequence
  derived and/or modified sequence
atgaagatgcgctttcttgggctcgttgtctgtctggtcctctggactctgcattcagaagggagccgcggcaaacttaccgctgtggacccagagactaatatgaatgtgtctgagatcatcagctactgggggttcccaagcgaggagtatttggtggaaactgaggacgggtatatcctgtgcctaaatcgaattccacacggccgtaagaaccatagcgataaaggacccaaaccagttgtctttctccagcacggcctgctcgctgactctagcaactgggtcaccaacctcgccaacagcagcctggggtttatccttgctgacgccggcttcgacgtttggatgggaaactctcgcgggaacacatggtctcggaagcacaagacactctcagtgagccaggatgagttctgggcgttcagctatgatgaaatggctaaatacgaccttcctgcttctatcaactttatcctgaacaagacagggcaggagcaggtctactatgtgggccattctcaaggcactacaataggcttcatcgccttctctcagatccctgagcttgccaagcgtatcaagatgttctttgcactgggacctgtggcgagcgtggctttttgtacctcgcccatggccaagctgggcagactccccgaccacttgatcaaggaccttttcggcgacaaagaatttctgccacagagcgcattcctgaagtggctgggaacccacgtgtgtacacacgtgattcttaaggagctgtgtgggaacctttgcttcctgctctgcggttttaacgaaagaaatctgaacatgagtagggtagacgtgtacaccactcacagcccagctggcaccagtgtgcagaatatgttgcactggtcgcaagcagtcaagtttcagaagttccaggccttcgattggggtagctctgccaagaattattttcattataaccaaagctatccacctacatacaacgttaaggatatgctggtccctactgctgtgtggtccggaggacacgactggctggccgatgtttacgatgtgaatatcctgttgacccagataacaaacctggtttttcacgaaagtatacctgagtgggagcatctcgacttcatttgggggttggacgctccctggcgcctgtacaacaagataatcaacctgatgagaaagtatcag

SEQ ID NO: 4960 - DNA, 1197 bp, Artificial Sequence
  derived and/or modified sequence
atgaagatgcggttccttgggttggtggtgtgcctggtgctgtggacgttgcacagtgagggtagccgaggcaagttgacggcggtcgacccggagacgaatatgaatgttagcgaaatcatttcttattggggtttcccatccgaggagtatctggtggagacggaagatggctacattctgtgcttgaaccgcatccctcatggtcgcaagaatcatagtgacaagggtcccaaacctgtcgtatttcttcagcacggtctgctggcagacagctcgaactgggtcaccaatctggcgaacagcagcctgggcttcatattggcagatgcgggcttcgatgtttggatggggaatagcagaggcaacacgtggagccgtaaacataagaccttgtccgtcagccaggacgaattttgggcgttttcttacgatgaaatggcaaagtacgatctgccagcgtctattaattttattctgaacaagactggtcaagaacaggtctattatgttggacacagtcagggcaccaccatcggcttcattgcgttcagccagattccagaactggcaaaaaggattaaaatgttttttgctctgggtccggtagcgtccgtagctttttgcaccagcccgatggctaagctgggaagactgccggatcatttgatcaaggacctgttcggagacaaagaattcctgccgcagtccgctttcctgaaatggttgggtacgcatgtttgcacccacgtcatcctgaaggagctgtgcggcaacctgtgctttctgctgtgcggtttcaacgaacggaatctaaatatgagcagagtggatgtgtataccactcatagccctgccggtacctctgttcagaacatgttgcattggtcacaggctgtgaaatttcaaaagtttcaggcctttgattggggtagctccgccaaaaattacttccattataatcagtcctatccgccgacctataatgttaaggatatgctggttcctactgccgtctggagcggcggccacgattggctcgctgacgtttacgacgttaatattctgctgacccagattaccaatctcgtgttccacgaatctatccctgagtgggaacatctggattttatctggggactggacgccccgtggcgtttgtataacaagatcatcaatctgatgcggaaataccag

SEQ ID NO: 4961 - DNA, 1197 bp, Artificial Sequence
  derived and/or modified sequence
atgaagatgagatttctgggactggtcgtctgtctggtgctgtggaccctgcactcggagggatcgcgaggcaaactcactgcggtcgatccggaaaccaacatgaacgtgtcagaaatcatctcgtattggggattcccgtcagaggaatacctggtggaaaccgaggatggatacatcctctgtcttaatcggatcccacatggaaggaagaaccactcggacaagggacctaagccggtggtctttctgcagcatggacttttggcggactcaagcaactgggtgactaatctggccaacagcagcctgggattcatcctcgcggacgcaggattcgacgtgtggatgggtaattcgcgggggaacacttggtcgcgcaagcataagaccctgtccgtttcgcaagacgaattctgggccttctcgtacgatgaaatggctaagtacgatctgccggccagtatcaactttattttgaacaaaaccggccaggagcaggtgtactacgtcggacacagccaaggaactaccattggtttcatcgcattctcacagatccctgaattggccaaacgcatcaagatgtttttcgcacttgggcctgtggcttccgtggctttctgcaccagcccaatggccaagctcggacggctgccagatcaccttatcaaggacctgttcggggataaagagtttctcccacagtccgccttcctcaagtggctcgggacccacgtgtgcacccatgtgatcctgaaagagctctgcggtaatctgtgcttcctcctctgcggcttcaacgaaagaaacttgaatatgtcgcgcgtggacgtgtatactactcactcccccgcgggcacgagcgtgcaaaacatgctccattggtcccaggccgtcaagttccagaagttccaggccttcgactggggttcctccgcaaagaattacttccactacaatcaatcatacccaccgacgtacaatgtcaaagatatgctggtgccgaccgcggtatggtctggcggccatgactggcttgccgatgtttacgacgtcaacatcctgctgactcagattactaatctcgtgtttcacgaaagcatccccgagtgggagcacctggactttatctggggactggacgctccgtggaggctgtacaacaaaattatcaacctgatgcgcaagtaccaa

SEQ ID NO: 4962 - DNA, 1197 bp, Artificial Sequence
  derived and/or modified sequence
atgaagatgcggttcctgggccttgtggtgtgtctcgtgctgtggaccctccattcagaaggatcgcggggcaaacttaccgcagtggatcctgagactaacatgaatgtgtcggagattatctcctactggggatttccttcggaagagtaccttgtggaaaccgaagatgggtacattctctgccttaacagaattccccatggtagaaagaaccactcggataaaggccctaaacctgtcgtgttcctgcaacacggactgctggcagattcttccaactgggtgaccaatttggctaattcatcccttggttttatcctggcagacgccggatttgatgtttggatgggaaattcccgcggaaacacctggtcgcgcaaacataagacccttagcgtctcgcaagatgaattttgggcattctcttacgacgagatggccaagtacgatctgcctgcttcaattaacttcatccttaacaaaaccgggcaggaacaggtctactacgtgggacattcacagggaaccactataggctttattgcattttcacaaattccggagctcgcaaagcggattaagatgttcttcgccctgggtcctgttgctagcgtcgcattctgtacctcgcccatggcaaagctgggacggctgcccgaccatcttatcaaggacctcttcggtgataaagaatttctgcctcaaagcgcatttcttaagtggctgggaacccacgtgtgtacccacgtgattctcaaggaactttgtggtaacttgtgttttcttctctgtggttttaacgagcgcaatctgaacatgtcacgtgtggatgtctacactacgcattcgcctgccggaacctccgtgcagaacatgctgcattggtcccaggcagtgaaattccaaaagttccaagcatttgactggggatcatcagcgaagaactactttcattacaaccagtcctaccctcctacctacaatgtgaaggatatgcttgtgcccactgcagtctggtcaggcggtcatgactggcttgcagatgtgtacgatgtcaatatcctccttactcagatcaccaacctggtgtttcatgagagcatacctgaatgggaacatcttgatttcatctgggggctggatgcaccgtggaggttgtacaacaagatcatcaaccttatgaggaagtaccaa

SEQ ID NO: 4963 - DNA, 1197 bp, Artificial Sequence
  derived and/or modified sequence
atgaaaatgagatttctaggcctggttgtgtgccttgtgttgtggactcttcattccgagggaagtagagggaagctcaccgcagtggatccagaaactaacatgaatgtatcagaaattatttcatattgggggtttccaagcgaagaatatcttgtagagacggaagatggatacatcttgtgtttgaatcgcatcccacacggtagaaagaaccacagtgataaaggaccgaagccggtggtctttctacagcatggtctattggcagactcctctaactgggtgacgaaccttgctaatagctctttagggtttattttggcggacgctggatttgatgtttggatgggcaattcacgtggtaatacttggagtcgtaagcataagacgcttagtgtttcgcaagatgaattctgggcattttcgtatgatgaaatggcaaagtatgatctcccagcatctattaacttcattctgaacaagacaggacaagaacaggtttactacgtcggacattcgcaaggaactacaattggatttattgctttttcgcaaatcccagaattggccaagaggatcaaaatgttttttgctttgggtccagttgcatcagtcgctttttgcacttcgcccatggccaagcttggaaggcttccagaccatttgattaaagatttgttcggagacaaggaatttctacctcaaagtgcttttctcaaatggctgggtactcacgtctgtactcacgttattttgaaagaactttgtggcaacttgtgtttcctcctttgcggctttaatgaacgcaacctaaacatgtctcgtgtggatgtgtacaccactcatagtcctgcaggcacttctgttcaaaatatgttgcattggtcccaagcggtcaaatttcagaagtttcaggcattcgattgggggtcttcggcgaagaattatttccactacaatcaaagctatccacccacctataatgtcaaagacatgttggtaccaacagcggtctggtctggaggccacgattggttggctgatgtgtacgatgtaaatattctcttgactcaaatcaccaatttggtgtttcatgaatcaatccctgagtgggaacatcttgattttatttggggacttgatgcaccctggaggctgtacaataagattataaacttgatgagaaaataccag

SEQ ID NO: 4964 - DNA, 1197 bp, Artificial Sequence
  derived and/or modified sequence
atgaaaatgcgtttcctaggtctagtggtttgcctagttctgtggacattacatagcgagggctcccggggcaagctcaccgccgtagaccccgagaccaacatgaatgtgtctgagattatctcatactgggggtttccttccgaagagtacctggtggaaacagaagacggctacatcctgtgtttaaatcgtattcctcatggtcggaagaatcactcagacaaaggacccaagccggtggtcttcctgcagcatgggcttctggcagattcctccaactgggttacaaacttggcaaatagttcactcggtttcatccttgccgatgccgggtttgacgtttggatggggaactctcggggcaacacttggagccggaagcataagacgctgagtgtgtctcaggacgagttctgggcgttttcatacgacgaaatggccaagtacgatcttccagcgtccatcaacttcatcctgaacaagaccgggcaggaacaggtgtactacgtgggtcactcgcagggtacaaccatcggattcatagcattttctcagatccccgaattggccaaaagaataaaaatgtttttcgccctcggcccagttgcctccgttgccttttgtacgtcccccatggcaaagcttggacgcctcccagatcatctgatcaaagatctcttcggagacaaagagtttctgcctcagagcgccttcctgaaatggctagggactcacgtgtgcacccacgtgatactgaaagaactgtgcgggaacctgtgttttctcctttgtggattcaacgagcgaaacctgaatatgtccagggtcgatgtgtatacgactcacagtcctgccggcaccagtgttcagaacatgctgcactggagccaagcagtgaaatttcaaaagttccaggcttttgattggggctcttccgctaagaactacttccactacaaccagtcttatccgccgacatataacgtgaaagacatgcttgtacccacggccgtgtggtcgggtggacacgactggctcgccgacgtatatgacgtgaatatcctgctgacccagataaccaacctggtttttcatgagagcatccccgaatgggagcaccttgacttcatttggggactggatgccccctggcgcctctacaacaagataatcaacctgatgagaaagtatcag

SEQ ID NO: 4965 - DNA, 1197 bp, Artificial Sequence
  derived and/or modified sequence
atgaaaatgcgcttcctcgggctggtagtgtgcctggtgctgtggactctccactcagaaggctcacggggaaaactcaccgctgtggatccggagactaatatgaatgtctctgaaatcatctcctactggggttttccatccgaagagtatttggtggaaactgaggacggttacatcctgtgtctcaatcggatccctcacggaagaaagaaccacagcgacaagggccccaaacctgtcgtctttcttcaacacggactgctcgctgactcgtccaattgggtgactaacctggccaactcctcactcggatttatcctcgccgatgcgggatttgacgtgtggatgggaaattcgcggggaaatacttggtcaagaaaacataagacgctgtcagtgtcgcaggatgaattctgggcctttagctacgatgaaatggccaagtacgatcttccggcgtcgatcaacttcatcttgaacaagacgggccaggagcaggtctactacgtcggccactcgcaagggaccacgattggatttatcgcattctctcagatcccggaactcgctaagcgcattaagatgttctttgctctgggacccgtggcaagcgtggccttctgcacttcaccgatggcaaagctcggacgactgcctgatcatctgatcaaagatctgttcggagacaaggagttcctgccacaatcagcattcctcaagtggctgggtactcacgtgtgcacccacgtcattctcaaagagctctgtggaaatctgtgctttctgctgtgcggatttaacgaacgcaacctcaatatgtcgcgggtcgacgtgtacaccactcactcgccagccggaacctcggtgcaaaacatgctgcactggagccaagctgtgaagttccaaaagttccaagcgtttgattggggctcatcggctaagaattacttccactacaatcaaagctatccgcctacgtacaacgtgaaagacatgctggtacccaccgccgtgtggtcgggcggacacgattggctcgcggacgtgtatgatgtgaacatccttctcacccagatcactaacctggtgtttcatgagtccatcccggagtgggaacacctcgacttcatctgggggctggacgctccatggaggctgtacaacaagatcattaacctcatgcgcaagtaccaa

SEQ ID NO: 4966 - DNA, 1197 bp, Artificial Sequence
  derived and/or modified sequence
atgaagatgcggtttctgggactggtggtgtgtctggtcctttggactcttcacagcgaaggttcaagaggcaagctgactgcagtggatcccgaaaccaacatgaatgtctccgaaatcatttcctactggggcttcccatcggaagagtaccttgtggaaaccgaggacggatacattctctgcctgaaccgcatacctcatgggaggaagaatcattccgataaaggacccaagccagtggtctttcttcaacacgggttgctcgccgatagctcgaactgggtaaccaatctggcgaactcctcgcttggattcattctcgcagacgccggcttcgatgtgtggatgggcaactctcgaggaaacacttggtcacggaagcataaaactctctcagtgtctcaggacgaattttgggccttttcttacgatgagatggcgaagtacgatcttcctgctagtatcaactttattctcaacaagaccgggcaggaacaagtgtactacgtgggacatagccaagggaccacgatcggtttcatcgcgtttagccaaattcctgaactggccaagaggataaagatgtttttcgctcttggtcccgtcgcttcggtggccttctgcacttcgccaatggcaaaattgggcagactgccagatcacctgattaaggatcttttcggtgataaagaatttctgcctcagagcgcgtttctcaaatggctgggaactcatgtgtgtacccatgttatcctcaaggagctctgtggaaacctctgtttcctcctgtgcggctttaatgaaagaaatcttaacatgagccgtgtggacgtgtacaccacccactcgccagcaggaacttccgtccaaaacatgcttcattggagccaagcagtgaagtttcagaaatttcaagcatttgactggggttcttccgcaaaaaactactttcactataaccaatcttaccctccgacctataatgtcaaggatatgcttgtcccgacggcagtctggtccggaggtcatgattggttggcagatgtgtacgacgtaaacattttgttgactcagataaccaaccttgtgttccatgagtcaattcctgagtgggagcaccttgatttcatctggggtctggacgcaccgtggagactgtacaataagattatcaatctgatgcgaaagtaccag

SEQ ID NO: 4967 - DNA, 1197 bp, Artificial Sequence
  derived and/or modified sequence
atgaaaatgaggtttttaggtcttgtggtttgccttgttttatggactttgcacagcgaaggatctcgaggtaaattaaccgcagtggatcccgaaactaatatgaacgtttctgaaattatttcatattggggtttcccttctgaagagtaccttgtggaaactgaagacggttacatcttgtgcctcaacagaatcccacatggaagaaagaatcacagtgataagggtccaaaacctgtagttttcctacaacatgggctcctagctgattcctctaactgggtgactaatcttgcaaattcatcactgggtttcattttggcagatgccggttttgacgtttggatgggcaacagtagggggaacacttggtctcgcaaacataaaacactctctgtttcacaggatgaattctgggctttcagctatgacgaaatggctaaatatgatttaccggcatccatcaattttattcttaataagaccggtcaggaacaagtttattacgtcggtcactctcaaggaaccacaatcggattcatcgcttttagtcagattcctgagcttgctaagcggattaagatgttctttgcccttggacctgttgcatctgtagccttctgcactagccctatggcaaaactcggtaggttacctgatcatcttattaaggacctttttggtgacaaggagtttctgccccaaagtgcttttcttaagtggctgggtacacacgtgtgcacacatgttatactaaaagaactctgtggcaatttgtgcttccttctctgcggtttcaacgagcgcaatcttaacatgtccagagttgatgtctacactacccattcacctgccggaacatccgttcagaacatgttgcactggtcacaagctgtcaaatttcagaagttccaagcttttgattggggttcttcagctaagaactatttccattataatcagagttacccccctacatataatgtgaaagatatgttagtgcctactgctgtatggagtggcggtcatgattggcttgcagacgtttatgatgttaatattctattgacccaaataactaaccttgtttttcatgagtcaattcctgagtgggaacaccttgattttatttggggattggacgccccttggaggctgtataataaaataataaaccttatgagaaaataccaa

SEQ ID NO: 4968 - DNA, 1197 bp, Artificial Sequence
  derived and/or modified sequence
atgaaaatgcgcttcctgggtctggtggtctgcctggtgctgtggaccctccatagtgagggatcacgaggaaaactgacggctgtggatccggagacgaacatgaatgtgagcgagatcatctcctactggggcttcccatcagaagaatacctcgtggaaaccgaagatgggtacatcctgtgtctcaacagaatcccgcatggacgaaagaaccacagcgataagggaccaaagccagtggtgttcttgcagcacggcttgctcgcggactcctccaattgggtgacgaatctggcgaattcgtccctcggattcatcttggcagacgcgggcttcgacgtgtggatgggaaattcacgtggaaacacttggtcgagaaaacacaagaccctgagcgtgtcccaggacgagttctgggccttttcgtacgacgaaatggccaagtacgacctgcctgctagcatcaatttcatcctgaataagactggccaagagcaagtctactatgtcgggcacagccaaggcactacgattggtttcattgcgttttcacaaatcccagaactggccaagcgcatcaagatgtttttcgcgctcggacccgtagcctcggtggccttctgtacgtccccaatggctaagctgggtcgcctgccggaccatttgattaaggatctctttggggacaaggaattcctcccgcagagcgcgtttttgaagtggctgggcactcacgtgtgcacccacgttatcttgaaggagctgtgcggaaacctgtgcttcctgttgtgcggcttcaacgaacgcaatcttaacatgtcgagagtggatgtgtacactacccattcacccgcaggaacttctgttcagaacatgctgcactggtcccaggccgtcaagttccaaaagttccaggcctttgactggggaagcagtgccaaaaactacttccattacaaccagtcctatccgccgacctacaacgtgaaggatatgctcgtcccgactgccgtctggtcgggaggacacgattggctggcggacgtgtacgatgtcaatatcctgctgacccagatcaccaatctcgtgtttcacgaatcgattccggagtgggaacatctggacttcatctgggggcttgacgcgccctggagactgtacaataagatcatcaaccttatgcggaagtatcag

SEQ ID NO: 4969 - DNA, 1197 bp, Artificial Sequence
  derived and/or modified sequence
atgaagatgaggtttctcgggcttgtcgtctgcctcgtgctgtggactcttcattccgaggggtcgagaggaaagctgactgcagtggaccctgaaaccaatatgaacgtgtccgagattatctcttactggggctttccttcggaagagtaccttgtggaaaccgaagatggctacattctttgcctgaatcgcataccacatggcagaaagaatcattccgacaaaggacccaagcctgtggtgtttctgcagcatggactccttgctgattcgtcgaattgggtgaccaaccttgcaaactcgtccctcggtttcattctggctgatgcaggtttcgatgtctggatgggaaacagcagaggtaatacctggtcccgcaaacacaagaccttgtctgtgtcccaagatgagttttgggcatttagctacgatgaaatggcaaaatacgacctgccagcctcgatcaactttattctgaataagactggtcaggaacaagtgtactacgtcggacatagccaaggcaccacgatagggtttattgcattctcccaaattcctgaactggccaaacgcatcaaaatgtttttcgcactcggtcctgtggcatccgtggccttttgcactagcccaatggcgaagctgggccgactccccgatcatttgataaaagatctgttcggagataaagaatttctccctcaaagcgcatttcttaagtggttgggaacgcatgtctgtactcatgtgatactgaaggaactgtgtggcaacctttgctttctgttgtgtggattcaatgaacgtaatcttaacatgtcccgtgtggatgtgtacactacgcattcacccgcgggaacgtcggtgcagaacatgctgcattggtcccaggcagtgaaatttcagaagtttcaagccttcgactggggttcgagcgccaagaactactttcattacaatcagtcgtatccccccacctacaacgtgaaagatatgcttgttcctacggcggtgtggtcagggggacatgactggcttgctgacgtgtacgatgtcaacatcctgcttactcaaatcacgaatctggtgtttcatgaatccatcccagagtgggagcatcttgacttcatctgggggctggatgctccatggcggctctacaacaagatcattaatctcatgcgtaaataccaa

SEQ ID NO: 4970 - DNA, 1197 bp, Artificial Sequence
  derived and/or modified sequence
atgaaaatgcgcttcctaggtctggtcgtttgcttagtattatggacactccattcggagggctcccgaggtaagttgacagccgtcgaccctgaaaccaacatgaatgtctccgagataatttcatactggggctttccgtcggaggagtatctggtggagaccgaagacggttatatcctctgtttgaatcggattccgcacggccgtaagaaccactctgataagggcccgaagcctgtcgttttcctgcagcatggtttgctagcggactcaagcaattgggtcacgaatctagcaaactcttcattgggctttatcctcgccgacgccggattcgatgtttggatgggcaactcccgcggaaatacgtggtctcgtaagcataaaactctctccgtatcgcaggatgagttctgggcattctcatacgatgagatggccaagtacgatctgccagcgtcaatcaatttcattttaaataagacgggtcaggaacaggtgtattacgttggacattctcaaggtacgacgataggattcatcgcattcagtcaaattccagagcttgcaaagagaattaagatgttttttgcccttggccccgtcgcatcggtcgccttctgtacttcacccatggccaaattgggacgcctccctgaccacttgataaaggacttgttcggagataaagagttcttgcctcagtcggctttcttgaagtggctcggtacccacgtctgcactcatgtcattctgaaagagttgtgcggaaacctgtgcttcttactctgcggattcaacgagcgtaatcttaacatgtcaagagtcgatgtatacacaacccactcgccagccggcactagcgtgcaaaacatgttgcattggtcccaggcagtcaaattccagaagttccaagctttcgattggggctcctcagccaaaaactatttccactataatcagagttaccctccgacgtataatgtcaaagatatgcttgtgccaactgcagtgtggtccggcgggcatgactggctcgcagacgtctacgacgtgaatattttgctcacgcaaatcacgaacctcgtgttccatgagagtatcccggagtgggaacacttggactttatctggggccttgacgcgccctggcgtctgtataataagattatcaaccttatgagaaagtaccag

SEQ ID NO: 4971 - DNA, 1197 bp, Artificial Sequence
  derived and/or modified sequence
atgaaaatgcgattcctcgggcttgtcgtatgtttggtcttgtggaccctgcactcagagggctctagaggtaaactgacagctgtagaccccgaaacgaatatgaatgtgagcgaaatcatttcctactggggtttcccatccgaggaatacctagtcgagacagaggacggatatattctgtgtctcaatcgaattccacatggccgcaagaaccactcagacaaggggccaaagcccgtcgtttttcttcagcacgggctgttggccgacagttctaactgggtgacgaacctcgccaatagcagtctggggttcatcttggccgacgccgggtttgatgtctggatgggaaacagtagagggaatacatggagccgaaagcacaaaaccctctcagtctctcaggatgaattctgggctttttcgtacgacgaaatggcgaaatacgatctgcccgcttctatcaattttatcctcaataaaacagggcaggaacaggtgtattacgttgggcactcccagggaactaccatagggttcattgccttctctcagatcccagagcttgcaaagcgcattaagatgtttttcgccctgggccctgtggcgtccgtcgccttctgcacctctcccatggcaaagttggggagacttcccgaccacctgataaaagacctatttggtgacaaagaattcttgccccagtcagcctttttgaagtggctcggaacacacgtttgtacacacgttatcttaaaggagctgtgcggcaacttgtgtttcttgctgtgtggatttaacgagcgcaatctgaacatgagtagggttgatgtatatacaacacacagtcccgctgggacatctgttcagaacatgctgcactggagtcaagcagtgaaatttcagaagtttcaggcgttcgactggggttcaagcgccaagaactattttcactataaccaatcctaccccccaacatacaacgttaaggacatgctggttcctactgccgtctggagtggcggtcacgattggttagcggacgtgtacgatgtgaacatcctgctcacgcagataactaacctcgttttccatgaaagcatccccgaatgggagcatctcgatttcatttgggggctagatgcgccctggcgtttgtacaataaaatcatcaatctgatgcgaaaataccag

SEQ ID NO: 4972 - DNA, 1197 bp, Artificial Sequence
  derived and/or modified sequence
atgaaaatgcggttcttgggccttgtcgtgtgtttggtgctgtggaccctccactccgagggtagccggggaaaactgactgcggtcgatcctgaaactaatatgaacgtgtcggagatcatatcatactggggttttcctagcgaagaatatctggtcgaaaccgaggacggatacatcctgtgcctgaacagaattccgcatgggaggaagaatcactctgacaagggccccaaacctgtggtctttctgcagcatggtcttttggccgattcgtcaaactgggtcactaatctggcgaactcatctttggggttcatccttgctgatgctggcttcgatgtgtggatgggcaatagccgcggtaatacctggtcacgcaagcataagaccttgtctgtgtcccaggatgagttctgggccttctcatacgacgagatggcgaaatacgacctgccggcgtctattaacttcatcctgaacaaaaccggccaagaacaagtgtactacgtcggccactcccaagggaccaccatcggatttatcgcctttagccagattcccgaactggctaagcggatcaagatgtttttcgcactgggacctgtggcctccgtggcgttctgcacgtccccgatggccaaactggggcgcctcccggatcatctcatcaaggacttgtttggtgacaaggaatttctcccacagtcagcattcctgaagtggcttggcacccacgtgtgcactcatgtgattctgaaggagctgtgcgggaacctgtgtttcctgctgtgcggattcaacgagcgcaacttgaacatgtcaagggtggatgtctacactacccactccccggcaggaacctcggttcagaacatgctccactggtcgcaagccgtgaagttccagaaattccaggcctttgactggggatcgagcgccaagaattacttccactacaaccaatcctacccgccgacttataacgttaaggacatgctggtgccgacggcggtctggtccggaggtcatgactggcttgcggacgtgtacgacgtgaacatcctcctcactcagatcaccaatctggtgttccacgaatcgatccccgaatgggagcatctggatttcatctggggattggacgccccctggcggctttacaacaaaatcatcaacctcatgagaaagtaccag

SEQ ID NO: 4973 - DNA, 1197 bp, Artificial Sequence
  derived and/or modified sequence
atgaaaatgaggtttttaggcctcgtcgtatgtctggtgctctggacactgcactcggagggctctagagggaagctgacagctgtggaccctgaaactaatatgaatgtttccgaaattatttcctactgggggttcccatctgaagagtatctggtggaaacagaggatggctatattttgtgcctgaatcgcattccgcatggtcgtaaaaatcactccgataaaggccctaaacccgtggtctttctgcagcacggtctcttggccgacagttcaaactgggtcactaacctggccaattcatccttgggttttattctggccgacgcggggtttgacgtgtggatgggaaacagtcgagggaatacgtggagccgaaagcataaaactctctcggtgagccaggacgaattctgggctttctcttacgatgagatggctaagtacgatctgcccgcttccattaatttcatattaaataagacgggtcaagagcaggtgtattacgtgggacactcacaggggactaccataggatttatcgcgttttcacagatccctgagcttgccaagcggattaagatgttttttgcactaggtcctgtagcttcagttgcgttttgtacatcccccatggcgaagctcgggagacttccagatcaccttataaaggatctctttggggacaaagaattcctgcctcagagtgcctttctcaagtggctcggaacccatgtgtgcacacacgtgatcctaaaggaactgtgtgggaatctgtgctttctcctttgcggattcaacgagagaaatctcaatatgagcagagtagacgtgtacaccacacactcacctgccgggacttccgtgcagaatatgttgcattggagtcaagcagttaaattccagaaattccaagcttttgactggggcagttcagccaaaaattacttccattacaaccaaagctacccacccacttacaacgtgaaggatatgctggtgccgactgcagtgtggtctgggggtcacgattggctggccgatgtgtatgacgtcaacattctcttgacccagatcacgaacctcgtgttccacgaaagcatccccgaatgggaacacttggactttatctggggtcttgacgccccatggcggctgtataataagattatcaacttgatgcgaaaataccaa

SEQ ID NO: 4974 - DNA, 1197 bp, Artificial Sequence
  derived and/or modified sequence
atgaaaatgcggttcctcgggctcgtggtgtgtctggtgctgtggactctccattcggagggcagccgcggaaagctcaccgcagtcgacccagaaactaacatgaacgtgtccgagataatctcatactggggatttccctccgaagaataccttgtggaaaccgaagatggatatatcctttgtctgaataggattccccacggaaggaagaatcactccgacaaaggaccgaagccagtggtctttcttcaacatggacttctggccgatagctccaactgggtgactaacctggcaaactcctcgctgggtttcatactcgcagacgcaggttttgatgtgtggatggggaactcacgaggcaacacctggtcccgaaagcacaaaactcttagcgtgagccaagatgagttttgggcattttcatacgatgaaatggccaagtacgatctgcctgcaagcatcaactttattctgaataagaccggacaggaacaagtctactacgtgggacattcacagggaaccacgattggttttatcgcattttctcaaatacctgagcttgcaaagcgcatcaaaatgttttttgcactcggtcctgtggcatcggtggcattttgcacttctcccatggctaaacttggaaggctgccagaccatcttatcaaggatctttttggcgataaagagtttcttcctcaatcagcgtttcttaagtggctgggtacccacgtttgtacccacgtgattcttaaagagctttgtggaaacctgtgctttcttctttgtggattcaatgaaagaaatctgaatatgtcgagggtggatgtctacactacgcattcgccagcggggacctccgtgcagaacatgcttcattggtcacaagcagtgaagtttcagaaatttcaagcgtttgattgggggtcctccgcgaaaaactactttcattacaaccagtcgtaccctccaacttacaacgtcaaggatatgcttgtgccaacggcggtgtggtccggcggacacgattggttggcggacgtgtacgatgtgaacatcctgctgactcagataactaacttggtgttccacgaatcgatccctgaatgggaacatctcgatttcatttggggcctggatgccccttggagactgtacaacaagataatcaatcttatgagaaagtaccaa

SEQ ID NO: 4975 - DNA, 1197 bp, Artificial Sequence
  derived and/or modified sequence
atgaaaatgaggttcctgggactggtagtgtgcctcgtcttgtggactctgcattcggaaggaagcaggggaaagctgaccgcggtcgatccagaaaccaatatgaatgtgtccgagataatctcatactggggattcccatcggaagaatacctggtcgagactgaagatggatacatcctgtgtcttaaccggatcccgcatggcagaaagaaccactccgataagggtcccaaacctgttgtgtttcttcaacacggtctgctcgcggattcctcgaactgggtaaccaatcttgcgaattcgtcgcttggattcattctggccgacgcgggatttgacgtctggatgggcaactcacgtggtaatacgtggagcaggaagcataagaccctttcggtcagccaggatgaattctgggcattctcatacgatgaaatggcaaagtatgacctgccagcttccatcaacttcatactgaataagactggacaagagcaggtgtactacgtgggacattcgcagggaaccactatcggattcattgctttctctcaaatacctgaacttgcaaaacggatcaaaatgtttttcgcacttggccccgtggcgtccgtggctttttgcaccagccctatggcgaagctcggacgcttgcctgaccacctgatcaaggacctcttcggagataaggagttccttcctcagtcggcttttcttaagtggttgggaacccacgtgtgtactcacgtgatcttgaaggagctttgtggcaacctgtgttttctgctctgtggatttaacgagagaaacctcaatatgtcgagagtggatgtgtacacgactcattcgcccgccggtacttccgtccaaaacatgctccactggtcgcaagcagtgaagtttcaaaagttccaggcatttgattggggatcatcagcaaagaattactttcattacaaccaatcataccctccgacttacaacgtgaaggacatgctggtcccaaccgccgtgtggtcgggtgggcatgactggctggcggatgtctatgatgtgaatattcttctcacccagattaccaacctcgtctttcacgaatcgatcccagaatgggaacatcttgatttcatttgggggctggatgccccatggagattgtacaacaagattatcaatctgatgcgcaagtatcaa

SEQ ID NO: 4976 - DNA, 1197 bp, Artificial Sequence
  derived and/or modified sequence
atgaagatgcgctttctgggcctcgtggtctgcctggtattatggacactccacagcgaaggctctcggggcaagctgacggcagtcgatccagaaaccaacatgaacgtcagcgagatcatctcctattggggctttccttcagaagagtacctggtcgagacagaggacggctacatcttgtgtcttaacaggattcctcacgggcgtaagaaccactctgataagggaccgaagcccgttgtgtttctgcagcatggactgcttgccgactctagcaattgggtgaccaatctggctaactccagcctcggattcatcctggccgatgcaggatttgacgtctggatggggaacagtaggggcaacacttggagccggaagcacaagaccctgagtgtgtcacaagacgaattttgggccttcagctacgacgagatggccaaatatgacctcccagccagtatcaactttattctgaataagaccggccaggaacaggtctattacgttgggcattcacaggggacgactattggtttcatcgccttctctcaaatccccgaactggcgaagcggattaaaatgttcttcgccttgggacctgtagcctcagtggctttttgtacgtcaccaatggccaaactgggacgccttccggaccacttaataaaagatctgttcggcgacaaggagttccttccgcaatccgctttcctgaagtggctgggcacacatgtgtgtactcacgtaatactgaaagaattgtgtggcaatttgtgtttcctgctatgcggctttaacgagcgcaaccttaacatgtcccgggttgacgtatatactacacatagcccagccggcacctccgtacaaaatatgctccactggtcccaggccgttaaattccagaagttccaagcgttcgactggggtagcagcgccaaaaactatttccattataatcaatcttaccctccaacctacaatgtgaaggatatgctggtccctacagcagtgtggagtggcggccatgattggctggccgatgtctacgatgttaatatactcctcacacagataaccaacctggtgttccatgagagtattccagagtgggaacaccttgactttatttggggattggacgctccatggagactctacaacaaaatcataaacctgatgcggaaataccaa

SEQ ID NO: 4977 - DNA, 1197 bp, Artificial Sequence
  derived and/or modified sequence
atgaagatgaggtttctcgggctggtcgtgtgcctcgtgctgtggactcttcactctgagggatcccgcggaaaacttactgccgtggaccccgaaaccaatatgaacgtgtcggaaatcatttcctactggggattcccgtcggaagaatacctcgttgagactgaagatggctacattctctgcttgaaccgtataccacatggaagaaagaatcattcagataagggccctaagcctgtggtgtttctccagcatggtctgcttgccgattcctcgaactgggtcaccaacctggcaaactcatcgcttggttttatcctcgcagatgcaggatttgacgtctggatggggaattcgagaggtaatacttggtccagaaagcacaagaccctctcggtttcacaagacgagttttgggctttcagctatgacgagatggccaaatatgatcttccagcatccattaactttatactgaacaagacgggtcaggagcaggtctactacgtggggcattcacaaggcacgactattggatttatcgcattttcccagatcccagaacttgccaaacgcattaagatgttcttcgcactgggaccagtggcaagcgtggctttttgtacctccccgatggcaaaacttgggcgtctccctgatcacctgattaaagatttgtttggtgacaaagaattcctgccgcaatccgcatttcttaaatggcttggaacccatgtgtgtacccatgtgatccttaaggagctgtgtggtaacctgtgtttccttttgtgcgggtttaacgagaggaatcttaacatgtcgcgcgtcgatgtgtacacgactcacagccctgctggaacgtcggtgcagaatatgttgcactggtcgcaagcagtgaagtttcaaaagttccaggcatttgactgggggtcgtcggcgaagaactactttcactacaatcaatcatacccccctacttacaacgtgaaggatatgcttgttccaaccgctgtgtggtctggtggacacgattggctggcagacgtctacgacgtgaacatcctcctcacgcaaataactaatttggtgttccacgaatccattcctgaatgggaacaccttgactttatctggggtctggacgcgccttggcggctctacaacaagatcattaatctgatgcggaagtaccag

SEQ ID NO: 4978 - DNA, 1197 bp, Artificial Sequence
  derived and/or modified sequence
atgaagatgaggttccttggcctcgtggtttgtctggtgctgtggactctgcactctgaaggttcccgcgggaaactcaccgccgtagatcctgagactaatatgaacgtttccgaaattatctcctactggggctttccttcagaagaatacttggtggaaacggaggatgggtatattctgtgcctgaatcgaatcccacacgggaggaagaaccactctgataaaggcccaaaacctgttgtgtttctccagcacggattgctggccgatagttctaactgggttacgaatctggctaactccagcctgggctttattctcgcagacgccgggttcgacgtctggatggggaattcccgggggaacacatggtccagaaagcataaaacactgtccgtgtcccaggacgagttctgggcgtttagttacgatgagatggccaagtacgaccttccagccagtatcaactttattctcaataaaaccggccaagaacaggtgtactacgtggggcactctcaggggaccaccattggcttcatcgctttcagccagatacctgagctggccaagcggatcaaaatgttttttgcactggggcccgtggccagcgttgcgttctgcacgtcccccatggctaaactgggaaggctgccagatcacctcattaaagatttgtttggagacaaagagttccttccccagagtgctttccttaagtggctgggcacccacgtctgtacgcacgttattctgaaagaactctgtggcaacctctgcttcctgctgtgtggattcaatgaacgcaatctgaatatgagcagggtcgatgtgtacactactcattctcccgccggaacatcagtgcagaatatgctgcactggtcccaggccgttaaatttcagaaatttcaagccttcgactggggaagctccgccaagaattattttcactataaccagtcataccctccaacatacaatgtaaaggacatgttggtgccgacagcagtgtggagtggcggccacgattggttggcagatgtctatgatgtgaatatcctgttgacacagattaccaatttggtttttcacgaatctatacctgagtgggagcacctggatttcatctgggggctggatgccccctggcggctgtataacaagattatcaatctcatgcggaaatatcag

SEQ ID NO: 4979 - DNA, 1197 bp, Artificial Sequence
  derived and/or modified sequence
atgaagatgcgctttctgggcctcgtcgtgtgtctcgtgctgtggaccttgcatagcgaagggtcgcgcggaaagctgacggcagttgacccggaaaccaacatgaacgtgtcagagatcatctcatactggggtttcccgagcgaagaatacctcgtggagacggaggacgggtacatcctctgcctcaaccgcatcccacatggcaggaaaaatcatagcgataagggaccgaaacccgtggtgttcctccagcatggcttgttggccgattcatcgaattgggtgactaacctcgcaaactcctcgctgggattcatccttgcggatgcgggcttcgatgtgtggatgggcaattcgcgcggaaacacgtggagccggaaacataagaccctgtctgtgtcgcaagatgaattttgggccttctcgtacgacgaaatggcaaagtacgacttgcctgcaagcatcaacttcatcttgaataagactggacaggaacaggtgtactatgtaggacactcgcaggggaccactatcggtttcattgcctttagccagatcccagagctggccaagcgcatcaagatgttcttcgcgctgggacctgtggcctctgtggccttctgcacttcgcccatggctaaactgggccgattgccggaccatttgatcaaggatctcttcggggacaaagaattcctgcctcaatcagcgtttctgaaatggctcgggacgcatgtctgcacccacgtcatcctcaaggaactgtgcgggaacctgtgtttccttctgtgcggattcaatgaaaggaatctcaacatgtccagagtggatgtgtacaccactcattcgccggcgggcacctcggttcagaatatgctgcattggtcgcaagcagtgaagttccagaaattccaagccttcgattggggttcctccgccaagaactacttccactacaaccaatcctacccacctacttacaacgtcaaagatatgcttgttcctaccgccgtgtggtcgggcggccatgattggctggcggacgtgtacgacgtgaacattctgcttacccagatcactaatctggtgttccacgaaagcatcccagagtgggagcacctcgacttcatttggggactggacgcgccgtggcgcctctacaacaagattatcaatcttatgaggaagtaccaa

SEQ ID NO: 4980 - DNA, 1197 bp, Artificial Sequence
  derived and/or modified sequence
atgaaaatgcgctttctgggtctggtggtgtgcctggtgctctggactctgcattcagagggctcgcgcggtaagctgaccgcggtggacccagaaactaatatgaacgtatccgagatcatctcctactggggatttccgtccgaagaatatcttgtggaaaccgaggacggatacatcctctgcctgaaccggatcccgcacgggcgcaagaaccatagcgataagggcccaaagccggtggttttccttcagcacggcctgctcgcggactcgtccaattgggtcaccaatctcgcgaattctagcttggggtttatcctggcagacgccggattcgacgtgtggatgggaaacagccggggaaacacctggtcccggaagcacaagaccctctccgtgtcgcaagacgaattctgggcttttagctacgacgaaatggctaagtacgacctgcctgcgtcaatcaacttcatcctcaacaaaacgggacaggagcaggtttactacgtgggtcactcgcagggaacgacgatcggctttatcgctttctcacagatcccggaacttgctaaacgcatcaaaatgtttttcgccctgggaccggtggcgagcgtggccttctgcacctccccgatggctaaacttggacggctgcccgatcatctgatcaaagatctgtttggagacaaggaattcctgccacagtcggctttcctgaagtggctgggaacccatgtgtgtacccatgtgatcttgaaggagctctgcggcaacctgtgcttcttgctttgcgggttcaatgaaagaaatctcaacatgagccgcgtggatgtctataccactcattccccagccggaacctcagtccaaaacatgctgcattggtcgcaggcggtgaagttccagaagttccaagccttcgattggggatccagcgccaagaattactttcactacaaccaatcgtaccccccaacttacaacgtgaaggacatgctggtgcctaccgcagtgtggagcggtggacacgattggctcgctgacgtctacgacgtcaatatcctcctgactcagattactaacctggtgtttcacgaatccattcctgagtgggagcacttggacttcatctggggactcgatgcgccgtggcgcctgtacaataagatcatcaacttgatgcggaagtaccag

SEQ ID NO: 4981 - DNA, 1197 bp, Artificial Sequence
  derived and/or modified sequence
atgaagatgcgcttccttggcctggtggtctgtctggtgctttggaccctccactcagaaggctcaagggggaagctgactgcggtcgatcccgaaaccaacatgaacgtctcggagatcatctcatactggggttttccttcagaagaatacctggtcgaaaccgaagatggatacattctttgtctgaacagaatccctcatggacggaagaatcactccgacaagggacctaagcctgtcgtgtttctccaacacgggctgctcgctgattcgtctaattgggtcaccaaccttgcaaactcatccctcggctttatcctcgcagacgcgggtttcgacgtgtggatgggtaactcgcgcgggaatacttggtcgcggaagcacaagactctgtcggtgtcgcaagatgaattttgggcattttcatacgacgaaatggcaaaatacgacctccctgcatcaataaactttatactcaacaagactggacaagaacaagtgtactacgtcggtcactcgcaggggactaccattggttttatcgcattttcccaaattccagaactggccaagagaatcaagatgttttttgcactgggacctgtggcgtcggtggcattttgtacttcgcctatggccaaattgggccggcttccggaccatttgataaaggatctcttcggagataaggagtttctgccccaatcggcattccttaaatggctcggaacgcatgtgtgtactcatgtcattcttaaagaactctgtggaaatctttgctttcttctttgcggatttaacgaacgtaacctcaatatgtctcgtgtagatgtctacaccacccattcccctgcaggtacctccgtgcagaacatgctgcactggagccaagccgtcaaatttcagaagttccaggcattcgattggggttcatcggcaaagaattacttccactacaatcaatcctaccccccgacttacaacgtgaaagatatgcttgtgccgaccgctgtgtggtccggaggacatgattggctggcagatgtgtacgatgtgaacatcttgcttactcaaattacgaatctggtgttccatgaatccatcccagaatgggaacatctcgacttcatctggggtttggatgccccttggaggctgtacaacaagataatcaaccttatgcgcaaataccag

SEQ ID NO: 4982 - DNA, 1197 bp, Artificial Sequence
  derived and/or modified sequence
atgaaaatgcgattcctcgggcttgttgtctgcctcgtcctctggacactgcattctgagggatctagggggaaactcacagctgttgatcccgaaactaacatgaatgtatcagaaatcatctcttattggggattcccttcggaagaatatctggtggagactgaagacgggtatattttatgtctaaataggatccctcatggacgcaaaaaccatagtgataaagggccaaaaccagtagtgttcttgcagcatgggttattggccgattcctctaactgggttacaaacttagctaattcctccctggggttcatactggcagatgctggattcgatgtctggatgggaaattcaaggggaaatacttggtcaaggaaacacaagactctgagtgtctcccaggatgaattctgggcattctcctacgacgagatggccaaatatgatctccctgcctctatcaactttatccttaataaaacagggcaggaacaggtctactacgtcggacatagtcagggaacaactatagggtttattgccttctcccagataccggagcttgctaaaagaatcaaaatgtttttcgctttggggccagttgctagtgtagcattttgtacttctcctatggcaaagctggggcgccttccagatcatctgataaaagatctttttggggataaagaatttctgccccaatcggcttttctcaagtggttgggaacacatgtatgtacacatgtgattctgaaagaactctgtggaaacctctgttttctactctgtgggttcaatgagcggaacttaaatatgtccagggtggatgtctacacaacacactctcctgcagggacatcagtgcagaatatgctccactggagtcaggcggtgaaattccaaaaattccaggctttcgattggggatcttcagcaaagaactatttccactacaaccagtcttatccgcccacttataatgtcaaagatatgctagtacctacagccgtttggtcagggggacatgattggctcgctgacgtgtatgatgtgaatattctgcttacacagatcacaaaccttgtgttccatgaatctattcctgaatgggaacacttagactttatctggggactggatgccccatggagactatacaataaaatcataaaccttatgaggaaataccag

SEQ ID NO: 4983 - DNA, 1197 bp, Artificial Sequence
  derived and/or modified sequence
atgaagatgagattcctagggctggtggtttgcctggtgttatggactctgcactcagaaggcagtcgcggcaagctgaccgctgtcgatccggagacaaacatgaacgtgagcgaaatcatctcatactggggcttccctagtgaggaatacttggtagagacagaagacgggtacatactctgcctgaataggattcctcatggccgcaagaatcactctgacaagggtcctaaacctgtggtgtttcttcagcatggactcctcgctgatagttccaattgggtgaccaatctggccaactctagtttgggatttatcttggccgatgctggctttgacgtttggatgggcaacagtcgtgggaacacatggtcccgaaaacacaagaccctcagtgtgagtcaagatgagttctgggcattcagctatgatgaaatggcaaaatacgatctgcccgcctccataaattttatcctgaacaagaccggtcaggagcaggtatattatgtggggcactcccaagggacaacaatcggcttcattgcattctctcagatccctgagttggcaaagcgaatcaagatgtttttcgcgcttggacccgtagcctctgtggccttttgtacatcccccatggccaagctcggacggttacctgaccatcttatcaaggatctttttggggacaaagaatttcttccccagtctgcattcctgaagtggttagggacccacgtatgcacacacgtgatcctgaaggaactctgtggcaatctctgctttctcctgtgcggattcaatgaacgaaatctgaatatgagccgagtggacgtatacactacacactctcccgccgggacttccgttcagaacatgctccattggtcccaggctgttaaattccaaaaattccaagcatttgattggggaagctcggccaaaaattatttccattacaatcaaagctatccaccgacatacaacgtcaaggacatgttagtgcctaccgctgtgtggtctggcgggcatgattggctagcggacgtgtacgacgtgaatattctgctaacccaaatcaccaaccttgtctttcacgaatccatcccagagtgggaacatttggatttcatctggggccttgacgccccatggcgtttgtacaataaaattatcaacctcatgaggaagtatcag

SEQ ID NO: 4984 - DNA, 1197 bp, Artificial Sequence
  derived and/or modified sequence
atgaagatgcgcttcttaggcttagttgtttgtctggttctttggacactccactcagagggctccagaggcaagttaacggccgtggatccagagacgaacatgaacgtttcagaaatcatttcctattgggggttcccaagcgaagaataccttgttgaaacagaagatgggtatattctttgcctgaatcgtattccgcatggtagaaagaatcactctgataaaggcccgaaacctgtggtattccttcagcatgggttactggcggatagcagcaactgggtaacgaaccttgcaaactcttcgctcgggttcatccttgcagatgcaggctttgatgtgtggatgggtaatagccgaggcaacacgtggtcaagaaaacacaagacattgagcgtaagccaggacgagttttgggcattcagttatgatgagatggccaaatacgatcttccggcctcaatcaattttattctgaacaaaactggccaagagcaagtctactacgttggacactctcaaggcacgacgattggatttattgcgttcagccagataccggaactggctaaacgcattaaaatgttttttgcactgggaccagtagctagcgttgcattttgtacgtcacctatggccaaattaggaagattacctgaccatttgatcaaggatctgtttggtgataaggaatttttaccgcaatcggcctttcttaaatggcttggtactcatgtgtgcacacacgttatcttgaaggaactttgtggaaatctgtgttttctactttgtggttttaacgagcgaaatctcaatatgtccagagtagacgtatatacaactcactccccagccggaacgtctgtgcagaatatgcttcattggagccaagcggtaaaattccagaaatttcaagctttcgattgggggtcttccgccaaaaattattttcattacaatcaatcttatccgccgacctacaatgttaaagacatgcttgttccgaccgccgtgtggagtggaggccatgattggttggcagacgtctatgacgttaacatactgcttacgcagatcacgaacctggtgtttcatgaatctattccggaatgggagcatctagattttatttggggcttagacgcaccttggcgtctttataataaaataattaacctgatgcgtaaatatcag

SEQ ID NO: 4985 - DNA, 1197 bp, Artificial Sequence
  derived and/or modified sequence
atgaagatgcggttcctcggcctcgtcgtctgcctggtgctatggaccctgcactctgagggctctcgtggcaagctcaccgccgtggacccagagactaatatgaatgtgtccgaaataatctcctactggggctttccctctgaggagtacttggttgagactgaagacggatatatcctttgcctcaaccgtattccgcacgggagaaagaaccatagcgataagggcccaaagcccgtagtctttttgcagcacggactcctggcggattcctccaactgggtgaccaacctggccaatagtagtctgggctttatcttggccgatgctggtttcgacgtttggatgggtaacagtcgcggcaacacgtggtctcggaaacacaagacactgagcgtctctcaggatgagttctgggctttctcctacgatgagatggccaagtacgacctccctgcttctatcaatttcatccttaataagacagggcaggagcaggtatactacgtagggcattctcagggaacgaccattggattcatagccttctctcagatccccgagctggctaagcgcattaaaatgttcttcgcattggggcctgtggcctctgtcgccttctgcacctcgcccatggccaaactcggccgtctccccgatcatctgatcaaggatctgtttggggacaaggagtttttgcctcaaagtgccttcttgaagtggttgggcactcatgtctgtacccacgtcattctgaaagagctgtgtggcaacctatgttttctcctgtgcggctttaatgagcgcaacctgaacatgagccgcgttgatgtctataccacccacagtccagcgggcacgagtgtccagaacatgctccattggagtcaagcagtcaagttccagaagttccaagctttcgactggggatccagcgctaagaattatttccactacaaccagtcgtacccacccacttataacgtcaaggatatgctagtccccaccgctgtctggtctggtggacacgactggttggcggatgtctatgatgtgaacattttattgacccagataactaacttggtcttccacgagtccatccccgaatgggagcacttggattttatctggggtctggacgcgccctggcgtctgtacaataagattataaatttgatgcgcaagtaccag

SEQ ID NO: 4986 - DNA, 1197 bp, Artificial Sequence
  derived and/or modified sequence
atgaagatgagattccttggtttggtggtgtgtctggtgctgtggactctgcactccgagggttcacgcggtaagctgactgcagtggaccccgaaactaacatgaacgtctccgaaatcattagctattgggggtttccaagcgaggaatacctggtcgaaactgaagatggttacattctctgtctgaaccgcatccctcatggacgcaagaaccattcggataaggggcccaagcctgtcgtgtttctgcagcacggccttctggccgatagctcaaattgggtgaccaatctggcaaactcaagcctcggcttcattcttgccgatgcaggatttgatgtgtggatgggaaattccaggggcaacacttggagccgtaaacataagaccctgagcgtgtcacaagacgaattttgggccttttcctacgatgagatggcaaagtacgaccttccggcctcaatcaactttatactcaacaagaccggacaggaacaagtttactacgtcggacattcgcaagggaccaccatcggattcatcgcattttcccagattcccgaacttgcaaaacgtattaagatgttttttgccctgggcccagtcgcatccgtggcattttgtacctcgccaatggcaaagctcggccgtctccctgaccatctgattaaggacctctttggcgacaaagagtttctcccccaatcggccttcctcaaatggctcggtacccatgtgtgtactcatgtgattctgaaggagctgtgcgggaatctgtgttttcttctttgcggttttaacgaaagaaaccttaacatgtcgcgagtggacgtgtacaccactcactctccggcagggactagcgtgcaaaacatgctccattggtcccaagcagtgaaatttcagaaatttcaagcctttgactggggcagctcggctaagaactattttcattacaaccagtcgtacccaccgacgtacaatgtgaaggatatgcttgtccctaccgctgtgtggtcgggcgggcacgattggcttgcagatgtgtacgatgtgaacattttgctcacgcaaataaccaacttggtctttcacgaatccattcctgaatgggaacatcttgacttcatatgggggctcgacgccccctggcgtctttacaacaagatcatcaacctgatgagaaagtaccaa

SEQ ID NO: 4987 - DNA, 1197 bp, Artificial Sequence
  derived and/or modified sequence
atgaagatgcgcttcctgggactggtcgtctgccttgtcctttggaccctgcattcggagggatctcgcgggaagctcactgccgtggatcccgaaaccaacatgaacgtgtcagagatcatcagttactggggcttcccttcggaggaatacctggttgagactgaagatggttacattctgtgtttgaataggatcccgcacggccgcaaaaaccactctgacaaggggcccaagccggtcgtttttctgcagcatggacttctcgcggacagctccaattgggtaacgaatcttgcaaattcctccctgggatttatcctggcggatgcagggtttgacgtctggatgggcaattcacgaggaaatacctggtcgcggaagcacaagactttgtcggtgtcacaagacgagttttgggcgttctcctacgacgagatggcaaaatacgacctgccggcctccatcaacttcatcctgaataagaccggacaggaacaggtctactacgtgggacactcgcagggcaccaccattgggttcatcgccttctcgcaaatcccggaattggccaagagaattaagatgttcttcgccttgggaccggtggcctcggtcgctttttgcaccagtccaatggctaagctgggaaggctgccggaccacttgataaaagatttgttcggtgacaaagaattcctgccacagagcgcgtttctcaagtggctcggcactcacgtgtgcactcatgtgatcctgaaagaactctgcggtaacctctgttttctgttgtgcggattcaacgaacgaaacctcaacatgtccagagtggacgtgtacaccactcattcacctgcgggaacgtcagtgcagaatatgctccattggagccaggccgtgaagttccagaaattccaggccttcgactggggaagcagcgctaaaaactattttcactataatcaaagctaccctccaacctacaacgtgaaggacatgctcgtacccactgctgtgtggtccggtggccatgattggctggctgatgtgtacgatgtgaacatcctgctcacgcaaatcactaacctggtattccacgagtcgatcccagaatgggagcaccttgatttcatctggggcctggacgccccgtggcggctgtacaacaaaatcattaatctgatgcgcaagtaccaa

SEQ ID NO: 4988 - DNA, 1197 bp, Artificial Sequence
  derived and/or modified sequence
atgaaaatgcgtttcttaggtttagttgtatgtttagttttgtggactttgcatagtgaaggatcaagaggaaaattgactgcagttgatccagaaacaaatatgaatgtttcagaaattattagttattggggttttccatctgaagaatatcttgtagaaacagaagatggatatattctttgtctaaatagaattccacatggaagaaaaaatcattcagataaaggacctaaaccagttgtttttctacaacatggattgttagctgattcatcaaactgggtaactaatttagctaactcttcattaggatttattcttgctgatgctgggtttgatgtttggatgggtaattcaagaggaaatacatggtctcgtaaacataagactctttctgtttcacaagatgaattctgggcattcagttatgatgaaatggctaaatatgatcttccagcttctattaattttattcttaacaaaacaggacaagaacaagtttattatgttggacatagtcaaggaactacaattggatttatcgcttttagtcaaatacctgaacttgcaaaacgaataaaaatgtttttcgctcttggaccagttgcatccgttgcattttgtacttcaccaatggcaaaattaggaagacttccagatcatttaataaaggatctttttggagacaaagaattcttacctcaatctgcttttttaaaatggttgggtactcatgtttgtactcatgttattttaaaagaattatgtggaaatttatgttttttgttatgcggatttaatgaaagaaatttaaacatgagtagagttgatgtttatactacacattcaccagctggaacttcagttcaaaatatgcttcattggtcacaagctgttaaatttcaaaagtttcaagcttttgattggggaagttcagctaagaattatttccattataaccaaagttatcctccaacatataatgttaaagacatgttagttccaactgctgtttggagcgggggacatgactggctagctgatgtttatgatgttaacattttacttactcaaataacaaatttagtttttcatgaatctataccagaatgggaacatttagattttatctggggtttagatgcaccttggagattatataataaaattattaatttaatgcgtaaatatcag

SEQ ID NO: 4989 - DNA, 1197 bp, Artificial Sequence
  derived and/or modified sequence
atgaaaatgcgatttcttgggctcgttgtttgcctggttctgtggacacttcactctgaaggaagtagggggaaactcactgcagtcgatcccgaaacaaacatgaacgtctcagaaatcatttcttattggggattcccctctgaggaatacctggtagaaactgaagatgggtacatactctgtctcaaccgaatcccccatggacgaaaaaaccactccgataaggggcctaagccagttgtattcttgcagcacggacttcttgcggactcatctaattgggtaactaatcttgcaaatagtagtctcggattcattctggctgatgccgggttcgacgtctggatgggaaattccagaggaaacacttggtcccgtaagcataaaacactaagtgtgagtcaagatgaattctgggccttttcatatgatgaaatggcgaaatatgatctgcctgcctcgataaattttatactcaacaaaacagggcaggaacaggtttattatgttggacacagtcagggaactacaattggattcattgctttttcccagattcccgagctggcaaaaagaatcaaaatgttctttgcactggggcccgtggcgtctgtggctttttgtacatctccaatggccaaactgggacggctgccagaccacttaataaaagatctctttggagacaaagagttcctaccccagtcagcatttctgaagtggctagggacacatgtatgtacacatgttattctcaaagaactgtgtggaaatctgtgctttctcctgtgtggatttaatgaaaggaacttaaacatgagtagagtagatgtttacactacacactcaccagctgggacatccgtccagaacatgcttcactggtcccaggcagtaaagttccagaaatttcaggcgttcgactgggggtcttctgccaaaaattatttccattacaaccagtcttacccaccaacttacaatgtcaaagacatgcttgtacccactgctgtttggtcagggggacacgattggttagcagatgtctacgatgtaaatatcctcctgacacagatcacaaacctagtgtttcacgaatctataccagaatgggaacatcttgattttatttggggacttgatgcaccatggaggctgtataataagattataaacttgatgcgcaagtaccag

SEQ ID NO: 4990 - DNA, 1197 bp, Artificial Sequence
  derived and/or modified sequence
atgaagatgcgatttctgggacttgtggtgtgcctcgtgttgtggaccctgcactcagagggcagcaggggaaaactcaccgctgtcgatccagaaaccaacatgaacgtgagcgagattatctcatactgggggtttccctccgaagagtacctcgtggaaacggaagatgggtacatcctttgtctgaatagaatcccgcatggccggaagaatcattccgacaagggtccaaagcctgtggtgttcctgcagcatggccttttggcagattccagcaattgggtgactaaccttgcaaatagctcgctcggattcatcctggcagatgcaggctttgacgtgtggatgggaaactcccggggaaacacgtggagccggaagcacaagactctgtccgtgtcgcaagatgaattttgggcctttagctacgacgagatggcaaagtacgatcttcctgcatcaattaacttcattcttaacaagactggccaggagcaggtgtactacgtgggccactcgcaaggaaccacgattgggtttattgcattttcacaaatccccgagcttgcaaaacgtattaagatgtttttcgcactgggacctgtggcatccgtggcattttgtacgtcaccaatggcaaagctcggtagacttcctgatcacctgatcaaggacctttttggagataaggagtttcttccgcaatcagcctttcttaaatggcttggtactcacgtctgtacccacgttatactcaaagaactctgtggtaatctttgctttttgctgtgtggtttcaacgaacggaatcttaacatgagccgtgtcgacgtctataccacccactcgccagccgggacttccgtccagaacatgttgcattggtcacaggccgtgaagttccaaaagttccaggcattcgactggggatcatccgccaagaactactttcattacaatcaaagctatcctcccacgtacaacgtgaaagatatgttggttccaaccgcagtgtggtcgggaggacacgactggctcgcggacgtgtacgacgtgaacatccttctgacccagatcactaatctcgtttttcatgaatctataccagaatgggaacatctggatttcatttggggactggatgcaccctggcggctgtacaacaagatcataaacctgatgagaaagtatcaa

SEQ ID NO: 4991 - DNA, 1197 bp, Artificial Sequence
  derived and/or modified sequence
atgaagatgcgtttcttaggcctggtcgtgtgtttagtgttatggacattgcactcagaaggatcaaggggcaaacttaccgctgtcgaccccgagaccaatatgaacgttagcgaaattatcagctactggggctttccaagcgaggagtacctggttgaaaccgaggatggctacattctgtgcctcaaccgaatcccccatggtagaaagaatcattccgataaaggaccgaagcctgtagtttttctgcagcatgggctgttagctgacagcagcaactgggtcactaaccttgccaactctagtctcggtttcatcctcgctgacgcaggctttgatgtttggatggggaacagcagaggcaatacctggagcaggaagcataaaactctgtccgtttctcaggatgagttctgggcatttagctatgacgagatggccaaatatgatcttcctgcctctatcaatttcatcctcaataaaaccggacaggaacaggtgtactatgttggccactcacaaggaactactatcggttttattgcattttctcagatccctgaactggccaagagaatcaagatgttctttgctcttgggcctgtggctagcgtggcattctgcaccagtccaatggcaaagctgggtcgcctgcctgatcacctgatcaaagatctgttcggggataaagagtttctgccgcagagtgcttttctgaagtggcttgggactcatgtctgcactcacgtgatcttaaaggagctgtgcggaaacttgtgctttctactgtgcggcttcaacgaaaggaacctcaacatgagtcgggtggacgtgtacaccacacattcccctgcaggcacctccgtgcagaacatgctgcactggtcacaggccgtgaaatttcagaaattccaagctttcgattggggatcttccgccaaaaattacttccattacaaccaatcttatcctcctacctataatgtgaaagacatgctggtgcccactgctgtctggagcggcggtcatgattggttagcggatgtgtacgacgtgaatatcctgctcacacagatcactaacttggtgtttcacgaaagcattcccgagtgggaacacctcgactttatctgggggcttgacgccccatggagactctacaacaagattatcaatctgatgcgcaagtaccag

SEQ ID NO: 4992 - DNA, 1197 bp, Artificial Sequence
  derived and/or modified sequence
atgaaaatgcgatttcttgggctcgtggtgtgtctggtgctgtggactctccactcggaagggtcccgcggcaaactgaccgccgtggaccctgagactaatatgaacgtgtcagaaatcatctcctattggggattcccaagcgaagagtacctggtcgaaaccgaggacggctacatcctctgcctgaaccggatcccgcacggacgcaaaaaccactctgacaagggcccaaagccggtggtgttcctccaacatggactgctcgccgactcgtcaaactgggtcaccaatttggccaattccagtctggggttcattctggccgatgctggttttgatgtgtggatgggaaactcaaggggaaacacctggtcccgcaagcacaaaaccctgtccgtgtcccaagatgaattctgggcattttcgtacgacgaaatggcgaagtatgatctgccagcttctatcaacttcatcctgaacaagactggccaggagcaagtctactacgtcggtcattcgcaggggaccaccatcggatttatcgcgttcagccaaatcccggagctcgcaaagcgcatcaagatgttcttcgcgctgggtccggtcgcctccgtcgccttttgtacttcgccgatggccaaactggggcgcctgccggaccatctcatcaaggatctgttcggggacaaggaattcctgccgcagtctgctttcttgaagtggttgggaacccacgtgtgcactcacgtcattctgaaggagttgtgtggcaacctctgcttcctgctgtgcggtttcaacgagcgcaacctgaatatgtcccgagtggatgtctacactacccactcaccggcaggaacttccgtccagaacatgttgcactggtcacaggccgtgaagttccagaagtttcaagcctttgactggggatcgtccgccaagaactacttccattacaatcagtcgtacccgcccacgtacaatgtgaaggacatgctcgtgcctacggctgtgtggagcggcggtcatgactggctcgcagacgtctacgacgtgaacatcttgctgacccaaatcaccaatctcgtctttcacgagtcgatcccggaatgggaacacttggacttcatctggggactggatgcgccctggagactttacaacaagataatcaatcttatgcggaagtaccag

SEQ ID NO: 4993 - DNA, 1197 bp, Artificial Sequence
  derived and/or modified sequence
atgaaaatgcgctttctgggtctcgtcgtgtgtctagtgttgtggactctccactcagagggatccagaggcaaactaactgcggtggatcctgagactaatatgaacgtctctgagataattagttattggggattcccaagcgaagagtatttggtggagaccgaagacggctatatactgtgtctcaatcgaatacctcacgggcgaaagaaccactcggataagggcccgaaacccgtcgtgtttctgcagcacggactgcttgcagatagttctaactgggtaactaaccttgctaactcttctctgggctttattctagctgatgctggcttcgacgtttggatggggaacagtcgtgggaacacttggtcaagaaagcacaagacgctatccgtgagccaggatgaattttgggcattctcatacgacgaaatggctaaatacgacctccctgcttccatcaactttatccttaataagaccggacaagaacaggtttactacgtgggacattctcaggggacaaccatcggctttattgccttttctcagatcccagagctggccaaaaggatcaaaatgttcttcgccctggggcccgtggcttccgtggccttctgcacgagcccaatggctaaactgggacgactgcctgaccacctaatcaaggacctctttggcgataaggaattccttccacaaagcgcttttttgaagtggctggggacgcacgtgtgtactcatgtgattcttaaagaactttgcggaaatttatgtttcctgctgtgcggatttaatgaacgtaatctgaatatgagtcgggtcgatgtgtataccacacactccccggctggtaccagcgtccagaacatgcttcactggagtcaggccgtaaagtttcagaaattccaagcatttgactgggggtccagcgccaaaaactactttcattataaccagtcttaccctcccacatacaatgtcaaggacatgttggtccctacagccgtgtggtccggtggacatgactggctcgccgatgtgtacgacgttaacatcctgctgacacagatcacgaacctcgtttttcatgagtcaataccagagtgggagcatcttgacttcatttgggggcttgatgctccttggcgactatataacaaaataatcaatcttatgagaaaataccaa

SEQ ID NO: 4994 - DNA, 1197 bp, Artificial Sequence
  derived and/or modified sequence
atgaagatgcggttcctgggactggtggtctgccttgtgctgtggaccctgcattcagaaggttcccgaggcaagctgacggccgtcgaccccgaaactaacatgaatgtgtccgaaatcatatcgtactggggattcccttcggaagagtaccttgtggaaaccgaagatggatacatcctgtgtcttaacagaatacctcatggacgaaagaaccattccgataagggcccaaaacctgtggtgttcctgcaacacggactgctggcagatagcagcaactgggtgacgaacctggcaaattcatcgctgggctttattcttgcagacgctggttttgatgtctggatgggtaatagccgaggaaacacctggagcagaaagcataagaccttgtccgtgtcgcaagacgaattctgggcattttcgtacgacgaaatggcaaagtacgatcttcctgcatcaattaacttcattctgaacaagaccggacaggaacaggtctactacgtcggccattcccaaggaaccactatcgggttcatcgcattttcccaaattcccgaacttgccaagaggattaagatgtttttcgcccttgggccggtggcatcggtcgccttttgtacttcgcctatggccaagctgggaaggctgcccgatcatctgattaaagatctttttggggacaaagaattcctcccacaatcagcatttctgaaatggctgggaacccatgtctgcacccatgtgatcctgaaagagctgtgtgggaacctgtgttttcttctctgtggatttaacgagagaaaccttaacatgtcccgcgtcgatgtctacactacccactcacccgcaggtaccagcgtccagaatatgctccattggtcacaagcagtcaagttccagaaatttcaggcctttgattggggatcatccgcaaagaattactttcactacaatcagtcttacccacctacttacaacgtgaaggatatgcttgtgcctaccgcggtgtggagcggaggacacgattggctggcagatgtttacgatgtgaatattctgctgactcaaattacgaatcttgtctttcacgaatcgattcctgaatgggaacaccttgatttcatatggggtcttgatgccccctggagactgtacaataagatcattaatctgatgcggaaataccag

SEQ ID NO: 4995 - DNA, 1197 bp, Artificial Sequence
  derived and/or modified sequence
atgaagatgcggtttctgggcctcgtggtgtgtctggtcctctggaccctccactctgaaggttcaagaggaaagctgactgcggtggatccagagacgaacatgaatgtctccgaaatcatttcgtactggggattcccgtcagaagagtacctggtggaaacggaggatggctacattctctgccttaatcgtattccccacggcagaaagaaccactcggacaaaggacctaagccagtggtctttctccagcacgggctcctcgcggactcctcaaattgggtcactaacttggcgaacagcagcctgggatttatcttggcagatgcaggttttgatgtctggatgggaaactcaagaggtaacacctggtcacgaaaacataagactctttcggtgtcacaggatgagttttgggcattttcgtacgatgaaatggccaaatatgatctgccagcctccatcaactttatccttaacaagacgggtcaagaacaggtctactatgtgggtcactcgcaaggcactaccatagggttcatcgcgttttcccaaattccggaactcgcaaagcgcattaagatgttttttgcccttgggcccgtggcaagcgtggcattttgcacttcaccaatggcaaagttgggtcgattgcctgatcatctcattaaagatctttttggtgacaaagaattcctgccccaatcagcatttcttaaatggcttgggacccatgtgtgtacccatgttattctgaaggaactgtgtggaaatctttgcttcctgctgtgcggatttaacgagcgcaacctgaatatgagcagagtcgatgtgtacaccacccactccccagctggcacctctgtgcaaaacatgctgcattggtcgcaggccgttaagttccaaaagttccaggcatttgattggggctcatccgctaagaactacttccactacaaccagagctaccctcccacctacaacgtgaaagacatgctggtgccgaccgcagtgtggagcggcggacatgattggttggcggatgtgtacgatgtgaacattcttctgacccaaattacgaaccttgtgttccatgagtcgattccagaatgggagcatctggactttatctggggtcttgacgcgccgtggcggctttacaacaaaatcattaacctgatgaggaagtaccag

SEQ ID NO: 4996 - DNA, 1197 bp, Artificial Sequence
  derived and/or modified sequence
atgaaaatgcggtttctgggactggtagtctgcttagtgctgtggaccctgcatagcgaggggtcacgtggcaaattaacagccgtggatcccgaaactaacatgaacgtttcggagatcatctcctactgggggtttccttcggaggagtacttagttgagactgaggatggctatattttgtgtttgaatagaattccccacggccggaaaaaccactctgacaagggacccaaacctgtcgtgtttctgcaacacggcttactggcggatagctctaactgggtgacaaacctggccaactcctcactcgggttcatactcgctgacgctgggttcgatgtgtggatggggaatagtagaggaaacacctggtctcgtaagcacaaaaccctgtccgtctcccaggacgagttttgggcgttctcatacgacgaaatggcgaagtacgatctgcccgctagtatcaacttcatcctgaataagaccggacaggagcaggtatactatgtgggtcattctcagggaacaaccattggatttatagctttttctcaaatacccgagctggccaaaagaattaagatgttcttcgccctcggcccagttgcctccgttgcgttctgtacttcacctatggccaagctaggtcgtctgcctgatcacctgatcaaggacctgttcggcgacaaagaattcctgcctcagagtgccttcctgaaatggctgggtacacatgtctgtacccacgtcatcctcaaggagctctgcggaaatctttgcttcctgttgtgtggctttaacgagcgcaatcttaacatgtcccgggtggacgtgtatacaactcactcgcccgccgggacttccgtccagaacatgctccactggagccaggcagtcaagttccaaaagttccaggcttttgactgggggagcagtgctaagaactacttccactataaccagagttatcctccgacctataatgtgaaagacatgcttgtacctaccgcggtgtggagcggggggcacgattggctggctgatgtgtatgacgtgaacattcttctgactcaaatcaccaatctcgtgtttcacgaatctatacccgagtgggaacacctcgatttcatttggggtttggatgcgccctggagactctacaacaagatcattaatctgatgagaaagtatcaa

SEQ ID NO: 4997 - DNA, 1197 bp, Artificial Sequence
  derived and/or modified sequence
atgaagatgaggtttctgggacttgtcgtgtgtctggtgctttggaccctgcattcggaaggctcgcgaggtaaacttaccgcggtggacccagaaaccaatatgaatgtgtcggagatcatttcctactggggcttcccttcggaggaatacctcgttgaaaccgaggacggttacattctgtgtctcaaccgtatccctcacggacgtaagaatcactccgataagggacctaagccagtggttttcctccaacacgggctcctggcagattcgtcgaactgggtgaccaacctggcaaactctagtcttggattcattctggcagatgcaggttttgatgtctggatggggaattcgagggggaacacttggtctaggaagcataaaaccctcagcgtctcacaggatgagttttgggctttcagctacgatgaaatggcaaaatacgacctcccagcgtcgattaactttattctgaacaaaaccggacaagagcaggtctactacgtgggacattcccagggaactaccattggcttcatagcattttcacagatacctgaacttgcaaaaagaatcaagatgttttttgcgcttggtcctgtggcttccgtggcgttttgtacgtcccccatggcaaagctggggagactgcctgatcacctcattaaagatctgtttggggataaggagttcctgccacaaagcgcatttctgaaatggctgggaacccatgtgtgtactcacgtgattcttaaggaactctgcggcaacctttgctttctgctgtgtggtttcaatgaaagaaacttgaatatgtcgcgggtggacgtctacactacgcatagtcccgcaggcacttcagtgcaaaacatgcttcactggtcccaagccgtgaaatttcagaagtttcaggcctttgactggggatctagcgcgaagaactactttcactacaaccaaagctacccaccaacttacaacgtcaaggacatgcttgtgccaactgcagtgtggtccggcgggcatgactggctggcagacgtgtacgacgtcaatattcttctcactcagattacgaacctggtctttcatgaatcgattcctgagtgggaacacctggacttcatctggggccttgatgctccttggagactctacaacaaaatcattaatctgatgcggaagtatcaa

SEQ ID NO: 4998 - DNA, 1197 bp, Artificial Sequence
  derived and/or modified sequence
atgaagatgaggttcttgggcttagtggtgtgcctggtactgtggaccctccattcggagggcagtcggggaaagcttactgccgtggatccagaaactaatatgaatgtctctgagattatatcctactggggatttccctccgaagagtatctggtagagactgaggatggctatatcttatgtctgaaccggattcctcacggccggaagaaccactccgataagggacccaagcccgtcgttttcttgcagcatggcttacttgcggatagctccaactgggtaaccaatctcgccaacagctcactgggctttatcctggccgacgccggatttgatgtgtggatgggcaattcacgggggaacacctggtcaaggaaacataagaccttgagcgtcagccaggacgaattctgggctttttcgtacgatgagatggctaaatacgatctacccgccagtatcaactttatcttaaataagaccgggcaggaacaggtgtattacgtgggccactctcagggaacaaccatcggttttattgccttttctcagatccccgagctggccaaaaggataaagatgttcttcgcactcgggccggtggcttctgtggccttctgcacatctccaatggcaaagctcggacggctgcccgaccacctgattaaggatctttttggagataaagagtttctgccacagtcagccttcctcaagtggctgggaactcatgtgtgtactcatgtcattcttaaagaactctgtggtaacctgtgctttcttctgtgcggctttaacgagagaaacctcaatatgtctagagtagatgtttatacaacacatagccctgctggtaccagtgtgcagaacatgctccactggtctcaggccgtcaaattccagaagttccaggcctttgattgggggtcctccgccaagaactattttcattacaatcagtcctacccacctacctataacgttaaagacatgctagtgcctaccgctgtgtggagtggcggccatgattggctggccgatgtgtacgatgtgaacatcctccttacccagatcacaaatctggtgttccatgagtcaatacccgagtgggaacacctggacttcatctggggtttagatgccccctggagactctacaacaaaattattaacctgatgaggaagtatcaa

SEQ ID NO: 4999 - DNA, 1197 bp, Artificial Sequence
  derived and/or modified sequence
atgaaaatgcgattcctgggactggttgtgtgcctggtgctgtggacccttcacagcgagggctccaggggcaagctgaccgccgtggatccagagactaacatgaatgttagcgagatcataagttattggggcttcccgtccgaagaatatctggtggagactgaagatggctatatattatgcctgaatcgcatacctcacggccgcaaaaaccatagcgataagggcccaaagcccgttgtcttcctccaacacggcttactggccgacagcagtaactgggtgaccaacctggccaactcctctctgggcttcatcctggccgacgccggtttcgatgtgtggatgggtaattctaggggaaacacctggagcagaaagcacaaaacactatctgtgagtcaggacgaattctgggcttttagttacgacgagatggctaagtatgacctaccagctagcatcaacttcatcctgaacaagaccggtcaggaacaggtctattatgttggtcactcacaggggaccaccattggcttcatcgcttttagtcaaatcccagaattggctaaaaggatcaaaatgttttttgccttaggcccagtggctagcgtggcattctgcacatccccaatggccaagctgggaaggctacccgaccacctaatcaaggacctgtttggagacaaggaatttctccctcagtccgccttcctgaaatggctgggaacacacgtgtgtacacatgtgattctgaaagagctgtgtggaaacctgtgcttcttgctttgtgggtttaatgagagaaacttaaatatgagccgggttgatgtgtacacaacacattctcctgccggcacttccgtccaaaacatgctgcactggtcacaggccgttaagttccagaaatttcaggcattcgactggggctccagtgcaaagaattattttcattataaccagtcctacccacctacttacaacgttaaagatatgttggttccaacagccgtgtggtcaggaggtcacgactggctcgcagatgtttacgatgtgaacattctgttaacacagataactaacctggtatttcatgaatctattcccgaatgggaacacctggatttcatctggggattagatgctccctggaggctgtacaacaaaattataaacctgatgcgaaaataccag

SEQ ID NO: 5000 - DNA, 1197 bp, Artificial Sequence
  derived and/or modified sequence
atgaagatgagattcttgggcctggtcgtgtgcctcgtgttgtggaccctgcatagtgagggatccagggggaaactaacggctgtcgatcctgagaccaacatgaatgtcagcgagatcatttcctactgggggtttccttcagaggagtacctggtagagactgaagatgggtacattctgtgtctgaatcgaatccctcatggcaggaagaaccattcggataaaggccccaaacccgtggtcttccttcagcatggactgttggcggattcttcaaattgggtcacaaacctcgccaactcaagtctcggcttcatactggccgatgcagggttcgatgtttggatgggaaattcccgcgggaatacctggagtcgcaagcacaagacactttccgtctctcaagatgaattctgggctttctcttacgatgagatggcaaagtatgacctgcccgcatcaatcaattttatcctaaacaagacaggtcaggagcaggtgtattatgtggggcactcccaagggacaactattggctttattgctttctctcagatcccagagctggccaagcgcatcaaaatgttcttcgccctaggaccggtggcttcagtggcattctgtacttccccaatggccaaactgggccgacttccggaccatttgattaaggatttattcggcgacaaggaattcctgccccaatctgcttttcttaagtggttggggactcacgtgtgcacccacgtgatcttgaaagaactgtgcggtaacctttgctttcttttatgtggcttcaacgagcgcaacctgaacatgagccgtgtggacgtttatacaacacatagtcccgccgggacgtccgtgcaaaacatgctccactggtcccaggccgttaagtttcagaaatttcaagcgttcgattgggggagctccgcaaagaattacttccactataaccagagctaccccccgacatataatgtgaaagatatgctggtgcctactgcggtgtggagcggaggacatgactggttagctgacgtgtacgacgtgaatattctgctgacgcagatcaccaacctggtttttcatgaaagtatccctgagtgggaacaccttgattttatttggggcctggacgcgccttggcggctgtataacaagattatcaatctgatgcgcaagtaccag

SEQ ID NO: 5001 - DNA, 1197 bp, Artificial Sequence
  derived and/or modified sequence
atgaaaatgcgcttcctgggacttgtcgtgtgcctggtgctctggaccctgcatagcgagggatcgcggggaaaactgactgccgtcgacccggaaaccaatatgaacgtgtcggagatcatctcctattgggggttccctagcgaggagtatctggtggaaactgaggacgggtacatcctgtgcttgaaccgcatcccgcacgggagaaagaaccacagcgacaagggaccgaagcctgtggtctttctgcaacacggcctgctggccgatagcagcaattgggtcactaacctcgctaattcgtcgctcggctttatcctggctgacgcggggtttgatgtctggatgggaaacagcaggggaaatacgtggtcgcgtaagcataagactttgtcggtttcccaggacgaattctgggctttctcgtacgatgaaatggcgaaatacgatctgccagcatccataaacttcattctgaacaagaccggacaggaacaagtgtactacgttgggcattcccaaggtaccaccatcgggtttattgcgttctcccaaatcccagagctggccaaacggatcaagatgtttttcgccttggggccggtagcttcagtggcattttgcaccagcccgatggccaaactgggccgactgccggatcacttgattaaggacctgttcggagacaaggagttccttccacaatccgctttcctgaagtggctgggaactcacgtgtgcacccatgtcattctcaaggaactgtgtggcaatctttgtttcctgttgtgcggcttcaacgaacgtaacctgaatatgagccgggtggacgtctacacgacccattcaccggccggcacttcggttcagaatatgctccactggtcccaggccgtgaagttccagaagtttcaggcgttcgattggggctcttccgccaaaaactacttccattacaaccagtcctacccacccacctacaacgtgaaggacatgctggtgccaactgcggtctggtccggtggacacgattggctggccgacgtgtacgacgtgaacatcttgttgacgcagatcaccaatctcgtgttccacgagtcgattcctgagtgggagcacctggacttcatctggggactcgatgccccatggcggctgtacaataagatcatcaacttgatgagaaagtaccaa

SEQ ID NO: 5002 - DNA, 1343 bp, Artificial Sequence
  derived and/or modified sequence
gggaaataagagagaaaagaagagtaagaagaaatataagagccaccatgaagatgcgctttctcgggctcgtagtatgcctggtcctctggacgctgcactcggagggatccaggggaaagctgacggccgtagaccccgaaacgaatatgaatgtctcggagattatctcctattggggctttccgtcagaggagtatctggtagagacagaggatggttacatcttgtgtctcaaccggatcccccacggacggaaaaaccactcggataaaggaccgaagccggtcgtgtttcttcagcacggacttctggccgactcctcgaattgggtgacgaatttggcgaactcctcgttggggtttatcctcgcggacgccggatttgatgtgtggatgggcaactcgcgaggtaacacgtggtcaaggaaacataaaaccctgtcagtctcgcaagacgagttctgggcattctcgtacgatgaaatggcgaagtatgacctgcccgcgtcaattaacttcatcctcaataagaccggacaagaacaggtatactatgtgggccatagccagggaacaacgatcgggtttatcgctttcagccagatcccggagctcgctaagcgcatcaagatgttcttcgcgctcgggcctgtggcgtcagtggcgttctgcacgtcgcccatggcaaaattgggtagattgcccgaccatcttatcaaagatctgtttggggataaggaatttctgccgcagtcggccttcctcaaatggttggggacacacgtctgtactcacgtgattttgaaagaactttgcgggaacttgtgcttcttgctttgtggattcaatgagcggaatttgaatatgtcaagagtcgatgtctacaccacccattcaccagcaggaacatcagtccagaatatgctgcattggtcccaagcggtcaaattccagaagttccaagcatttgactggggctcgagcgccaaaaactatttccactataaccagtcgtacccgcctacttacaatgtaaaggacatgcttgtccccactgcggtgtggagcggtgggcacgattggcttgcggacgtgtatgatgtgaacattcttctcacacagatcacaaacctggtgtttcatgagtccattcccgaatgggaacacctcgacttcatctggggtttggacgccccttggaggctctacaacaagattatcaacttgatgcgaaagtaccagtgataagctgccttctgcggggcttgccttctggccatgcccttcttctctcccttgcacctgtacctcttggtctttgaataaagcctgagtaggaag

SEQ ID NO: 5003 - DNA, 660 bp, Artificial Sequence
  derived and/or modified sequence
atgaagatgagattcctgggcctggtggtgtgcctggtgctgtggaccctgcacagcgagggcagcggcggcaagctgaccgccgtggaccccgagaccaacatgaacgtgagcgagatcatcagctactggggcttccccagcgaggagtacctggtggagaccgaggacggctacatcctgtgcctgaacagaatcccccacggcagaaagaaccacagcgacaagggccccaagcccgtggtgttcctgcagcacggcctgctggccgacagcagcaactgggtgaccaacctggccaacagcagcctgggcttcatcctggccgacgccggcttcgacgtgtggatgggcaacagcagaggcaacacctggagcagaaagcacaagaccctgagcgtgagccaggacgagttctgggccttcagctacgacgagatggccaagtacgacctgcccgccagcatcaacttcatcctgaacaagaccggccaggagcaggtgtactacgtgggccacagccagggcaccaccatcggcttcatcgccttcagccagatccccgagctggccaagagaatcaagatgttcttcgccctgggccccgtggccagcgtggccttctgcaccagccccatggccaagctgggcagactgtag

SEQ ID NO: 5004 - DNA, 1200 bp, Artificial Sequence
  derived and/or modified sequence
atgaagatgagattcctgggcctggtggtgtgcctggtgctgtggaccctgcacagcgagggcagcggcggcaagctgaccgccgtggaccccgagaccaacatgaacgtgagcgagatcatcagctactggggcttccccagcgaggagtacctggtggagaccgaggacggctacatcctgtgcctgaacagaatcccccacggcagaaagaaccacagcgacaagggccccaagcccgtggtgttcctgcagcacggcctgctggccgacagcagcaactgggtgaccaacctggccaacagcagcctgggcttcatcctggccgacgccggcttcgacgtgtggatgggcaacagcagaggcaacacctggagcagaaagcacaagaccctgagcgtgagccaggacgagttctgggccttcagctacgacgagatggccaagtacgacctgcccgccagcatcaacttcatcctgaacaagaccggccaggagcaggtgtactacgtgggccacagccagggcaccaccatcggcttcatcgccttcagccagatccccgagctggccaagagaatcaagatgttcttcgccctgggccccgtggccagcgtggccttctgcaccagccccatggccaagctgggcagactgcccgaccacctgatcaaggacctgttcggcgacaaggagttcctgccccagagcgccttcctgaagtggctgggcacccacgtgtgcacccacgtgatcctgaaggagctgtgcggcaacctgtgcttcctgctgtgcggcttcaacgagagaaacctgaacatgagcagagtggacgtgtacaccacccacagccccgccggcaccagcgtgcagaacatgctgcactggagccaggccgtgaagttccagaagttccaggccttcgactggggcagcagcgccaagaactacttccactacaaccagagctacccccccacctacaacgtgaaggacatgctggtgcccaccgccgtgtggagcggcggccacgactggctggccgacgtgtacgacgtgaacatcctgctgacccagatcaccaacctggtgttccacgagagcatccccgagtgggagcacctggacttcatctggggcctggacgccccctggagactgtacaacaagatcatcaacctgatgagaaagtaccagtag

SEQ ID NO: 5005 - DNA, 1074 bp, Artificial Sequence
  derived and/or modified sequence
atgaagctgagaaccctggccgtgagcgccaccgtggtgaaggacggcgtgagcggcgtgtgcagcttcagatgcagcgacgtgagcggcgtgctgcccagcggccccaagcccgtggtgttcctgcagcacggcctgctggccgacagcagcaactgggtgaccaacctggccaacagcagcctgggcttcatcctggccgacgccggcttcgacgtgtggatgggcaacagcagaggcaacacctggagcagaaagcacaagaccctgagcgtgagccaggacgagttctgggccttcagctacgacgagatggccaagtacgacctgcccgccagcatcaacttcatcctgaacaagaccggccaggagcaggtgtactacgtgggccacagccagggcaccaccatcggcttcatcgccttcagccagatccccgagctggccaagagaatcaagatgttcttcgccctgggccccgtggccagcgtggccttctgcaccagccccatggccaagctgggcagactgcccgaccacctgatcaaggacctgttcggcgacaaggagttcctgccccagagcgccttcctgaagtggctgggcacccacgtgtgcacccacgtgatcctgaaggagctgtgcggcaacctgtgcttcctgctgtgcggcttcaacgagagaaacctgaacatgagcagagtggacgtgtacaccacccacagccccgccggcaccagcgtgcagaacatgctgcactggagccaggccgtgaagttccagaagttccaggccttcgactggggcagcagcgccaagaactacttccactacaaccagagctacccccccacctacaacgtgaaggacatgctggtgcccaccgccgtgtggagcggcggccacgactggctggccgacgtgtacgacgtgaacatcctgctgacccagatcaccaacctggtgttccacgagagcatccccgagtgggagcacctggacttcatctggggcctggacgccccctggagactgtacaacaagatcatcaacctgatgagaaagtaccagtag

SEQ ID NO: 5006 - DNA, 1032 bp, Artificial Sequence
  derived and/or modified sequence
atggcctgcctggagttcgtgcccttcgacgtgcagatgtgcctggagttcctgcccagcggccccaagcccgtggtgttcctgcagcacggcctgctggccgacagcagcaactgggtgaccaacctggccaacagcagcctgggcttcatcctggccgacgccggcttcgacgtgtggatgggcaacagcagaggcaacacctggagcagaaagcacaagaccctgagcgtgagccaggacgagttctgggccttcagctacgacgagatggccaagtacgacctgcccgccagcatcaacttcatcctgaacaagaccggccaggagcaggtgtactacgtgggccacagccagggcaccaccatcggcttcatcgccttcagccagatccccgagctggccaagagaatcaagatgttcttcgccctgggccccgtggccagcgtggccttctgcaccagccccatggccaagctgggcagactgcccgaccacctgatcaaggacctgttcggcgacaaggagttcctgccccagagcgccttcctgaagtggctgggcacccacgtgtgcacccacgtgatcctgaaggagctgtgcggcaacctgtgcttcctgctgtgcggcttcaacgagagaaacctgaacatgagcagagtggacgtgtacaccacccacagccccgccggcaccagcgtgcagaacatgctgcactggagccaggccgtgaagttccagaagttccaggccttcgactggggcagcagcgccaagaactacttccactacaaccagagctacccccccacctacaacgtgaaggacatgctggtgcccaccgccgtgtggagcggcggccacgactggctggccgacgtgtacgacgtgaacatcctgctgacccagatcaccaacctggtgttccacgagagcatccccgagtgggagcacctggacttcatctggggcctggacgccccctggagactgtacaacaagatcatcaacctgatgagaaagtaccagtag

SEQ ID NO: 5007 - DNA, 1206 bp, Artificial Sequence
  derived and/or modified sequence
atggcctgcctggagttcgtgcccttcgacgtgcagatgtgcctggagttcctgcccagcggcgagttcgtggtgctgctgaccagcggcgtgcagctgcagaccttcaccgtgagcgtgaccgacctgaagggcggcgccagcggcgtggtgagaagcagcagatgggtgagaggcttcaccgacttcagaagcaaggccgtggacctgtgcggccccaagcccgtggtgttcctgcagcacggcctgctggccgacagcagcaactgggtgaccaacctggccaacagcagcctgggcttcatcctggccgacgccggcttcgacgtgtggatgggcaacagcagaggcaacacctggagcagaaagcacaagaccctgagcgtgagccaggacgagttctgggccttcagagtgcccttcctggactacagctacgacgagatggccaagtacgacctgcccgccagcatcaacttcatcctgaacaagaccggccaggagcaggtgtactacgtgggccacagccagggcaccaccatcggcttcatcgccttcagccagatccccgagctggccaagagaatcaagatgttcttcgccctgggccccgtggccagcgtggccttctgcaccagccccatggccaagctgggcagactgcccgaccacctgatcaaggacctgttcggcgacaaggagttcctgccccagagcgccttcctgaagtggctgggcacccacgtgtgcacccacgtgatcctgaaggagctgtgcggcaacctgtgcttcctgctgtgcggcttcaacgagagaaacctgaacatgagcagagtggacgtgtacaccacccacagccccgccggcaccagcgtgcagaacatgctgcactggagccaggccgtgaagttccagaagttccaggccttcgactggggcagcagcgccaagaactacttccactacaaccagagctacccccccacctacaacgtgaaggacatgctggtgcccaccgccgtgtggagcggcggccacgactggctggccgacgtgtacgacgtgaacatcctgctgacccagatcaccaacctggtgttccacgagagcatccccgagtgggagcacctggacttcatctggggcctggacgccccctggagactgtacaacaagatcatcaacctgatgagaaagtaccagtag

SEQ ID NO: 5008 - DNA, 873 bp, Artificial Sequence
  derived and/or modified sequence
atgaagatgagattcctgggcctggtggtgtgcctggtgctgtggaccctgcacagcgagggcagcggcggcaagctgaccgccgtggaccccgagaccaacatgaacgtgagcgagatcatcagctactggggcttccccagcgaggagtacctggtggagaccgaggacggctacatcctgtgcctgaacagaatcccccacggcagaaagaaccacagcgacaagggccccaagcccgtggtgttcctgcagcacggcctgctggccgacagcagcaactgggtgaccaacctggccaacagcagcctgggcttcatcctggccgacgccggcttcgacgtgtggatgggcaacagcagaggcaacacctggagcagaaagcacaagaccctgagcgtgagccaggacgagttctgggccttcagctacgacgagatggccaagtacgacctgcccgccagcatcaacttcatcctgaacaagaccggccaggagcaggtgtactacgtgggccacagccagggcaccaccatcggcttcatcgccttcagccagatccccgagctggccaagagaatcaagatgttcttcgccctgggccccgtggccagcgtggccttctgcaccagccccatggccaagctgggcagactgcccgaccacctgatcaaggacctgttcggcgacaaggagttcctgccccagagcgccttcctgaagtggctgggcacccacgtgtgcacccacgtgatcctgaaggagctgtgcggcaacctgtgcttcctgctgtgcggcttcaacgagagaaacctgaacatgagcagagtggacgtgtacaccacccacagccccgccggcaccagcgtgtag

SEQ ID NO: 5009 - DNA, 411 bp, Artificial Sequence
  derived and/or modified sequence
atgaagatgagattcctgggcctggtggtgtgcctggtgctgtggaccctgcacagcgagggcagcggcggcaagctgaccgccgtggaccccgagaccaacatgaacgtgagcgagatcatcagctactggggcttccccagcgaggagtacctggtggagaccgaggacggctacatcctgtgcctgaacagaatcccccacggcagaaagaaccacagcgacaagggccccaagcccgtggtgttcctgcagcacggcctgctggccgacagcagcaactgggtgaccaacctggccaacagcagcctgggcttcatcctggccgacgccggcttcgacgtgtggatgggcaacagcagaggcaacacctggagcagaaagcacgtgaccctggagcccggctgctag

SEQ ID NO: 5010 - DNA, 660 bp, Artificial Sequence
  derived and/or modified sequence
atgaaaatgaggttcctagggctcgttgtgtgtctagttctctggacattacattcagaaggttccggcggaaaactaaccgccgtggacccagagactaatatgaacgtcagcgagattattagttattggggctttcccagtgaagaatacctggtagaaacagaggacggttatatcttgtgtctcaacagaatcccccacggccgcaagaaccatagtgacaagggtcctaagcccgtggtctttctccaacacgggctgcttgcagattcctcaaattgggtaaccaatctcgccaattctagtctaggttttatcctggctgacgccgggtttgacgtttggatgggcaacagcagaggaaatacatggtctcggaagcacaagaccctgtcggtctctcaagacgagttctgggccttctcttacgatgagatggctaagtacgatctgcccgcaagcatcaattttatattgaacaaaacaggccaggaacaggtctactacgttggccattcccagggtactacaattgggttcattgcctttagtcaaataccggaactggccaagagaattaagatgttcttcgcccttgggcctgtcgcctccgtcgcattttgtacaagccccatggccaaattaggtcgcctgtag

SEQ ID NO: 5011 - DNA, 1200 bp, Artificial Sequence
  derived and/or modified sequence
atgaaaatgcgcttcctgggcctagtggtgtgcctggtcttatggacgcttcactcggagggctcagggggcaagctcacggccgtggatccagagactaatatgaatgtgtccgaaattatctcatactggggattcccttccgaggaatatctggtggaaaccgaggatggctacattctgtgcctgaacaggatccctcacggaaggaagaatcactcggacaaggggccgaagccagtggttttccttcagcacgggctgttagccgatagtagcaactgggtaactaatctagcaaactcctccttgggatttatcctggccgacgccgggtttgatgtttggatggggaactctcgagggaatacatggtccaggaaacacaaaaccctttctgtgtcccaggacgagttctgggccttctcctacgatgaaatggccaaatacgacctcccagcatcaataaacttcattttaaataagacagggcaggagcaagtgtactacgtcggccattctcagggcactacaattgggttcattgcattcagtcagatacccgaacttgccaagcgaatcaaaatgttcttcgccttggggcctgtcgccagcgttgccttctgcacatcacctatggccaagcttgggcggctgcccgatcatttaatcaaggacctgtttggcgataaagaattcctcccccaatctgcatttctgaagtggcttgggacccatgtatgcacccacgtgattctgaaagagctgtgcggcaacctctgttttttgttatgcggttttaacgagcgcaatttgaacatgtcccgcgtggatgtttacaccactcactcaccagccgggacatcggtgcagaacatgctccactggtcccaggccgtcaaattccagaagttccaagcctttgactggggctccagtgccaagaattatttccactacaaccagtcataccctccgacatacaatgtcaaggatatgctcgttcctacagccgtatggtcgggagggcacgattggctggctgacgtctatgatgtaaacatcctgttaacacagatcacgaatctcgtttttcatgaaagcattcctgagtgggaacatctcgatttcatctggggcctggacgcaccatggcgcctttacaataagatcatcaatctgatgaggaaataccagtag

SEQ ID NO: 5012 - DNA, 1074 bp, Artificial Sequence
  derived and/or modified sequence
atgaagcttagaaccctggccgtgagcgctaccgtcgtaaaggatggtgtgtcaggcgtctgcagctttaggtgctcagacgtttctggggtcctcccttcaggcccaaagccagtggtgttcctgcaacacggcttgctcgccgacagtagcaattgggtgaccaatctcgctaacagcagtctcggctttatacttgccgatgccgggtttgatgtgtggatggggaacagccgaggaaacacctggtctagaaagcacaagaccctcagcgtgtcccaggacgaattctgggccttttcctacgatgaaatggcaaaatacgaccttcccgcctctattaatttcatcttgaataagacaggtcaggaacaggtatattacgtgggccactctcaggggactacaattgggttcattgccttttcacagataccagagctcgccaaacggattaagatgttctttgccctgggccctgttgcatccgtcgccttttgtaccagccccatggccaagcttggacgattgcctgaccatcttatcaaagatctttttggagacaaggagtttctcccccagtctgccttcctgaagtggctgggcacacacgtgtgcacacacgtgatcttaaaggagctgtgcggaaacctgtgtttcctgctctgcggctttaacgaacggaacttgaacatgtcgcgcgtagatgtatacaccacacactcacccgctggaacctccgtgcaaaacatgctacactggtcccaggcggtgaagttccagaaattccaggctttcgattggggctcttcagcaaaaaactactttcactacaaccagagctatcctcccacctacaacgtcaaggatatgctagttccaaccgccgtgtggtctggtggtcacgattggctggcggatgtgtatgatgtgaatatcctccttacacagataacaaatctggtattccatgagagtattcctgaatgggagcatttggacttcatctggggtctggacgcaccttggcgcttgtacaataaaatcatcaatcttatgcgtaaatatcagtag

SEQ ID NO: 5013 - DNA, 1200 bp, Artificial Sequence
  derived and/or modified sequence
atgaagatgcgattcctcggtctcgttgtgtgcctggttctgtggactcttcactctgagggcagcgggggaaagctcaccgcggtagacccagagactaacatgaacgtcagcgaaattatcagttattgggggtttcctagcgaggagtatctggtagaaaccgaggacggttacatcttgtgtttgaatcgcatacctcatggccgaaagaaccacagtgacaagggacctaaacctgtggtctttctgcagcatggcctgctggccgatagtagtaactgggtgaccaacttggccaacagctctctggggttcatcctggctgatgccggattcgatgtctggatgggaaattcccgaggcaatacttggagccgtaagcacaaaaccctttctgtcagccaggatgagttctgggccttctcatatgacgagatggccaaatatgaccttcccgcttcaattaacttcattttaaacaaaacaggtcaggaacaggtgtactatgtgggacattcccaagggaccacaatagggtttattgcattttcgcagataccggaacttgcgaaacgcattaagatgttcttcgcccttggccccgtcgcttccgtggccttctgcaccagcccaatggctaagctcgggcgcctccccgaccatctgattaaggatctgtttggggataaggagttcctgccacagtcagccttcctgaagtggcttgggacacatgtctgtacccacgtgatcctgaaagaactgtgtggcaatctgtgtttcttgttatgcggattcaacgaacggaaccttaatatgtctagagttgacgtatatacaactcacagccctgccggcacgtctgttcagaatatgctccactggagccaagctgtcaaatttcagaaattccaggcctttgattggggtagttctgctaagaattacttccattacaatcagtcttacccacctacctacaatgtaaaagatatgttggtcccaaccgcggtgtggagcggtggccacgactggctggcggacgtatacgacgttaatattctgctcactcagatcaccaatctggtgttccacgagtcaatacctgaatgggagcatctcgatttcatctgggggctggatgcaccatggaggctgtacaataaaattattaatttgatgaggaaataccagtag

SEQ ID NO: 5014 - DNA, 1032 bp, Artificial Sequence
  derived and/or modified sequence
atggcgtgtctcgaatttgtcccttttgatgtgcagatgtgcctggagttcctacccagcggtcctaagcctgtggtgtttctacaacatggcttactggccgactcttccaactgggttactaacctggcgaattcctctctgggtttcattctcgcggacgcgggatttgacgtttggatgggcaatagtcgaggcaacacctggtcaagaaagcacaagactctgtccgtgtcccaagatgaattttgggcattttcctatgacgagatggccaagtacgacttacccgccagcatcaatttcatcctcaacaagacaggacaggaacaagtttattacgtgggccacagccagggcacaactatcggattcattgcgttctctcaaataccggagctcgcaaagagaataaagatgttcttcgccctggggcccgtcgcctcggtagcattctgcacctcacccatggccaagttgggccgcttgccagaccatctgattaaagacctattcggcgacaaggaatttctaccccagagcgcctttctcaagtggttaggcacccatgtgtgtacacatgttattctgaaggagctgtgtggaaacttatgcttcctactctgtgggttcaacgaacgcaaccttaatatgagtcgagtggatgtctacaccacacattcaccagcaggcactagcgtgcaaaatatgttacactggtcccaggcagttaagttccagaagttccaggcattcgattgggggtccagtgcaaagaactatttccattacaatcagagttaccctccaacttataacgtcaaggacatgttggttcccactgctgtgtggtctggaggacatgattggctcgctgatgtatatgatgtcaatatacttctcactcagattacaaatctcgtttttcacgaatcgattccagagtgggagcaccttgacttcatttggggtcttgacgctccttggagactctataacaagatcataaatcttatgcgtaaatatcagtag

SEQ ID NO: 5015 - DNA, 1206 bp, Artificial Sequence
  derived and/or modified sequence
atggcatgcctggagttcgtgccctttgacgtgcagatgtgtcttgaatttctgccttcaggcgaattcgtcgttttgctcacatccggcgtacagctgcaaaccttcactgtatcagtgaccgaccttaaggggggcgcatctggcgttgtccggtcctctcggtgggtaagggggtttaccgattttcggtccaaggcagtggatctgtgtgggcctaaaccagtggtgttcttgcagcacgggttgctggcggattcctctaattgggtgacgaatttagccaacagctccttgggcttcatcttagctgatgctggatttgacgtctggatgggtaatagtagaggaaacacttggtcaaggaaacacaagactctctcagtcagccaggatgagttctgggcttttagggtgcccttcctggattattcatacgatgagatggctaaatacgatctgccagcttcaatcaacttcattctgaacaaaacaggccaagagcaggtgtactacgttggacatagtcagggaaccactatcggatttatcgccttcagtcagattcctgaactagcaaaacgcattaagatgtttttcgcccttgggccagtcgccagtgtcgccttttgtactagccccatggcaaagctcggccgtctgcccgaccatcttatcaaagatctgtttggcgacaaagagttcctgccccagagcgcttttttgaaatggttaggcacccacgtctgcacgcacgtcatcttgaaagaactgtgcggcaacctttgttttctgctgtgtgggtttaatgagcggaacctaaatatgagtcgtgtagacgtctacaccactcattcccctgctggcaccagcgttcagaacatgctgcactggtctcaggctgtaaaattccagaagttccaggcctttgactgggggtcatccgccaagaactatttccattacaaccaatcctacccccctacctataacgtgaaagatatgttggtaccaacagcggtatggtctggtggacatgactggttagccgatgtctacgacgttaacatcctgctcacgcagattacaaacttagtcttccacgagtcgatacctgagtgggaacacctcgatttcatttggggacttgatgccccctggcggctgtataataaaattataaatctgatgcgtaaatatcagtag

SEQ ID NO: 5016 - DNA, 873 bp, Artificial Sequence
  derived and/or modified sequence
atgaaaatgaggttcctgggtctggtggtctgcctggtcctatggacgctgcactctgagggctccggtggcaaactaacagctgttgacccagaaacgaatatgaacgtctccgagattatctcttattggggatttccctctgaagagtaccttgtggaaacagaagatggctatattctgtgcctgaatcgaattccccatggccgcaagaatcatagcgacaagggaccaaagccagtcgtgttccttcagcacggtctcctggccgactccagcaactgggtgaccaatttggcaaactcaagccttgggtttatactggccgatgctggatttgacgtctggatggggaattcacgcggtaatacttggtcccggaagcacaaaactctctcagttagccaggacgagttctgggccttcagctacgacgagatggccaaatacgatttgcccgcctcgattaattttattctgaacaagactggccaggagcaggtatattatgtcggacattctcaaggtacgaccattggcttcatcgcattctcacagattccggagctggccaagagaatcaaaatgttcttcgccctgggcccagtcgcttcagtcgcattctgtacgagtccaatggcaaaactggggaggcttcctgaccatctgattaaggatctgtttggggataaagaatttctgccacagtctgcttttctcaaatggctgggcacacacgtgtgcacccacgtgatcttgaaggaactgtgcggcaatttgtgtttcctgttgtgtgggttcaatgagcgcaatctcaacatgagccgcgtcgacgtctatacaactcactcaccggccggcacctcggtgtag

SEQ ID NO: 5017 - DNA, 1200 bp, Artificial Sequence
  derived and/or modified sequence
atgaagatgcgctttctgggacttgtggtgtgtttagtgttatggactctgcacagcgagggcagtggcggcaaactgaccgccgtggatcccgagacgaatatgaacgtttcagaaattatcagctattgggggttcccatccgaagagtacctagtcgagactgaagatggatatatcctttgtctgaatagaattccacacgggcgaaagaaccattctgacaagggcccaaagcccgtggtcttcctgcagcacggtcttctcgctgactcttccaactgggtgaccaacttggccaattcttcgctcggatttatcctggctgatgcgggcttcgatgtttggatgggcaattcccgcggtaacacttggtcaaggaaacacaaaaccttgagcgtgagtcaggatgaattttgggcattctcttacgacgaaatggctaagtatgacttgccagccagcatcaatttcatactcaacaagacagggcaagaacaggtgtattacgtgggtcattcccagggtacaacaattggctttatcgctttttcccagatccctgagcttgccaagagaatcaagatgttcttcgcgctgggccctgtggcctccgttgcattctgtactagcccaatggccaaactgggtaggttgcccgaccacctgattaaagacctcttcggcgataaggaattccttccgcagagcgcattcctgaaatggctgggtacccacgtgtgtacgcacgttattctcaaagaattgtgcggcaatctgtgctttctgctctgcggattcaatgagaggaacctaaacatgagcagagtggatgtatacactacccattcaccagctgggacttccgtccagaacatgctacattggagccaggctgtcaaatttcagaaatttcaagctttcgactggggctccagcgctaagaactattttcactataatcaaagttaccctccaacgtacaacgtgaaagacatgctcgtgcctacagctgtttggtcagggggacatgattggctggccgacgtatacgatgttaatattctgctgactcagataaccaatctggtgtttcacgagagcatcccggaatgggaacatttggattttatctggggccttgacgccccttggagactctataataaaatcatcaacctaatgcgtaagtatcaatag

SEQ ID NO: 5018 - DNA, 1200 bp, Artificial Sequence
  derived and/or modified sequence
atgaaaatgaggttcctcggcttggtggtgtgccttgtgctgtggaccctacactcagagggatcgggcgggaaattgactgctgtagatcccgaaaccaatatgaatgtttcggaaattattagttactggggcttcccgtccgaggagtatttggtggaaaccgaggacggctatattctttgccttaataggataccccacggcagaaaaaatcacagtgataaggggccaaagcccgtggtgttcctgcagcacgggttactggccgatagctcaaattgggtcaccaacttagcaaacagctccctgggatttattctcgcagacgccggttttgatgtgtggatgggaaactccagagggaatacatggtctcgcaagcataagactttgagtgtgtcccaagacgaattctgggccttttcttacgacgaaatggctaagtacgacctgcccgcctcaatcaacttcattttgaataaaacaggacaggagcaggtctactatgtgggacattcacagggcaccactataggtttcatcgccttttcacagatcccggagcttgccaaacggatcaagatgttctttgcccttggtcccgttgcatctgtggcgttttgcacatccccaatggcaaaactgggtagactgccagaccatctgattaaagacctgtttggtgataaggagtttctgccccagtccgccttcctgaaatggcttgggacacacgtgtgtacgcacgttatattgaaagagctgtgcggaaacctgtgctttttgttgtgcggtttcaacgaaaggaatctcaatatgtcacgtgttgacgtgtatactacgcactcacccgctggcacatccgtacaaaatatgttgcattggtcgcaggcagttaagttccagaaattccaagccttcgactgggggtctagtgcaaagaattactttcactacaatcagagctacccacctacttataacgtcaaagatatgcttgtgccaacagcggtttggagtggcgggcacgactggctggcagacgtgtatgacgttaacatactgctgacccagattacaaatctggtattccacgagtctatcccagaatgggaacatctggactttatctggggcctggatgccccatggagactgtataacaagataatcaatctaatgaggaagtaccaatag

SEQ ID NO: 5019 - DNA, 411 bp, Artificial Sequence
  derived and/or modified sequence
atgaagatgagatttctcggcttggtcgtttgcctggtgttgtggaccttacatagcgaaggtagcggtggtaagctgaccgccgtggacccagagacaaatatgaatgtaagtgagatcatcagttattggggctttccatcggaggaatacctggtggagaccgaagatgggtatatcttgtgtctcaatcggatcccgcatgggaggaaaaaccatagcgataagggtcctaagccagtggtgtttttacagcatggactgcttgccgattccagcaattgggtaacaaacttggcgaattctagccttggattcattctcgcagacgccggattcgacgtatggatgggaaatagtcgcggcaatacctggagccgcaagcatgtaacactagagcctgggtgctag

SEQ ID NO: 5020 - DNA, 660 bp, Artificial Sequence
  derived and/or modified sequence
atgaagatgaggttcctgggcctggtggtgtgcctggtgctgtggaccctgcacagcgagggcagcggcggcaagctgacagctgtggaccctgagaccaacatgaatgtgtctgagatcatctcctactggggcttccccagcgaggagtacctggtggagacagaagatggctacatcctgtgcctgaaccgcatcccccacggcaggaagaaccacagcgacaagggccccaagcctgtggtgttcctgcagcacggcctgctggccgacagcagcaactgggtgaccaacctggccaacagcagcctgggcttcatcctggctgatgctggctttgatgtgtggatgggcaacagccggggcaacacctggagcaggaagcacaagaccctgtctgtgtcccaggatgagttctgggccttctcctatgatgagatggccaagtatgacctgcctgccagcatcaacttcatcctgaacaagacaggccaggagcaggtgtactacgtgggccacagccagggcaccaccatcggcttcatcgccttcagccagatccctgagctggccaagaggatcaagatgttctttgccctgggccctgtggcctctgtggccttctgcaccagccccatggccaagctgggccgcctgtag

SEQ ID NO: 5021 - DNA, 1200 bp, Artificial Sequence
  derived and/or modified sequence
atgaagatgaggttcctgggcctggtggtgtgcctggtgctgtggaccctgcacagcgagggcagcggcggcaagctgacagctgtggaccctgagaccaacatgaatgtgtctgagatcatctcctactggggcttccccagcgaggagtacctggtggagacagaagatggctacatcctgtgcctgaaccgcatcccccacggcaggaagaaccacagcgacaagggccccaagcctgtggtgttcctgcagcacggcctgctggccgacagcagcaactgggtgaccaacctggccaacagcagcctgggcttcatcctggctgatgctggctttgatgtgtggatgggcaacagccggggcaacacctggagcaggaagcacaagaccctgtctgtgtcccaggatgagttctgggccttctcctatgatgagatggccaagtatgacctgcctgccagcatcaacttcatcctgaacaagacaggccaggagcaggtgtactacgtgggccacagccagggcaccaccatcggcttcatcgccttcagccagatccctgagctggccaagaggatcaagatgttctttgccctgggccctgtggcctctgtggccttctgcaccagccccatggccaagctgggccgcctgcctgaccacctgatcaaggacctgtttggagacaaggagttcctgccccagagcgccttcctgaagtggctgggcacccacgtgtgcacccacgtgatcctgaaggagctgtgtggcaacctgtgcttcctgctgtgtggcttcaatgaaagaaacctgaacatgagccgggtggatgtgtacaccacccacagccctgctggcacctctgtgcagaacatgctgcactggagccaggccgtgaagttccagaagttccaggcctttgactggggcagcagcgccaagaactacttccactacaaccagagctacccacccacctacaacgtgaaggacatgctggtgcccacagctgtgtggagcggcggccatgactggctggctgatgtgtatgatgtgaacatcctgctgacccagatcaccaacctggtgttccacgagagcatccctgagtgggagcacctggacttcatctggggcctggatgccccctggaggctgtacaacaagatcatcaacctgatgaggaagtaccagtag

SEQ ID NO: 5022 - DNA, 1074 bp, Artificial Sequence
  derived and/or modified sequence
atgaagctgcggaccctggccgtgtctgccaccgtggtgaaggatggagtgtctggagtgtgcagcttccgctgcagtgatgtgtctggagtgctgcccagcggccccaagcctgtggtgttcctgcagcacggcctgctggccgacagcagcaactgggtgaccaacctggccaacagcagcctgggcttcatcctggctgatgctggctttgatgtgtggatgggcaacagccggggcaacacctggagcaggaagcacaagaccctgtctgtgtcccaggatgagttctgggccttctcctatgatgagatggccaagtatgacctgcctgccagcatcaacttcatcctgaacaagacaggccaggagcaggtgtactacgtgggccacagccagggcaccaccatcggcttcatcgccttcagccagatccctgagctggccaagaggatcaagatgttctttgccctgggccctgtggcctctgtggccttctgcaccagccccatggccaagctgggccgcctgcctgaccacctgatcaaggacctgtttggagacaaggagttcctgccccagagcgccttcctgaagtggctgggcacccacgtgtgcacccacgtgatcctgaaggagctgtgtggcaacctgtgcttcctgctgtgtggcttcaatgaaagaaacctgaacatgagccgggtggatgtgtacaccacccacagccctgctggcacctctgtgcagaacatgctgcactggagccaggccgtgaagttccagaagttccaggcctttgactggggcagcagcgccaagaactacttccactacaaccagagctacccacccacctacaacgtgaaggacatgctggtgcccacagctgtgtggagcggcggccatgactggctggctgatgtgtatgatgtgaacatcctgctgacccagatcaccaacctggtgttccacgagagcatccctgagtgggagcacctggacttcatctggggcctggatgccccctggaggctgtacaacaagatcatcaacctgatgaggaagtaccagtag

SEQ ID NO: 5023 - DNA, 1032 bp, Artificial Sequence
  derived and/or modified sequence
atggcctgcctggagtttgtgccctttgatgtgcagatgtgcctggagttcctgcccagcggccccaagcctgtggtgttcctgcagcacggcctgctggccgacagcagcaactgggtgaccaacctggccaacagcagcctgggcttcatcctggctgatgctggctttgatgtgtggatgggcaacagccggggcaacacctggagcaggaagcacaagaccctgtctgtgtcccaggatgagttctgggccttctcctatgatgagatggccaagtatgacctgcctgccagcatcaacttcatcctgaacaagacaggccaggagcaggtgtactacgtgggccacagccagggcaccaccatcggcttcatcgccttcagccagatccctgagctggccaagaggatcaagatgttctttgccctgggccctgtggcctctgtggccttctgcaccagccccatggccaagctgggccgcctgcctgaccacctgatcaaggacctgtttggagacaaggagttcctgccccagagcgccttcctgaagtggctgggcacccacgtgtgcacccacgtgatcctgaaggagctgtgtggcaacctgtgcttcctgctgtgtggcttcaatgaaagaaacctgaacatgagccgggtggatgtgtacaccacccacagccctgctggcacctctgtgcagaacatgctgcactggagccaggccgtgaagttccagaagttccaggcctttgactggggcagcagcgccaagaactacttccactacaaccagagctacccacccacctacaacgtgaaggacatgctggtgcccacagctgtgtggagcggcggccatgactggctggctgatgtgtatgatgtgaacatcctgctgacccagatcaccaacctggtgttccacgagagcatccctgagtgggagcacctggacttcatctggggcctggatgccccctggaggctgtacaacaagatcatcaacctgatgaggaagtaccagtag

SEQ ID NO: 5024 - DNA, 1206 bp, Artificial Sequence
  derived and/or modified sequence
atggcctgcctggagtttgtgccctttgatgtgcagatgtgcctggagttcctgcccagcggggagtttgtggtgctgctgaccagcggcgtgcagctgcagaccttcaccgtgtctgtgacagacctgaagggcggggccagcggcgtggtgcgcagcagccgctgggtgcggggcttcacagacttccgcagcaaggctgtggacctgtgtggccccaagcctgtggtgttcctgcagcacggcctgctggccgacagcagcaactgggtgaccaacctggccaacagcagcctgggcttcatcctggctgatgctggctttgatgtgtggatgggcaacagccggggcaacacctggagcaggaagcacaagaccctgtctgtgtcccaggatgagttctgggccttccgggtgcccttcctggactacagctatgatgagatggccaagtatgacctgcctgccagcatcaacttcatcctgaacaagacaggccaggagcaggtgtactacgtgggccacagccagggcaccaccatcggcttcatcgccttcagccagatccctgagctggccaagaggatcaagatgttctttgccctgggccctgtggcctctgtggccttctgcaccagccccatggccaagctgggccgcctgcctgaccacctgatcaaggacctgtttggagacaaggagttcctgccccagagcgccttcctgaagtggctgggcacccacgtgtgcacccacgtgatcctgaaggagctgtgtggcaacctgtgcttcctgctgtgtggcttcaatgaaagaaacctgaacatgagccgggtggatgtgtacaccacccacagccctgctggcacctctgtgcagaacatgctgcactggagccaggccgtgaagttccagaagttccaggcctttgactggggcagcagcgccaagaactacttccactacaaccagagctacccacccacctacaacgtgaaggacatgctggtgcccacagctgtgtggagcggcggccatgactggctggctgatgtgtatgatgtgaacatcctgctgacccagatcaccaacctggtgttccacgagagcatccctgagtgggagcacctggacttcatctggggcctggatgccccctggaggctgtacaacaagatcatcaacctgatgaggaagtaccagtag

SEQ ID NO: 5025 - DNA, 873 bp, Artificial Sequence
  derived and/or modified sequence
atgaagatgaggttcctgggcctggtggtgtgcctggtgctgtggaccctgcacagcgagggcagcggcggcaagctgacagctgtggaccctgagaccaacatgaatgtgtctgagatcatctcctactggggcttccccagcgaggagtacctggtggagacagaagatggctacatcctgtgcctgaaccgcatcccccacggcaggaagaaccacagcgacaagggccccaagcctgtggtgttcctgcagcacggcctgctggccgacagcagcaactgggtgaccaacctggccaacagcagcctgggcttcatcctggctgatgctggctttgatgtgtggatgggcaacagccggggcaacacctggagcaggaagcacaagaccctgtctgtgtcccaggatgagttctgggccttctcctatgatgagatggccaagtatgacctgcctgccagcatcaacttcatcctgaacaagacaggccaggagcaggtgtactacgtgggccacagccagggcaccaccatcggcttcatcgccttcagccagatccctgagctggccaagaggatcaagatgttctttgccctgggccctgtggcctctgtggccttctgcaccagccccatggccaagctgggccgcctgcctgaccacctgatcaaggacctgtttggagacaaggagttcctgccccagagcgccttcctgaagtggctgggcacccacgtgtgcacccacgtgatcctgaaggagctgtgtggcaacctgtgcttcctgctgtgtggcttcaatgaaagaaacctgaacatgagccgggtggatgtgtacaccacccacagccctgctggcacctctgtgtag

SEQ ID NO: 5026 - DNA, 411 bp, Artificial Sequence
  derived and/or modified sequence
atgaagatgaggttcctgggcctggtggtgtgcctggtgctgtggaccctgcacagcgagggcagcggcggcaagctgacagctgtggaccctgagaccaacatgaatgtgtctgagatcatctcctactggggcttccccagcgaggagtacctggtggagacagaagatggctacatcctgtgcctgaaccgcatcccccacggcaggaagaaccacagcgacaagggccccaagcctgtggtgttcctgcagcacggcctgctggccgacagcagcaactgggtgaccaacctggccaacagcagcctgggcttcatcctggctgatgctggctttgatgtgtggatgggcaacagccggggcaacacctggagcaggaagcacgtgaccctggagcccggctgctag

SEQ ID NO: 5027 - DNA, 660 bp, Artificial Sequence
  derived and/or modified sequence
atgaagatgcggttcctgggcctggtggtgtgcctggtgctgtggactctccatagtgagggttccggcgggaagctgacagctgtcgatccagagactaacatgaatgtgagtgagattatcagctactggggcttcccgagcgaagagtatctcgtggagacagaggatgggtacatcctctgccttaatagaataccccacggaaggaaaaaccatagcgacaaaggacctaaaccggtggttttcctgcaacacggtctgctggctgacagttcaaactgggtgactaatttggccaattctagccttgggtttattctcgccgatgctggattcgacgtttggatggggaacagcagaggcaacacatggtctcgcaaacacaaaacgctctcagtcagtcaagacgaattttgggcgttcagctacgacgagatggctaagtatgatctgcctgccagcatcaatttcatcctcaacaagactggtcaggagcaggtgtattacgtcggacactcccaggggactaccattggctttatcgcgttctctcagatccctgagctggctaaaagaattaagatgttttttgcgctcggcccagtggcatctgtggccttctgcaccagtccaatggccaagctaggccgcctgtag

SEQ ID NO: 5028 - DNA, 1200 bp, Artificial Sequence
  derived and/or modified sequence
atgaagatgcggttcctgggcctggtggtgtgcctggtgctgtggactcttcattccgaggggagcggggggaagctgaccgctgtcgaccccgaaactaacatgaatgtgtcagaaatcatttcatactggggatttccaagcgaggaatatctggtagaaaccgaagatgggtatatcctctgtctcaatcgcatccctcacggcagaaaaaatcactccgataagggccctaagccagtggtgtttctgcagcacggtctgctggccgattcctctaattgggtgaccaatctcgcaaacagctccctggggtttatcctcgctgatgccggctttgacgtatggatgggcaatagtcggggtaatacttggtctaggaagcacaaaacacttagtgtgagccaggatgagttctgggccttctcatacgatgaaatggccaaatatgacctcccagcctcaattaattttatcctgaataagacgggtcaagaacaggtatactatgtgggtcatagccaggggaccacaattggctttatcgctttctcccaaattccagaacttgccaaacggatcaagatgttcttcgccttggggcccgtcgccagcgtcgccttttgtactagcccaatggctaagcttggccgactcccagaccatctgatcaaggatctgttcggcgacaaggaatttttaccgcagtctgcattcttgaaatggctgggaactcacgtctgcactcacgtcatcctgaaggaactgtgcgggaacttgtgtttcctcctgtgtggcttcaatgaaagaaacctcaatatgtcccgggttgatgtgtataccacgcattctcccgccgggacatccgttcagaacatgctacattggtcccaggccgtcaaattccagaagtttcaggccttcgattggggctcttctgcaaagaactattttcactataaccagtcatatcctcccacctataatgtgaaagacatgctggtccccactgccgtgtggtccggaggacatgactggctggcagatgtgtatgacgtgaacatcttactgactcagattaccaacctggtcttccatgagtccatccccgaatgggaacatctggattttatatggggtctggacgcgccatggcggctttacaacaagatcatcaacttaatgagaaagtaccagtag

SEQ ID NO: 5029 - DNA, 1074 bp, Artificial Sequence
  derived and/or modified sequence
atgaagctgcggaccctggccgtgagcgccaccgtggtgaaggacggcgtttcaggggtttgcagtttcagatgctccgacgtctcaggcgtcttaccatctggccctaagcccgtggtattcttacaacatggtcttctggctgattcaagtaattgggttacaaatttggccaacagttctctgggctttattctagctgatgctgggttcgatgtgtggatgggtaactcgagaggcaatacatggagccggaagcacaagaccctgtccgtgagtcaggacgagttctgggccttctcttacgacgagatggctaagtacgacttgcccgccagtatcaatttcatcctcaacaagacaggccaggagcaagtgtactacgttgggcatagtcagggcaccaccattgggttcatcgcattttcccagattcccgagctcgcgaagcggataaaaatgttcttcgctctcggaccagttgccagcgtggcattttgcacatcccctatggctaaacttggccgcctgcctgaccatctgatcaaggacctgttcggtgacaaggagtttctgcctcagagcgcttttctcaagtggcttggcactcacgtttgcacacatgtgattctgaaggaattatgcggcaatctctgcttcctgctgtgcgggttcaatgaacgtaacctgaacatgagcagggtcgatgtttacacaacccacagcccggccggcacatccgtgcaaaatatgcttcactggtctcaagctgttaaatttcagaagtttcaagccttcgactggggatctagcgctaagaactactttcattacaatcagtcctatccaccgacctataacgtcaaggatatgctggtgcccactgctgtgtggagcggaggccacgactggctcgccgatgtatatgatgtaaacatactgctaacacagatcaccaacctggtcttccacgagagcattcctgagtgggaacacctggatttcatctggggtctggacgccccgtggagactctacaataaaattattaacctgatgaggaaataccagtag

SEQ ID NO: 5030 - DNA, 1200 bp, Artificial Sequence
  derived and/or modified sequence
atgaagatgcggttcctgggcctggtggtgtgcctggtgctgtggactctccatagcgagggaagtggcggcaaacttactgccgtggacccggagacgaacatgaacgtgagcgagattattagctattggggcttcccctccgaggaatacctggtcgagaccgaggacggttacatcttatgcctcaacagaatcccacacggcaggaagaaccatagtgacaaggggccgaaacctgtcgtgttccttcagcacggattactggcagatagttctaattgggtcacaaacctcgctaacagctctctgggattcatccttgccgacgccggcttcgatgtctggatgggcaactccagaggaaatacctggtcacgcaagcataaaacattaagtgtgagtcaggacgaattctgggccttcagctatgacgaaatggccaagtacgatttgccagcatccattaatttcatcctcaataaaactggtcaggagcaggtatattacgtgggccatagtcaaggaacgacaatcggcttcatcgctttttctcagataccggagctcgccaaaaggatcaaaatgtttttcgctctaggccctgtggcaagcgtggctttctgtacaagccctatggcgaaacttggtcgccttccggaccacctgattaaggatctgttcggtgacaaagaatttctgccacagagcgcattcttgaagtggctgggaacacacgtgtgtacacatgtgattctcaaggaattgtgtgggaacctctgcttcctcctctgcggcttcaatgagcgaaacctgaacatgtcgcgcgtggatgtttataccactcactctcctgccgggacttccgttcagaatatgctccattggagtcaagctgtcaagttccaaaagtttcaggcttttgattggggtagctcagcaaagaactactttcattataaccagagttaccctcccacttataacgtgaaagatatgctggtgcctaccgctgtgtggagcggaggacatgattggttggccgacgtctacgacgtgaacatcctacttactcagataaccaacctcgttttccatgaatctatccccgagtgggaacacctggattttatctggggtctcgatgccccatggcggttatacaataagattataaatcttatgcggaagtatcagtag

SEQ ID NO: 5031 - DNA, 1032 bp, Artificial Sequence
  derived and/or modified sequence
atggcctgcctggagttcgtgcccttcgacgtgcagatgtgcctggaatttctgccatcgggacccaagccagtggtattcctccagcacggtcttctggctgatagctccaattgggtgactaacctggctaacagctcgctcggcttcatcctggccgacgccggttttgatgtttggatgggcaatagtcggggcaatacttggtcccgtaagcacaagaccctttctgttagtcaggacgagttctgggctttttcctacgacgagatggccaagtatgaccttcccgcttccattaactttatccttaacaaaactggccaggaacaggtgtactacgttgggcattcacagggtacaacgattggattcatcgcctttagccagataccagagctcgccaaaaggattaaaatgttttttgcacttggtcccgtcgcatctgtggccttctgcacatcccctatggcaaagctcgggcgacttccagaccacctcattaaggatttgtttggagataaagagttcctgcctcaaagcgccttcctgaagtggttaggcacccatgtttgcacgcacgtgatcctgaaagaactgtgtgggaatttatgcttcctcctgtgtgggtttaatgagcgcaatctgaacatgtcaagggtggacgtgtataccacacactcacctgctggaaccagtgtacaaaatatgcttcactggtctcaggcagtcaagtttcaaaagttccaggctttcgactgggggagctccgcgaaaaactattttcattacaaccaatcttatccaccaacttacaacgtcaaggacatgctcgtgccaacggcagtctggtccggaggacatgattggctggccgacgtttacgatgtcaacatcctattgacccagattacgaatctcgtattccacgaatccataccagagtgggaacacctggacttcatctggggcctggatgcgccctggaggctgtataacaaaataattaatctgatgagaaagtaccaatag

SEQ ID NO: 5032 - DNA, 1206 bp, Artificial Sequence
  derived and/or modified sequence
atggcctgcctggagttcgtgcccttcgacgtgcagatgtgcctggagttcctgccaagcggtgaatttgttgtccttttgaccagcggagtgcagctacagaccttcacggtttccgttacagacctgaaaggcggtgcaagcggcgtcgtacgctctagtcgctgggtcagaggcttcacagatttcagatctaaagcagtggatctctgtggccccaaacctgtggtcttcttacagcatgggttactggctgactcctcaaactgggtaaccaatctggccaattctagcctgggtttcattctggccgacgctggcttcgatgtgtggatgggaaattcaagaggaaatacgtggagcaggaagcacaagactctcagcgtatcccaggacgagttttgggcatttcgcgtacccttcctggactattcgtacgatgagatggcaaagtatgatctgcctgcttccatcaactttatactgaataagactggccaagaacaggtttactacgtcgggcactctcagggcactacgataggtttcattgccttctctcagataccggagctcgccaagcgcatcaagatgttctttgccctgggtcctgtagcaagcgttgctttttgtacgtcgcccatggctaaactgggaaggttgccagaccatttgatcaaggacctgttcggcgataaagaatttttgccccagtccgccttcctgaagtggctgggaacacacgtttgtactcacgtcatactgaaagagttatgcggcaatctttgtttcttgttatgtggattcaacgagcgaaacctgaatatgtcccgtgtggacgtatacaccacacactcccccgccggtacctcagtacagaacatgctgcactggtctcaagcagtcaagtttcaaaagtttcaggcctttgactggggttcatccgcaaaaaactattttcactacaatcagagctaccctccaacgtacaacgttaaggatatgttggtgcctactgccgtttggagcggggggcacgattggctcgctgatgtgtatgatgtaaatatcctcctgactcagatcaccaatctcgtattccatgaatccatccctgagtgggagcaccttgactttatttggggcctggatgctccctggcgtctatacaacaaaattattaacctgatgagaaagtaccagtag

SEQ ID NO: 5033 - DNA, 873 bp, Artificial Sequence
  derived and/or modified sequence
atgaagatgcggttcctgggcctggtggtgtgcctggtgctgtggaccctacacagtgaagggagcggagggaagctgactgccgtcgatcccgagaccaacatgaatgtgtccgaaataatctcttactggggcttcccatctgaagaatacttggtggagacagaagatggctacatcctctgcctcaatcgcatccctcatggccggaaaaaccactctgataagggtcccaagccagtggtcttccttcagcatggcttgctcgcagactcctccaactgggttactaaccttgctaacagcagtctagggttcattctcgccgatgcaggctttgacgtttggatggggaatagccgaggtaatacttggtccaggaaacataagaccctttctgtatcacaagatgaattctgggccttttcatacgacgagatggcaaaatatgatctgccggctagtattaatttcatcctgaataagaccggtcaggagcaggtctattacgtggggcactcccagggcaccactatcgggttcatagctttcagccagattcccgagttggcgaagagaatcaagatgttcttcgcattggggccagtggcgtctgtggccttttgcacctcacctatggcaaagctggggcggttaccagatcacctgatcaaagacctgtttggcgacaaggaattcctgccacagtcagcctttcttaaatggctgggtacacacgtctgcacccacgttatccttaaggagctgtgtggaaatctgtgctttctgctttgcggttttaatgagaggaatctgaatatgtcccgcgtggatgtctacacaacccattcgccggccggcactagcgtgtag

SEQ ID NO: 5034 - DNA, 1200 bp, Artificial Sequence
  derived and/or modified sequence
atgaagatgcggttcctgggcctggtggtgtgcctggtgctgtggaccctacactcagaggggagcgggggcaaattgaccgccgtagaccccgagaccaatatgaatgtttccgagatcatttcatactggggctttcccagcgaggaatatcttgttgagactgaggacggctatatcctgtgtctcaaccgcatcccacacggacggaagaaccactcagacaaaggccctaagccagtagtattcctgcaacacggattgttggccgactcttctaactgggtcaccaacctcgcaaactcctcactcggcttcatactggccgacgcgggcttcgatgtttggatgggcaattcaaggggaaacacttggtcacgcaagcacaagacattgagtgtttcacaggacgagttctgggcattttcatacgatgagatggctaaatatgacttaccagcttctataaatttcatcttgaacaagactggccaggagcaagtatactacgttgggcacagccaaggaaccactatcggattcatcgcctttagtcagatacccgagctggccaaaagaatcaagatgtttttcgctttggggcccgttgctagcgtcgccttttgcaccagccctatggccaagcttggccggttaccagaccaccttatcaaagatctgtttggcgacaaagagttcttacctcagtctgcatttctgaaatggctgggaacgcacgtgtgtactcacgtgattctgaaagagttgtgtggtaacctgtgctttcttctctgtgggttcaatgaaagaaacttgaacatgtcccgggtggatgtttataccacacatagcccggccggtacatcagtccaaaatatgctgcactggtcacaagctgtgaaattccaaaagttccaggcgtttgattggggtagtagcgctaagaactacttccattacaaccagtcatacccgccgacctacaatgtcaaggacatgttggtgcccacggctgtgtggagtgggggtcacgactggttggcagacgtatatgatgtcaacatcctgctcacccagatcaccaatctggtgtttcacgagtccattccggaatgggagcatttggattttatctggggactggacgccccttggagactgtataacaagatcattaaccttatgaggaaataccagtag

SEQ ID NO: 5035 - DNA, 1200 bp, Artificial Sequence
  derived and/or modified sequence
atgaagatgcggttcctgggcctggtggtgtgcctggtgctgtggaccttacactccgaaggttcaggcggtaagctcaccgccgtggatccagagacaaacatgaacgtgtcggaaattatcagctattggggctttccaagtgaggagtatctcgtggagacggaagatggctacatcctctgcctgaacaggatcccacacggacggaagaaccatagcgataagggcccaaagccagtggtgtttctccagcacggactcctggcagatagctctaattgggtgacaaacctggccaatagttctctggggttcattctggcagacgctggattcgatgtttggatggggaactctcggggaaacacatggtccagaaagcacaaaacgctgtcagtttcgcaggacgaattctgggcctttagctacgatgaaatggcaaaatacgatcttccagcatctattaatttcattcttaataaaacggggcaggagcaagtgtactacgttggccattcacagggaacaaccataggtttcatcgctttttctcaaatacctgagttagctaaacgtatcaaaatgttttttgctttgggccctgttgcctcagtggcattttgcacctcccctatggcaaaattaggtaggttaccagaccatctcataaaggacctgtttggtgacaaggagtttttaccccagagtgcatttctcaagtggctcggcactcacgtttgtacgcatgtcatactgaaggaattatgcggaaatctatgctttctgctgtgtggctttaatgaaaggaaccttaacatgtccagggtggacgtgtacaccacccacagtcctgccggaacatcggtccagaacatgctgcactggtcacaggccgtgaagttccaaaagttccaggcttttgactggggcagttccgctaaaaactactttcactacaatcaatcctatccaccaacttacaatgttaaggatatgctcgtgccgacagccgtctggtccggagggcatgattggctcgctgatgtgtacgacgtcaatatccttctgactcagattacgaatttagtatttcacgaatcgattccggagtgggagcaccttgactttatttgggggctcgacgctccttggcgcttatataataagataatcaacctgatgcgaaagtaccagtag

SEQ ID NO: 5036 - DNA, 411 bp, Artificial Sequence
  derived and/or modified sequence
atgaagatgcggttcctgggcctggtggtgtgcctggtgctgtggacgctgcactccgagggctctggcggcaaactgaccgccgtggacccagaaactaatatgaacgtgagcgaaatcatttcatactggggtttcccttctgaggaatacttggtcgagaccgaagacggatatatcttgtgcttaaaccggataccgcatggacgtaagaatcatagcgataaggggccaaaacctgtggtgtttttacagcacggtcttcttgccgactccagcaactgggtaaccaacttggccaactccagccttggatttattctagctgacgccggatttgacgtgtggatgggcaattcccgcggtaacacctggtcgcggaaacatgtgaccctcgaacccggttgctag

SEQ ID NO: 5037 - DNA, 660 bp, Artificial Sequence
  derived and/or modified sequence
atgaagatgcgcttcctcggcctggtcgtgtgtctggtcctttggaccctacactctgagggttccggcggaaagctgacagctgtggatccagagacgaatatgaatgtgagcgagatcatttcttattggggcttcccatccgaagagtatctggtggagaccgaagacggctacatcctttgtttgaataggatcccccatggtcgaaagaaccactcagataaaggccctaagcccgtcgtgtttctgcagcacggcctgcttgccgattcatccaactgggtcaccaacttggcaaacagtagtctgggcttcatcctggccgacgccggtttcgatgtgtggatggggaacagcaggggtaatacatggtcccgtaagcacaaaacactgagtgtatcacaagatgagttctgggcgttttcctacgacgagatggccaagtacgacctccccgcatccataaatttcatcctgaacaaaaccggccaggagcaggtctactacgtagggcactctcagggaacaactatcggatttatcgctttttcacagatacctgaactggccaaaagaatcaaaatgttcttcgcactcggtcccgtcgcaagtgtagccttctgcaccagtccaatggcaaagttaggtcgcctgtag

SEQ ID NO: 5038 - DNA, 1200 bp, Artificial Sequence
  derived and/or modified sequence
atgaaaatgcgattcctcggtttggtggtgtgcttggtcttgtggacactgcattccgaaggatccgggggaaaactgactgccgtggatcctgagacgaacatgaatgtgtctgagataatctcctactggggattcccctctgaggaatacctcgtggagactgaggatggctacatcctttgcctgaacaggattccccatggtcgtaagaatcatagtgataaagggcctaagcctgtggtgttccttcagcacgggctccttgctgactcgagcaattgggtaacaaatctggctaactcaagcctcgggtttattttagctgacgcaggcttcgacgtgtggatgggcaatagcagagggaacacatggtctcgaaaacataaaacactgagcgtctcccaggacgaattctgggcctttagctacgacgaaatggccaagtacgatctgccagcaagcatcaactttatcctgaataaaacagggcaggaacaggtctactatgttgggcattcccaaggaaccaccattggcttcatcgcattcagccagattcctgagctggctaagaggatcaagatgttttttgcgttaggccctgtcgcttcagttgcgttttgcacatcacctatggccaaactgggcagattacctgatcacctgattaaagatctttttggtgataaggagttcctcccccaaagcgcctttttaaaatggttagggacacatgtatgcacccatgtgatactaaaagagctgtgcggaaatttgtgcttcctcctatgcggtttcaacgaaagaaatctaaatatgtcacgcgtcgacgtgtataccacccatagtccagccggaacttccgttcagaacatgttgcattggtcccaggcggtgaaatttcagaagttccaggcctttgactggggctcatcagcaaaaaattacttccattacaatcaatcatacccaccgacttataacgtaaaggatatgctagttccaacggctgtctggagtggtggacatgattggctggccgatgtgtatgatgtgaacatactacttactcagattactaatttggttttccatgagtctatccctgagtgggagcacctcgactttatttggggactggacgccccttggcgactgtacaataagatcataaatctcatgcgaaaataccagtag

SEQ ID NO: 5039 - DNA, 1074 bp, Artificial Sequence
  derived and/or modified sequence
atgaagctgcggaccctcgcggtttctgccaccgtggtcaaggacggggtcagcggcgtgtgctcttttagatgtagtgacgtgtcaggcgttttgccctcaggcccaaaaccggtagtgttcctccaacatgggcttcttgcagacagctccaactgggtgaccaatctggccaacagctccttgggattcatactggctgatgccggattcgacgtctggatgggaaactcaagagggaacacttggagccgtaaacacaaaactctgtctgtgtctcaggatgaattctgggcttttagctacgatgaaatggccaaatacgatctgccagcatctatcaattttattctgaataaaactgggcaagaacaggtttattacgtaggacattctcaggggacgacaatcggctttatcgctttcagccaaatccccgaactagccaaacgtatcaagatgttcttcgctctcgggccagtggcttccgtggccttttgcaccagccctatggccaagctggggcgactgccagaccaccttatcaaagacttattcggcgacaaggaattcctgccccagagcgcgtttctgaagtggctgggaacacacgtctgcacccatgtgatactgaaagagttatgcgggaacctttgcttcttgctgtgcggtttcaatgagcggaacctcaacatgtcaagagtggacgtgtacaccacccatagccccgcaggcacgtctgtgcagaatatgctacactggtcccaggccgttaagtttcagaaatttcaagccttcgattggggaagtagcgccaaaaactactttcattataaccaatcttatcccccaacttacaatgtgaaggatatgctggtgcctaccgccgtgtggtcgggaggccacgactggcttgcggatgtgtacgatgtgaatatccttctgacccagattacgaacttggtcttccacgagagcatccctgaatgggagcacttagactttatctggggccttgacgccccttggcggctctacaataaaataataaatctgatgaggaagtatcagtag

SEQ ID NO: 5040 - DNA, 1200 bp, Artificial Sequence
  derived and/or modified sequence
atgaagatgagattccttggactggtggtgtgcctggttctgtggacgctgcactcggaaggctctggcggtaagctgaccgctgtggatcctgagacaaacatgaacgtgtcagaaatcatctcttattggggattcccttcggaggagtatctggtcgagacagaggacggctacattctatgcctgaacaggatacctcacgggagaaaaaatcacagcgacaagggacctaaaccggtggttttcctgcagcacggacttctagctgatagtagcaattgggtgacaaatctagcaaatagttcattagggtttattttggccgatgccggattcgacgtgtggatgggcaacagtcgcggtaatacttggtcccggaaacacaagaccttgtctgttagtcaagacgagttctgggccttttcatacgatgagatggcgaaatacgatttgccagcctcaatcaattttattctgaacaagacaggtcaggaacaagtttattacgtgggacattctcaggggaccacgatcggcttcattgcattctcccagattcccgagctggcaaaacggatcaaaatgttcttcgctctgggcccagtggcctctgttgccttttgtacgtccccaatggctaagttgggccgtcttccagatcacttgatcaaggatctgttcggagacaaagaattcctgccacagtccgctttcctcaaatggcttggtactcacgtttgtacccatgtgatccttaaggaattgtgtggaaacctgtgctttcttctgtgtggtttcaacgagaggaacttaaatatgtcccgggttgatgtttacaccacacattcacccgctggaacatcagtgcagaatatgctacactggtctcaggccgttaagttccaaaagttccaagcattcgactggggctcgtctgcaaaaaattacttccattataatcagagctatccccctacctacaatgtcaaggatatgctggtgccaaccgctgtgtggtcaggcggtcacgactggctggcagatgtctacgatgttaatatactgctgacacaaattaccaatctggtgttccatgaaagtattccagagtgggaacacctcgatttcatttggggcctggacgcaccatggcggttgtacaacaagataataaacctcatgcggaaataccagtag

SEQ ID NO: 5041 - DNA, 1032 bp, Artificial Sequence
  derived and/or modified sequence
atggcttgcctggaatttgtgccctttgatgtgcagatgtgcctagaattcctcccctcagggccaaagcccgtcgtctttttacagcatggcctgctagccgattcatcaaattgggtgaccaaccttgctaactcaagccttggattcatcctggcggatgccggttttgacgtatggatgggcaatagcagaggcaatacatggtcaaggaaacataaaaccctgtcagtctctcaagacgagttctgggcattcagttatgacgagatggcaaagtatgacctgcctgcttctatcaacttcattcttaacaaaacggggcaagagcaagtgtactatgtgggtcacagtcagggtaccacaattgggtttattgctttctcacagattcccgaactggcaaagcgcattaagatgtttttcgccctcggccctgtggcgtctgtcgccttttgcacatctcccatggctaaactcggaaggctccctgaccacctgatcaaagacctgttcggggacaaagagttcttgcctcagtccgccttcctgaaatggttaggcactcacgtgtgcacgcacgtgattctcaaagagctgtgcgggaatctttgttttctcctgtgcggatttaatgagagaaatcttaatatgtcgcgggtggacgtctacacgactcactctcccgctggtaccagtgtccagaacatgctgcactggagtcaggccgtgaaattccagaagtttcaggcctttgactggggatccagcgccaaaaactattttcactacaaccagtcatatcctccgacatacaatgtgaaagatatgttggtaccaacagctgtttggtctggaggccatgactggctagcagatgtgtacgacgttaatatactgctgacacagattactaacctggtgtttcacgaatctattccagagtgggagcacctggactttatttggggactggatgctccttggcggttgtacaataagatcattaacttaatgaggaaatatcagtag

SEQ ID NO: 5042 - DNA, 1206 bp, Artificial Sequence
  derived and/or modified sequence
atggcatgcttggaattcgtcccattcgatgtccagatgtgtctggagttcctgccaagtggcgagttcgtggtcctccttacttctggagtccagttacagacattcaccgtatccgtaacagaccttaagggaggcgcatccggggtggtgcgttcatcgagatgggtacggggatttacggattttcgttctaaggcggtcgatctctgtgggccaaagccagtagtgtttctgcaacatggattattagcagacagcagcaattgggtaaccaatctcgccaattcttcccttggattcattcttgccgatgctggatttgacgtttggatgggcaattctaggggcaatacttggagtcgcaagcacaaaaccctctccgtctcccaggacgagttttgggccttcagagtgcccttcctggattactcgtacgacgaaatggcaaaatatgatcttcccgcttcgatcaattttatcctgaataagactgggcaggagcaggtgtattatgtcggccactcccagggaacaactattggcttcattgctttctctcagatccccgagctggctaaaaggatcaagatgtttttcgctctgggccctgttgcatctgtcgccttctgcaccagccccatggctaaactgggcagactgccggatcatttgattaaagacctgtttggggacaaggagttccttcctcagagcgcttttcttaagtggttggggacacacgtatgtacgcatgtcatcctgaaagaattgtgtgggaatctctgcttcctgctgtgcgggtttaatgagcgaaatctcaatatgtcgcgagtggacgtctataccacacactcccccgcaggtaccagcgttcagaacatgctacactggagccaggccgtaaaatttcagaaattccaggctttcgattgggggtcttcagccaagaactactttcattataatcagagctacccaccgacctacaacgttaaagatatgcttgtgccaactgcagtgtggagcggcggacacgattggctggctgatgtgtatgacgtgaacattctgttaacacaaataaccaacctcgtctttcatgaaagcattcctgagtgggaacaccttgactttatctggggcctggatgctccatggaggttgtacaacaaaattattaaccttatgcggaaataccagtag

SEQ ID NO: 5043 - DNA, 873 bp, Artificial Sequence
  derived and/or modified sequence
atgaagatgcgctttctgggactggtggtatgcttagttctttggacactccacagtgagggatcaggcggaaaattgaccgcggtggaccctgagacgaatatgaatgtgtccgagatcattagctactggggcttcccaagtgaagagtacctggtcgaaactgaagacggatatatcctatgtctcaatcgcatcccacatgggagaaagaatcactctgacaaaggcccaaagccagtcgtattcctgcagcacggcttgctcgcagattccagcaattgggtgaccaacctggccaattcctctctgggatttattctcgctgatgccggtttcgatgtctggatgggcaacagccgtgggaacacatggtccaggaagcataagactcttagcgtgagccaagatgagttctgggcttttagttacgatgagatggctaaatacgacctacccgcaagtatcaatttcatactgaataaaacagggcaggaacaggtttattacgtcggacactctcagggcaccactataggctttatcgcattttcccaaatccccgaacttgccaaaaggataaaaatgttctttgcgctggggcctgtagcctcagtggctttctgcacttctccaatggctaagctcggcaggttgcccgaccacctgatcaaggatctgttcggagataaagaatttcttccccagtccgcattcctgaaatggctaggcacccacgtttgtacgcacgtaattctcaaggagttatgcggaaacctctgcttcctgctctgcgggttcaacgagcggaatctcaatatgtcacgggtggacgtctatactacccactcgcccgctggaaccagcgtatag

SEQ ID NO: 5044 - DNA, 1200 bp, Artificial Sequence
  derived and/or modified sequence
atgaagatgcggtttctgggactggtcgtgtgtcttgttctgtggacgctacattcagagggcagcggcggaaagttaactgccgtggatccagaaaccaacatgaatgtgagtgaaataattagttattggggatttccctctgaggagtacctggtcgaaaccgaagacgggtatatcctctgtctcaatagaatccctcatggcagaaagaatcattcggataaggggccaaaacccgttgtttttctccagcacggattattggctgactcaagcaattgggttacgaatctcgccaacagttccttgggcttcatcttggctgatgccggtttcgacgtctggatgggcaattcccggggaaacacatggagccgaaagcacaaaacccttagcgtgagccaggacgagttctgggctttctcttatgacgagatggcaaagtacgatctgccagcctccataaactttatcttaaacaagacgggtcaggagcaggtgtattacgtcgggcattcgcagggcactaccattgggtttatcgctttttcccaaattcctgaacttgccaaaagaataaagatgtttttcgccctgggcccagtcgccagtgtggctttttgtactagtccaatggctaagctggggcgtctcccggatcacctcataaaggacctgttcggcgacaaagagttcctgccccagtcagcctttctcaaatggctgggaacccatgtctgtacacatgtgatcctgaaagagctatgcggaaatctctgttttctgctctgtggcttcaatgagaggaatcttaacatgagcagagtcgatgtctacacaacacactcacctgcgggaactagcgtgcagaacatgcttcactggtcccaggccgtcaaattccagaaattccaggcattcgattggggctcaagtgccaagaattacttccactacaatcagtcctatcctcccacctacaacgtcaaggatatgttggttcccaccgctgtgtggtcagggggtcatgactggctggccgatgtttacgacgtaaacatccttctgacacagattactaatcttgtttttcacgaatcaattccggagtgggagcacctggattttatctggggcctcgatgctccttggagactctacaacaaaatcattaatctgatgcgaaagtaccagtag

SEQ ID NO: 5045 - DNA, 1200 bp, Artificial Sequence
  derived and/or modified sequence
atgaaaatgcgttttcttggactcgtggtgtgcttggtcctgtggaccctgcacagcgaaggctcgggcggtaaactgactgctgtagatcctgagactaacatgaacgtgagcgaaattatctcttactggggcttccctagcgaagagtatctggtagagacagaagacgggtacatcctgtgcctgaatcggatccctcatggcagaaaaaatcattctgacaagggacctaagccagtggttttcctgcagcacgggctgctcgccgactctagcaactgggtcaccaacctagccaatagttctctgggctttattctcgcagatgcgggtttcgacgtgtggatgggcaactcccgtgggaatacctggagcaggaagcataagactttatcagtgtctcaggacgaattctgggcctttagttatgacgaaatggccaaatacgatctacctgcctcgatcaattttatactcaataaaacgggccaggagcaggtatattatgtggggcatagccagggcaccaccattggctttatcgccttctcccagatcccggaattagctaagagaataaagatgttttttgctttgggcccagttgcttccgtggccttttgcaccagtcccatggccaaacttggccgactgcccgaccacctgattaaagacttattcggggataaagagttcctgcctcaaagtgcgttcctcaagtggctgggcacacacgtgtgcacccatgtgatcttgaaggagctatgtggtaatctgtgtttccttctgtgcgggttcaacgagaggaacctgaacatgtcgcgcgtggatgtatacactacccatagccccgcaggtaccagtgtccagaatatgcttcactggtcccaggccgtcaagtttcaaaaatttcaggcctttgactgggggagctcagcgaagaattattttcactacaatcagagttaccctcctacttacaacgtgaaggatatgctggtgccaactgctgtgtggagtggaggccacgattggttggcagacgtgtatgacgtcaacatcctgctaacccagattaccaacctcgtgtttcatgaatctatcccagagtgggagcacctcgactttatctggggcctggacgcgccttggcggctgtataacaagatcatcaacctcatgagaaagtatcagtag

SEQ ID NO: 5046 - DNA, 411 bp, Artificial Sequence
  derived and/or modified sequence
atgaaaatgaggtttcttgggctcgtggtgtgtctcgtactgtggacactgcattcggaaggttctggcggaaaactgactgccgtggacccagagaccaacatgaacgttagcgagattatcagctactggggttttccttcagaagagtatctggtggagacggaagacggttacatcctctgtttgaatcggataccacatgggcgtaaaaaccacagcgacaaaggaccaaagccagttgtatttctgcaacacggcctgttggccgacagtagtaattgggtgactaacctggccaattcctctttaggatttatcctagccgatgccggtttcgacgtgtggatgggcaactccaggggcaacacctggtctcggaagcacgtcacactagaacctggctgctag

SEQ ID NO: 5047 - DNA, 660 bp, Artificial Sequence
  derived and/or modified sequence
atgaagatgaggttcctcggcctggttgtctgtcttgtgctctggacactgcatagcgaaggaagcggaggcaagctgaccgctgtggatcctgagactaatatgaatgtatccgaaattatcagttattgggggtttcctagcgaagaatacttggttgaaacagaagacggttacatactctgtctgaatcgcataccacacggccgtaagaaccattcagataagggccccaaaccagttgtgtttctgcagcacggtttgctggcggattcgtctaactgggtgaccaatctcgcgaactcaagcctcggattcattctcgccgacgccggctttgacgtctggatgggaaacagtcgtggtaacacttggtctcgcaaacacaagacactgtcagtgagccaggacgagttctgggctttctcttacgacgaaatggcaaagtacgaccttcctgcatcaataaatttcattttaaacaagacagggcaagaacaggtgtactacgtaggtcactcacagggtaccaccatcggctttatcgcgttttcccagatacccgagctggccaaaagaatcaaaatgtttttcgcgctgggcccagtggccagtgtggccttctgcacatcccctatggcaaagctcggtcggttgtag

SEQ ID NO: 5048 - DNA, 1200 bp, Artificial Sequence
  derived and/or modified sequence
atgaagatgcggttcctgggactcgtagtgtgccttgtcctgtggaccctgcactctgaaggctccggcggtaagctgacagccgtcgaccctgagacaaacatgaacgtgtcagaaattatctcatactggggtttcccctccgaagagtaccttgtcgaaacagaagacggatatatactgtgcctgaatagaataccccacggccggaaaaatcacagcgataaaggcccgaaaccagtagtatttctgcagcacggcttgctggcagattctagtaactgggtgaccaatctggctaactcttccctgggcttcattctcgctgatgccgggttcgacgtgtggatggggaatagtaggggtaacacatggtcgcgcaagcacaaaaccttgagcgtaagccaagatgagttctgggcctttagctacgacgaaatggccaaatatgatctgcccgcttccatcaattttatactcaataagactggacaggagcaggtctactacgttggtcactctcagggcacaaccataggatttattgcctttagtcagattcccgaactcgctaagaggatcaaaatgtttttcgccctgggcccggtcgccagtgtcgcattttgtacatctccaatggcaaagttgggcagattgccagaccacctcatcaaagacctgtttggagataaggagtttctcccgcagtccgcgtttctcaaatggctggggacgcacgtgtgtactcatgtcatcctaaaggaattatgtgggaatttgtgttttctactgtgtggattcaatgaacggaacttgaatatgtcccgtgttgacgtgtataccactcattcaccggctgggacatccgttcaaaatatgttgcattggtcgcaggctgtgaagtttcagaaatttcaagcatttgactggggctcgagcgcaaagaactatttccattataatcagagttacccacccacttataatgtcaaagacatgctagttcccacagccgtgtggagtggggggcacgactggctggcggatgtgtatgacgttaacatcctactcacccaaattacaaatctcgtatttcatgaaagcatacctgaatgggaacacctagactttatctggggccttgacgccccttggaggctttacaacaagatcattaatctaatgaggaaataccagtag

SEQ ID NO: 5049 - DNA, 1074 bp, Artificial Sequence
  derived and/or modified sequence
atgaaattgcgcacccttgccgtttctgccactgtcgtcaaagacggagtgagcggtgtgtgttcttttcggtgctctgacgtatctggtgttctgccaagcggtccaaagcccgtggtcttcttacagcatggattgctggcagacagcagtaattgggtcaccaatttggcaaattcttctctcggcttcatactagccgacgcaggcttcgacgtatggatgggcaactcgcgtggaaatacgtggtcccgcaaacataaaacgctctcggtctcgcaggacgagttttgggccttttcatatgacgaaatggccaagtacgacttgcccgccagtattaatttcattttaaataagacaggccaggaacaagtatactatgttggccactcccagggtacaacgattggattcatcgcgttctctcagattcctgagttggccaagcgcatcaaaatgtttttcgcactcgggcccgtagccagcgttgcgttctgcacatctcccatggcaaagctgggtcgactccccgatcacctgattaaagacctcttcggagataaagagttcctccctcaatcagcgttcctaaaatggctgggcactcatgtgtgcacccatgtaatcttgaaggaactctgtggcaatctctgctttctgttgtgcggcttcaacgagaggaatcttaatatgtctagagttgacgtttacacaacccatagccccgccggcacctctgtgcaaaacatgctccattggtcccaggccgtgaaattccagaagttccaagcgtttgactggggtagcagcgctaagaactattttcattataaccaatcttacccaccaacgtacaatgttaaggatatgctggtgcctacagccgtttggtctggcggccatgactggttagctgacgtttatgacgtgaacattcttctgactcagatcaccaaccttgtttttcacgagtccatccctgaatgggaacatttagacttcatctggggtctagacgccccttggaggctctacaataagatcattaatctcatgagaaaataccagtag

SEQ ID NO: 5050 - DNA, 1200 bp, Artificial Sequence
  derived and/or modified sequence
atgaaaatgcgattcctgggcctggtcgtttgcctggtactgtggacacttcattctgaaggaagcggcggcaagttaactgcagtggacccagaaaccaacatgaacgtctcagaaattatcagttattgggggttcccgagcgaagagtacctggtggagactgaagacggttatattctctgcctgaaccggatcccgcacggccgtaaaaaccattcagataaaggccctaagccagtggtcttcctgcagcacggcttactggcggacagcagcaactgggtgacaaatctggccaattcatctctaggttttatcctggccgatgccggattcgacgtgtggatgggtaattcccgcggaaacacttggtcacgtaaacacaaaactctgtctgtcagccaggacgaattttgggcctttagctatgatgagatggcaaagtacgatttgcccgcttctatcaacttcattcttaataaaacaggacaggaacaggtgtactacgtcggacattcacaaggcaccacgatcggcttcattgcatttagccaaatccctgagctagcaaaaaggatcaaaatgttttttgcactggggccagtagcttcggttgcattttgtacttcccctatggcgaagttaggtaggctgcccgaccacctgattaaagacctctttggcgataaggaattccttcctcagtcagcttttttaaaatggctgggcacccacgtatgcactcatgtgatcctcaaggaactgtgcggtaacctttgtttcctgctatgtgggtttaatgaacgcaaccttaacatgtcgcgagtggatgtctacactactcacagccctgccggcacaagtgttcagaacatgttgcattggagccaggccgtgaagtttcagaagtttcaggcttttgactgggggagctccgcaaagaactacttccactataatcagtcatacccccccacttacaacgtcaaggatatgctggtgccgaccgccgtctggtctggaggccacgattggctggctgacgtctacgatgtaaatattctcctcacacagattacaaatcttgttttccacgagtctattcccgagtgggaacatctggactttatctggggcttagatgctccatggcgactgtataacaaaatcattaatttaatgcgcaaatatcagtag

SEQ ID NO: 5051 - DNA, 1032 bp, Artificial Sequence
  derived and/or modified sequence
atggcttgtttggagtttgtgccctttgacgtccagatgtgcctcgagtttctgcccagtgggccaaagcctgttgtgttcctccagcatggccttctcgcagattcctccaactgggttacaaatctcgccaattcatctcttgggttcatactcgcagacgctggattcgatgtgtggatgggcaacagtagaggcaacacatggtcaaggaagcacaagacactttcagtctcccaggacgaattctgggcattttcttacgatgagatggccaagtatgacctccccgcctccatcaatttcattctcaataaaacaggtcaggagcaggtttattatgtgggacacagccagggaacgactataggattcatcgcttttagccaaattcctgagctggccaaaagaattaaaatgtttttcgccctgggaccagtggcaagcgtcgccttttgtacttccccaatggcgaaactcggaaggcttcctgaccatttgattaaggacctgttcggagacaaggagttcctgccccagagcgcatttttgaaatggttgggcacccacgtctgtacgcacgtgattttaaaagagttgtgtgggaatctgtgctttttgctctgtggctttaacgagcggaacctcaacatgtcccgggtggatgtctacactacacattcccccgccggaacctcagtacaaaatatgttgcactggagtcaagccgtcaaatttcagaagttccaagcctttgattgggggtccagcgccaagaattacttccattataaccaatcctatccccctacatacaatgttaaggatatgttagttccaaccgctgtctggtcaggcggccacgattggctggcagacgtgtatgacgtgaacattctcctcacccagattacgaacctggtttttcatgaatccatcccagagtgggaacaccttgacttcatctggggactagatgcaccatggagactgtacaataaaattattaacctgatgcggaaatatcagtag

SEQ ID NO: 5052 - DNA, 1206 bp, Artificial Sequence
  derived and/or modified sequence
atggcgtgcttggagttcgttcctttcgatgttcagatgtgtttggaattcctgccatcaggagaatttgtggtcttattgacaagcggcgtgcaacttcaaacttttaccgtctcagtaactgatttaaaagggggcgcttcgggcgtggtccggtcaagccgctgggtgcgcggtttcaccgatttcagatcaaaagctgtggacttatgtggacccaaaccggtcgtttttctgcagcatgggctcctggcagacagcagtaattgggtaaccaatctagccaactcatcactgggcttcattttggccgacgccgggtttgatgtttggatgggtaactccagaggaaacacatggtcaaggaaacataaaaccctttcagtgagtcaggacgaattctgggccttcagagtaccctttctcgactattcctatgatgagatggcaaaatacgatttaccagcaagtataaattttattctgaataagaccggccaggagcaggtgtattatgtggggcacagccagggaacaaccatcggatttatagccttttctcagattccggaactagccaagagaatcaaaatgttcttcgccctgggccctgtcgcctcagtcgccttctgtacttccccaatggccaagttaggcagactgccagatcacttaataaaagatctcttcggcgataaagagttcctaccccaatctgcatttctgaagtggcttgggacacacgtatgcacccatgtgattctaaaggagctatgtgggaatctgtgcttcctcctgtgcggctttaacgaacgtaatctcaatatgtctagggtcgacgtgtacactacacacagcccagctggcactagcgtccagaatatgctccactggtcccaggcagttaagttccagaagttccaagcctttgattgggggtccagcgccaaaaattacttccactataatcaatcttacccacctacatacaatgtcaaagacatgctggtgccaacggcggtctggtccggcgggcatgactggctcgctgatgtctatgacgtaaatatccttcttacacagatcaccaacttagtattccacgagagtatccctgaatgggaacacctggattttatctggggcctggacgctccctggcggctttacaataagattattaatctcatgcggaaataccagtag

SEQ ID NO: 5053 - DNA, 873 bp, Artificial Sequence
  derived and/or modified sequence
atgaagatgcgtttcctcggcctcgtggtctgtttagtcttatggacattgcactcagaaggcagcggcgggaaactgacggcagtggatcctgagactaacatgaatgtgtcggagatcatttcgtactgggggttcccctctgaagagtacttggtggagactgaggacggctacattctgtgtctcaataggattccccatggacgaaagaaccatagtgataaaggaccaaagccagttgtattccttcagcatggccttctcgcagactccagtaattgggtgaccaacctggcgaactcctcccttgggtttattttagcagacgccgggtttgatgtatggatgggcaattcgcgcggaaacacctggagtaggaagcataaaactctgtctgtcagtcaggatgagttttgggcattttcatatgatgaaatggctaaatacgacctgccagccagcataaattttatcctcaataaaacagggcaggaacaggtgtattatgtcgggcactcccaggggaccactatcggatttatcgcattctcacaaattcctgaactggctaaacgcataaaaatgttttttgccttgggacccgtagccagtgtggctttctgcaccagtccaatggccaaattagggcggttgcctgaccatcttataaaggatctgttcggggataaagagttcttaccacaatcagcttttctgaagtggttgggtacacacgtttgcactcacgtaattttgaaagaactctgtggaaatttgtgttttctgctctgcggcttcaacgaacgcaatcttaacatgtctagagtcgacgtgtatactacacattctccggcaggcacgtcagtttag

SEQ ID NO: 5054 - DNA, 1200 bp, Artificial Sequence
  derived and/or modified sequence
atgaaaatgcgttttcttggcttggtggtctgcctggtactgtggacgctccactcagaaggttcaggtggaaaactgactgccgtagaccccgagacgaatatgaacgtgtccgaaattatctcttattggggttttccaagtgaagaatatcttgtagaaaccgaagacgggtacattctgtgtttgaaccgcataccccacggacggaagaatcactctgacaagggcccaaaaccggtagtgttcttgcagcatggtctgttggctgatagcagtaactgggttactaatctcgcgaatagttctctcggattcatactcgcagacgccggctttgacgtctggatgggcaattcacgaggcaacacctggtcccgtaaacataagactttaagcgtgtcacaggacgagttctgggctttctcatatgacgaaatggctaagtatgacttgccagcttccatcaatttcatcctcaataagactggccaggagcaggtgtactatgtaggccattcccaaggtactactatcgggttcattgccttttcccagatcccggagctcgcgaaaagaatcaagatgttcttcgctctgggccccgtggcgtcagtggcattttgtactagtccgatggccaagctcgggcggctccctgatcatctgattaaagatctctttggggacaaggagtttcttccccagtccgcatttttaaaatggctcggaactcacgtgtgcactcatgtcatcttgaaggaactctgtggcaacctgtgttttctgttgtgtggctttaacgaacgaaatctgaatatgtcccgagtcgatgtatacacaactcattcaccagccggtacatccgtgcagaatatgctgcactggtctcaagcagtgaagttccagaaatttcaagcttttgactggggctcttcagcaaagaattattttcactataatcaaagctatcctccaacatacaatgtaaaagacatgcttgtgccaacagccgtgtggagtggcggtcacgattggctggccgacgtatacgacgtaaacatcctgcttacacaaattacaaaccttgttttccatgagtctatccccgagtgggagcacctggattttatctggggactcgatgccccatggcggctttataacaaaataataaatttaatgcgcaaataccagtag

SEQ ID NO: 5055 - DNA, 1200 bp, Artificial Sequence
  derived and/or modified sequence
atgaaaatgcgcttcttgggcctcgtggtttgtctggtgctctggacactacactccgaaggttctggtgggaaactgaccgccgtcgatccagaaaccaacatgaatgtgagcgaaattatcagctactggggattcccatccgaagaatatcttgtggaaactgaggatgggtacatcctgtgcctcaaccgtatcccgcacggccggaaaaatcactccgataaggggcctaagcccgttgtattcctgcagcacgggctgctagccgatagctccaattgggtcacaaacctcgccaactcctcactgggcttcattctcgccgacgctggatttgatgtgtggatgggcaatagccgaggcaacacctggtcacgcaagcacaaaacactctcagtgtctcaagacgagttttgggccttcagctacgacgagatggccaagtatgacctgcctgcatccattaattttatcttgaataagactgggcaggaacaggtgtattacgtcgggcactcacagggaacaacgatcggatttatcgcattttctcagattcccgagctggctaaacgcattaaaatgttctttgctcttggcccggtcgcctctgttgccttttgtacctctccaatggctaagctgggtcgtctgcccgatcacctgatcaaagacctattcggggataaggagtttctccctcaatctgcgttccttaaatggctcggcactcacgtttgcacccacgtcattctgaaggaactgtgcggcaacttatgttttctattgtgcggatttaacgagcgcaacttgaatatgagcagagtcgacgtatacacaacacactcacctgcaggaaccagcgtgcagaatatgctccactggtcccaagctgtgaagttccaaaaattccaagctttcgattggggaagctctgctaaaaactacttccactataatcaatcatacccgccaacatacaatgtaaaggacatgctcgtgccaacggccgtgtggagcggcgggcacgattggctggcagacgtatacgatgtaaacatactgctcacacagattacaaacctggtctttcatgagtctattcctgagtgggaacatctcgactttatctgggggctggatgcaccttggcgcctctacaacaagataattaacctcatgagaaaatatcaatag

SEQ ID NO: 5056 - DNA, 411 bp, Artificial Sequence
  derived and/or modified sequence
atgaagatgcgcttcctgggactggttgtttgtttggtgctgtggaccttgcacagtgagggcagtggaggtaagcttaccgccgtggatccagaaaccaacatgaatgtttctgaaattatttcctattggggatttccgtccgaggagtatttagtcgagactgaagacggttacatcctgtgcctgaacagaatacctcatggccgaaagaaccactcggacaagggccctaagcctgtcgtcttccttcaacatggactcttagctgactcatcaaattgggttactaacctcgccaactcatctctgggattcattcttgcggacgccgggtttgacgtgtggatgggcaactctcgggggaatacttggtcacgcaagcatgtgactctggagccaggctgctag

SEQ ID NO: 5057 - DNA, 753 bp, Artificial Sequence
  derived and/or modified sequence
agctcctgattctgcagaaaacacgaaactgagctgtacaaagatgctgatgaggggctgcagcatgcaattcacttcaccagcagtcactaagaatgaaaatgcggttcttggggttggtggtctgtttggttctctggaccctgcattctgaggggtctggagggaaactgacagctgtggatcctgaaacaaacatgaatgtgagtgaaattatctcttactggggattccctagtgaggaatacctagttgagacagaagatggatatattctgtgccttaaccgaattcctcatgggaggaagaaccattctgacaaaggtcccaaaccagttgtcttcctgcaacatggcttgctggcagattctagtaactgggtcacaaaccttgccaacagcagcctgggcttcattcttgctgatgctggttttgacgtgtggatgggcaacagcagaggaaatacctggtctcggaaacataagacactctcagtttctcaggatgaattctgggctttcagttatgatgagatggcaaaatatgacctaccagcttccattaacttcattctgaataaaactggccaagaacaagtgtattatgtgggtcattctcaaggcaccactataggttttatagcattttcacagatccctgagctggctaaaaggattaaaatgttttttgccctgggtcctgtggcttccgtcgccttctgtactagccctatggccaaattaggacgattac

SEQ ID NO: 5058 - DNA, 2782 bp, Artificial Sequence
  derived and/or modified sequence
gcgtaggcgacgcgctggtagagctgtggacctgccagcctgcgaggcggaggacgggctccatctcttagaaacgcctacggcgcatgctctatggggtcaactggggggctggcaagcggcagcgctggtctggggcggagtctccgaggcacttcccggtggctggctgctctgattggctgaacaaatagtccgagggtggtgggcatccgccctcccgacaaggcagaccaggccccctgcaggtcccctatccgcaccccggcccctgagagctggcactgcgactcgagacagcggcccggcaggacagctccagaatgaaaatgcggttcttggggttggtggtctgtttggttctctggaccctgcattctgaggggtctggagggaaactgacagctgtggatcctgaaacaaacatgaatgtgagtgaaattatctcttactggggattccctagtgaggaatacctagttgagacagaagatggatatattctgtgccttaaccgaattcctcatgggaggaagaaccattctgacaaaggtcccaaaccagttgtcttcctgcaacatggcttgctggcagattctagtaactgggtcacaaaccttgccaacagcagcctgggcttcattcttgctgatgctggttttgacgtgtggatgggcaacagcagaggaaatacctggtctcggaaacataagacactctcagtttctcaggatgaattctgggctttcagttatgatgagatggcaaaatatgacctaccagcttccattaacttcattctgaataaaactggccaagaacaagtgtattatgtgggtcattctcaaggcaccactataggttttatagcattttcacagatccctgagctggctaaaaggattaaaatgttttttgccctgggtcctgtggcttccgtcgccttctgtactagccctatggccaaattaggacgattaccagatcatctcattaaggacttatttggagacaaagaatttcttccccagagtgcgtttttgaagtggctgggtacccacgtttgcactcatgtcatactgaaggagctctgtggaaatctctgttttcttctgtgtggatttaatgagagaaatttaaatatgtctagagtggatgtatatacaacacattctcctgctggaacttctgtgcaaaacatgttacactggagccaggctgttaaattccaaaagtttcaagcctttgactggggaagcagtgccaagaattattttcattacaaccagagttatcctcccacatacaatgtgaaggacatgcttgtgccgactgcagtctggagcgggggtcacgactggcttgcagatgtctacgacgtcaatatcttactgactcagatcaccaacttggtgttccatgagagcattccggaatgggagcatcttgacttcatttggggcctggatgccccttggaggctttataataaaattattaatctaatgaggaaatatcagtgaaagctggacttgagctgtgtaccaccaagtcaatgattatgtcatgtgaaaatgtgtttgcttcatttctgtaaaacacttgtttttctttcccaggtcttttgtttttttatatccaagaaaatgataactttgaagatgcccagttcactctagtttcaattagaaacatactagctattttttctttaattagggctggaataggaagccagtgtctcaaccatagtattgtctctttaagtcttttaaatatcactgatgtgtaaaaaggtcattatatccattctgtttttaaaatttaaaatatattgactttttgcccttcataggacaaagtaatatatgtgttggaattttaaaattgtgttgtcattggtaaatctgtcactgacttaagcgaggtataaaagtacgcagttttcatgtccttgccttaaagagctctctagtctaacggtcttgtagttagagatctaaatgacattttatcatgttttcctgcagcaggtgcatagtcaaatccagaaatatcacagctgtgccagtaataaggatgctaacaattaattttatcaaacctaactgtgacagctgtgatttgacacgttttaattgctcaggttaaatgaaatagttttccggcgtcttcaaaaacaaattgcactgataaaacaaaaacaaaagtatgttttaaatgctttgaagactgatacactcaaccatctatattcatgagctctcaatttcatggcaggccatagttctacttatctgagaagcaaatccctgtggagactataccactattttttctgagattaatgtactcttggagcccgctactgtcgttattgatcacatctgtgtgaagccaaagccccgtggttgcccatgagaagtgtccttgttcattttcacccaaatgaagtgtgaacgtgatgttttcggatgcaaactcagctcagggattcattttgtgtcttagttttatatgcatccttatttttaatacacctgcttcacgtccctatgttgggaagtccatatttgtctgcttttcttgcagcatcatttccttacaatactgtccggtggacaaaatgacaattgatatgtttttctgatataattactttagctgcactaacagtacaatgcttgttaatggttaatataggcagggcgaatactactttgtaacttttaaagtcttaaacttttcaataaaattgagtgagacttataggcccaaagaa

SEQ ID NO: 5059 - DNA, 2506 bp, Artificial Sequence
  derived and/or modified sequence
aaatcgaaactaaacgtaagcttcagaaaccgaaacttaatagaagagctcaagagccgcggccagacgtttgcggagtccagggtctttcggagttgaatttgcagctgggctccttcactttggtctcggcttttatctgcctccctgataggtttttggtcttggtgacttcaagaatgaagctgcggactctcgctgtgagtgctacagttgttaaagatggcgtgtctggagtttgttcctttcgatgttcagatgtgtctggagttcttccttctggtcccaaaccagttgtcttcctgcaacatggcttgctggcagattctagtaactgggtcacaaaccttgccaacagcagcctgggcttcattcttgctgatgctggttttgacgtgtggatgggcaacagcagaggaaatacctggtctcggaaacataagacactctcagtttctcaggatgaattctgggctttcagttatgatgagatggcaaaatatgacctaccagcttccattaacttcattctgaataaaactggccaagaacaagtgtattatgtgggtcattctcaaggcaccactataggttttatagcattttcacagatccctgagctggctaaaaggattaaaatgttttttgccctgggtcctgtggcttccgtcgccttctgtactagccctatggccaaattaggacgattaccagatcatctcattaaggacttatttggagacaaagaatttcttccccagagtgcgtttttgaagtggctgggtacccacgtttgcactcatgtcatactgaaggagctctgtggaaatctctgttttcttctgtgtggatttaatgagagaaatttaaatatgtctagagtggatgtatatacaacacattctcctgctggaacttctgtgcaaaacatgttacactggagccaggctgttaaattccaaaagtttcaagcctttgactggggaagcagtgccaagaattattttcattacaaccagagttatcctcccacatacaatgtgaaggacatgcttgtgccgactgcagtctggagcgggggtcacgactggcttgcagatgtctacgacgtcaatatcttactgactcagatcaccaacttggtgttccatgagagcattccggaatgggagcatcttgacttcatttggggcctggatgccccttggaggctttataataaaattattaatctaatgaggaaatatcagtgaaagctggacttgagctgtgtaccaccaagtcaatgattatgtcatgtgaaaatgtgtttgcttcatttctgtaaaacacttgtttttctttcccaggtcttttgtttttttatatccaagaaaatgataactttgaagatgcccagttcactctagtttcaattagaaacatactagctattttttctttaattagggctggaataggaagccagtgtctcaaccatagtattgtctctttaagtcttttaaatatcactgatgtgtaaaaaggtcattatatccattctgtttttaaaatttaaaatatattgactttttgcccttcataggacaaagtaatatatgtgttggaattttaaaattgtgttgtcattggtaaatctgtcactgacttaagcgaggtataaaagtacgcagttttcatgtccttgccttaaagagctctctagtctaacggtcttgtagttagagatctaaatgacattttatcatgttttcctgcagcaggtgcatagtcaaatccagaaatatcacagctgtgccagtaataaggatgctaacaattaattttatcaaacctaactgtgacagctgtgatttgacacgttttaattgctcaggttaaatgaaatagttttccggcgtcttcaaaaacaaattgcactgataaaacaaaaacaaaagtatgttttaaatgctttgaagactgatacactcaaccatctatattcatgagctctcaatttcatggcaggccatagttctacttatctgagaagcaaatccctgtggagactataccactattttttctgagattaatgtactcttggagcccgctactgtcgttattgatcacatctgtgtgaagccaaagccccgtggttgcccatgagaagtgtccttgttcattttcacccaaatgaagtgtgaacgtgatgttttcggatgcaaactcagctcagggattcattttgtgtcttagttttatatgcatccttatttttaatacacctgcttcacgtccctatgttgggaagtccatatttgtctgcttttcttgcagcatcatttccttacaatactgtccggtggacaaaatgacaattgatatgtttttctgatataattactttagctgcactaacagtacaatgcttgttaatggttaatataggcagggcgaatactactttgtaacttttaaagtcttaaacttttcaataaaattgagtgagacttataggccc

SEQ ID NO: 5060 - DNA, 3131 bp, Artificial Sequence
  derived and/or modified sequence
ttttgattgtcagctcctgattctgcagaaaacacgaaactgagctgtacaaagatgctgatgaggggctgcagcatgcaattcacttcaccagcagtcactaaggtctgatctcttttctaaccatacctggaagatggaatgctggacccaggaaggctttgacatatcaatgcaccagggatcttaccaaactaaattttaagcacttatagctcaagattctccctctgagatgaaacatacttccaccctgtcatgtgtcagcttcagaagatatcaattgctcaagaaagtgttggacaagcagaaaagcacactgaacatttctggacttgtgaaagagctctgaatatggatctctcagggatattccatccccaccaatgctttaccaatgcgagagctggccaggctgagacatttaatgataacatggaacaatttattcaggaagatagtcaactactcatgtggctttatgattataaaacccactgaaaattgggtcccttgattctcttgatttttcctaagccttactccctaaagtctccaatttgatgaggtatttgatacttgatctctccttgaagtaaaatttggagcaaaatatattggactggaaggcctgagacctcgataagaagaaacatgaaccccagagccacagaatgaaaatgcggttcttggggttggtggtctgtttggttctctggaccctgcattctgaggggtctggagggaaactgacagctgtggatcctgaaacaaacatgaatgtgagtgaaattatctcttactggggattccctagtgaggaatacctagttgagacagaagatggatatattctgtgccttaaccgaattcctcatgggaggaagaaccattctgacaaaggtcccaaaccagttgtcttcctgcaacatggcttgctggcagattctagtaactgggtcacaaaccttgccaacagcagcctgggcttcattcttgctgatgctggttttgacgtgtggatgggcaacagcagaggaaatacctggtctcggaaacataagacactctcagtttctcaggatgaattctgggctttcagttatgatgagatggcaaaatatgacctaccagcttccattaacttcattctgaataaaactggccaagaacaagtgtattatgtgggtcattctcaaggcaccactataggttttatagcattttcacagatccctgagctggctaaaaggattaaaatgttttttgccctgggtcctgtggcttccgtcgccttctgtactagccctatggccaaattaggacgattaccagatcatctcattaaggacttatttggagacaaagaatttcttccccagagtgcgtttttgaagtggctgggtacccacgtttgcactcatgtcatactgaaggagctctgtggaaatctctgttttcttctgtgtggatttaatgagagaaatttaaatatgtctagagtggatgtatatacaacacattctcctgctggaacttctgtgcaaaacatgttacactggagccaggctgttaaattccaaaagtttcaagcctttgactggggaagcagtgccaagaattattttcattacaaccagagttatcctcccacatacaatgtgaaggacatgcttgtgccgactgcagtctggagcgggggtcacgactggcttgcagatgtctacgacgtcaatatcttactgactcagatcaccaacttggtgttccatgagagcattccggaatgggagcatcttgacttcatttggggcctggatgccccttggaggctttataataaaattattaatctaatgaggaaatatcagtgaaagctggacttgagctgtgtaccaccaagtcaatgattatgtcatgtgaaaatgtgtttgcttcatttctgtaaaacacttgtttttctttcccaggtcttttgtttttttatatccaagaaaatgataactttgaagatgcccagttcactctagtttcaattagaaacatactagctattttttctttaattagggctggaataggaagccagtgtctcaaccatagtattgtctctttaagtcttttaaatatcactgatgtgtaaaaaggtcattatatccattctgtttttaaaatttaaaatatattgactttttgcccttcataggacaaagtaatatatgtgttggaattttaaaattgtgttgtcattggtaaatctgtcactgacttaagcgaggtataaaagtacgcagttttcatgtccttgccttaaagagctctctagtctaacggtcttgtagttagagatctaaatgacattttatcatgttttcctgcagcaggtgcatagtcaaatccagaaatatcacagctgtgccagtaataaggatgctaacaattaattttatcaaacctaactgtgacagctgtgatttgacacgttttaattgctcaggttaaatgaaatagttttccggcgtcttcaaaaacaaattgcactgataaaacaaaaacaaaagtatgttttaaatgctttgaagactgatacactcaaccatctatattcatgagctctcaatttcatggcaggccatagttctacttatctgagaagcaaatccctgtggagactataccactattttttctgagattaatgtactcttggagcccgctactgtcgttattgatcacatctgtgtgaagccaaagccccgtggttgcccatgagaagtgtccttgttcattttcacccaaatgaagtgtgaacgtgatgttttcggatgcaaactcagctcagggattcattttgtgtcttagttttatatgcatccttatttttaatacacctgcttcacgtccctatgttgggaagtccatatttgtctgcttttcttgcagcatcatttccttacaatactgtccggtggacaaaatgacaattgatatgtttttctgatataattactttagctgcactaacagtacaatgcttgttaatggttaatataggcagggcgaatactactttgtaacttttaaagtcttaaacttttcaataaaattgagtgagacttataggcccaaag

SEQ ID NO: 5061 - DNA, 2513 bp, Artificial Sequence
  derived and/or modified sequence
aaatcgaaactaaacgtaagcttcagaaaccgaaacttaatagaagagctcaagagccgcggccagacgtttgcggagtccagggtctttcggagttgaatttgcagctgggctccttcactttggtctcggcttttatctgcctccctgataggtttttggtcttggtgacttcaagaatgaagctgcggactctcgctgtgagtgctacagttgttaaagatggcgtgtctggagtttgttcctttcgatgttcagatgtgtctggagtttcttccttctggtcccaaaccagttgtcttcctgcaacatggcttgctggcagattctagtaactgggtcacaaaccttgccaacagcagcctgggcttcattcttgctgatgctggttttgacgtgtggatgggcaacagcagaggaaatacctggtctcggaaacataagacactctcagtttctcaggatgaattctgggctttcagttatgatgagatggcaaaatatgacctaccagcttccattaacttcattctgaataaaactggccaagaacaagtgtattatgtgggtcattctcaaggcaccactataggttttatagcattttcacagatccctgagctggctaaaaggattaaaatgttttttgccctgggtcctgtggcttccgtcgccttctgtactagccctatggccaaattaggacgattaccagatcatctcattaaggacttatttggagacaaagaatttcttccccagagtgcgtttttgaagtggctgggtacccacgtttgcactcatgtcatactgaaggagctctgtggaaatctctgttttcttctgtgtggatttaatgagagaaatttaaatatgtctagagtggatgtatatacaacacattctcctgctggaacttctgtgcaaaacatgttacactggagccaggctgttaaattccaaaagtttcaagcctttgactggggaagcagtgccaagaattattttcattacaaccagagttatcctcccacatacaatgtgaaggacatgcttgtgccgactgcagtctggagcgggggtcacgactggcttgcagatgtctacgacgtcaatatcttactgactcagatcaccaacttggtgttccatgagagcattccggaatgggagcatcttgacttcatttggggcctggatgccccttggaggctttataataaaattattaatctaatgaggaaatatcagtgaaagctggacttgagctgtgtaccaccaagtcaatgattatgtcatgtgaaaatgtgtttgcttcatttctgtaaaacacttgtttttctttcccaggtcttttgtttttttatatccaagaaaatgataactttgaagatgcccagttcactctagtttcaattagaaacatactagctattttttctttaattagggctggaataggaagccagtgtctcaaccatagtattgtctctttaagtcttttaaatatcactgatgtgtaaaaaggtcattatatccattctgtttttaaaatttaaaatatattgactttttgcccttcataggacaaagtaatatatgtgttggaattttaaaattgtgttgtcattggtaaatctgtcactgacttaagcgaggtataaaagtacgcagttttcatgtccttgccttaaagagctctctagtctaacggtcttgtagttagagatctaaatgacattttatcatgttttcctgcagcaggtgcatagtcaaatccagaaatatcacagctgtgccagtaataaggatgctaacaattaattttatcaaacctaactgtgacagctgtgatttgacacgttttaattgctcaggttaaatgaaatagttttccggcgtcttcaaaaacaaattgcactgataaaacaaaaacaaaagtatgttttaaatgctttgaagactgatacactcaaccatctatattcatgagctctcaatttcatggcaggccatagttctacttatctgagaagcaaatccctgtggagactataccactattttttctgagattaatgtactcttggagcccgctactgtcgttattgatcacatctgtgtgaagccaaagccccgtggttgcccatgagaagtgtccttgttcattttcacccaaatgaagtgtgaacgtgatgttttcggatgcaaactcagctcagggattcattttgtgtcttagttttatatgcatccttatttttaatacacctgcttcacgtccctatgttgggaagtccatatttgtctgcttttcttgcagcatcatttccttacaatactgtccggtggacaaaatgacaattgatatgtttttctgatataattactttagctgcactaacagtacaatgcttgttaatggttaatataggcagggcgaatactactttgtaacttttaaagtcttaaacttttcaataaaattgagtgagacttataggcccaaagaa

SEQ ID NO: 5062 - DNA, 2743 bp, Artificial Sequence
  derived and/or modified sequence
cagccccagcaagaacaggaaactggagattgaatcagatgccgagcgctcagaaactgaaacttaagaaatcgaaactaaacgtaagcttcagaaaccgaaacttaatagaagagctcaagagccgcggccagacgtttgcggagtccagggtctttcggagttgaatttgcagctgggctccttcactttggtctcggcttttatctgcctccctgataggtttttggtcttggtgacttcaagaatgaagctgcggactctcgctgtgagtgctacagttgttaaagatggcgtgtctggagtttgttcctttcgatgttcagatgtgtctggagtttcttccttctggtgagttcgtggtcttgctgacttcaggagtgcagctgcagaccttcacagtgagtgttacagatcttaaaggtggcgcgtccggagttgttcgttcctcccggtgggttcgtggtttcactgacttcaggagtaaagccgtagacctttgtggtcccaaaccagttgtcttcctgcaacatggcttgctggcagattctagtaactgggtcacaaaccttgccaacagcagcctgggcttcattcttgctgatgctggttttgacgtgtggatgggcaacagcagaggaaatacctggtctcggaaacataagacactctcagtttctcaggatgaattctgggctttcagagttcctttcttggattacagttatgatgagatggcaaaatatgacctaccagcttccattaacttcattctgaataaaactggccaagaacaagtgtattatgtgggtcattctcaaggcaccactataggttttatagcattttcacagatccctgagctggctaaaaggattaaaatgttttttgccctgggtcctgtggcttccgtcgccttctgtactagccctatggccaaattaggacgattaccagatcatctcattaaggacttatttggagacaaagaatttcttccccagagtgcgtttttgaagtggctgggtacccacgtttgcactcatgtcatactgaaggagctctgtggaaatctctgttttcttctgtgtggatttaatgagagaaatttaaatatgtctagagtggatgtatatacaacacattctcctgctggaacttctgtgcaaaacatgttacactggagccaggctgttaaattccaaaagtttcaagcctttgactggggaagcagtgccaagaattattttcattacaaccagagttatcctcccacatacaatgtgaaggacatgcttgtgccgactgcagtctggagcgggggtcacgactggcttgcagatgtctacgacgtcaatatcttactgactcagatcaccaacttggtgttccatgagagcattccggaatgggagcatcttgacttcatttggggcctggatgccccttggaggctttataataaaattattaatctaatgaggaaatatcagtgaaagctggacttgagctgtgtaccaccaagtcaatgattatgtcatgtgaaaatgtgtttgcttcatttctgtaaaacacttgtttttctttcccaggtcttttgtttttttatatccaagaaaatgataactttgaagatgcccagttcactctagtttcaattagaaacatactagctattttttctttaattagggctggaataggaagccagtgtctcaaccatagtattgtctctttaagtcttttaaatatcactgatgtgtaaaaaggtcattatatccattctgtttttaaaatttaaaatatattgactttttgcccttcataggacaaagtaatatatgtgttggaattttaaaattgtgttgtcattggtaaatctgtcactgacttaagcgaggtataaaagtacgcagttttcatgtccttgccttaaagagctctctagtctaacggtcttgtagttagagatctaaatgacattttatcatgttttcctgcagcaggtgcatagtcaaatccagaaatatcacagctgtgccagtaataaggatgctaacaattaattttatcaaacctaactgtgacagctgtgatttgacacgttttaattgctcaggttaaatgaaatagttttccggcgtcttcaaaaacaaattgcactgataaaacaaaaacaaaagtatgttttaaatgctttgaagactgatacactcaaccatctatattcatgagctctcaatttcatggcaggccatagttctacttatctgagaagcaaatccctgtggagactataccactattttttctgagattaatgtactcttggagcccgctactgtcgttattgatcacatctgtgtgaagccaaagccccgtggttgcccatgagaagtgtccttgttcattttcacccaaatgaagtgtgaacgtgatgttttcggatgcaaactcagctcagggattcattttgtgtcttagttttatatgcatccttatttttaatacacctgcttcacgtccctatgttgggaagtccatatttgtctgcttttcttgcagcatcatttccttacaatactgtccggtggacaaaatgacaattgatatgtttttctgatataattactttagctgcactaacagtacaatgcttgttaatggttaatataggcagggcgaatactactttgtaacttttaaagtcttaaacttttcaataaaattgagtgagacttat

SEQ ID NO: 5063 - DNA, 1055 bp, Artificial Sequence
  derived and/or modified sequence
taaaatttaaaaattccttattctcctttcagatatggctggagtcatttgtttcatattttcctttcaccttttacttgccctaaatctggttcagaactttttgtgggagcattaagttaccagaatatttttgtgtagtaaaattcaagcaaataataatagactgttttattatacagaatgaaaatgcggttcttggggttggtggtctgtttggttctctggaccctgcattctgaggggtctggagggaaactgacagctgtggatcctgaaacaaacatgaatgtgagtgaaattatctcttactggggattccctagtgaggaatacctagttgagacagaagatggatatattctgtgccttaaccgaattcctcatgggaggaagaaccattctgacaaaggtcccaaaccagttgtcttcctgcaacatggcttgctggcagattctagtaactgggtcacaaaccttgccaacagcagcctgggcttcattcttgctgatgctggttttgacgtgtggatgggcaacagcagaggaaatacctggtctcggaaacataagacactctcagtttctcaggatgaattctgggctttcagttatgatgagatggcaaaatatgacctaccagcttccattaacttcattctgaataaaactggccaagaacaagtgtattatgtgggtcattctcaaggcaccactataggttttatagcattttcacagatccctgagctggctaaaaggattaaaatgttttttgccctgggtcctgtggcttccgtcgccttctgtactagccctatggccaaattaggacgattaccagatcatctcattaaggacttatttggagacaaagaatttcttccccagagtgcgtttttgaagtggctgggtacccacgtttgcactcatgtcatactgaaggagctctgtggaaatctctgttttcttctgtgtggatttaatgagagaaatttaaatatgtctagagtggatgtatatacaacacattctcctgctggaacttctgtgca

SEQ ID NO: 5064 - DNA, 2651 bp, Artificial Sequence
  derived and/or modified sequence
ttcccggtggctggctgctctgattggctgaacaaatagtccgagggtggtgggcatccgccctcccgacaaggcagaccaggccccctgcaggtcccctatccgcaccccggcccctgagagctggcactgcgactcgagacagcggcccggcaggacagctccaggtgagagtgccggcgccgcggcgctgccagaatgaaaatgcggttcttggggttggtggtctgtttggttctctggaccctgcattctgaggggtctggagggaaactgacagctgtggatcctgaaacaaacatgaatgtgagtgaaattatctcttactggggattccctagtgaggaatacctagttgagacagaagatggatatattctgtgccttaaccgaattcctcatgggaggaagaaccattctgacaaaggtcccaaaccagttgtcttcctgcaacatggcttgctggcagattctagtaactgggtcacaaaccttgccaacagcagcctgggcttcattcttgctgatgctggttttgacgtgtggatgggcaacagcagaggaaatacctggtctcggaaacataagacactctcagtttctcaggatgaattctgggctttcagttatgatgagatggcaaaatatgacctaccagcttccattaacttcattctgaataaaactggccaagaacaagtgtattatgtgggtcattctcaaggcaccactataggttttatagcattttcacagatccctgagctggctaaaaggattaaaatgttttttgccctgggtcctgtggcttccgtcgccttctgtactagccctatggccaaattaggacgattaccagatcatctcattaaggacttatttggagacaaagaatttcttccccagagtgcgtttttgaagtggctgggtacccacgtttgcactcatgtcatactgaaggagctctgtggaaatctctgttttcttctgtgtggatttaatgagagaaatttaaatatgtctagagtggatgtatatacaacacattctcctgctggaacttctgtgcaaaacatgttacactggagccaggctgttaaattccaaaagtttcaagcctttgactggggaagcagtgccaagaattattttcattacaaccagagttatcctcccacatacaatgtgaaggacatgcttgtgccgactgcagtctggagcgggggtcacgactggcttgcagatgtctacgacgtcaatatcttactgactcagatcaccaacttggtgttccatgagagcattccggaatgggagcatcttgacttcatttggggcctggatgccccttggaggctttataataaaattattaatctaatgaggaaatatcagtgaaagctggacttgagctgtgtaccaccaagtcaatgattatgtcatgtgaaaatgtgtttgcttcatttctgtaaaacacttgtttttctttcccaggtcttttgtttttttatatccaagaaaatgataactttgaagatgcccagttcactctagtttcaattagaaacatactagctattttttctttaattagggctggaataggaagccagtgtctcaaccatagtattgtctctttaagtcttttaaatatcactgatgtgtaaaaaggtcattatatccattctgtttttaaaatttaaaatatattgactttttgcccttcataggacaaagtaatatatgtgttggaattttaaaattgtgttgtcattggtaaatctgtcactgacttaagcgaggtataaaagtacgcagttttcatgtccttgccttaaagagctctctagtctaacggtcttgtagttagagatctaaatgacattttatcatgttttcctgcagcaggtgcatagtcaaatccagaaatatcacagctgtgccagtaataaggatgctaacaattaattttatcaaacctaactgtgacagctgtgatttgacacgttttaattgctcaggttaaatgaaatagttttccggcgtcttcaaaaacaaattgcactgataaaacaaaaacaaaagtatgttttaaatgctttgaagactgatacactcaaccatctatattcatgagctctcaatttcatggcaggccatagttctacttatctgagaagcaaatccctgtggagactataccactattttttctgagattaatgtactcttggagcccgctactgtcgttattgatcacatctgtgtgaagccaaagccccgtggttgcccatgagaagtgtccttgttcattttcacccaaatgaagtgtgaacgtgatgttttcggatgcaaactcagctcagggattcattttgtgtcttagttttatatgcatccttatttttaatacacctgcttcacgtccctatgttgggaagtccatatttgtctgcttttcttgcagcatcatttccttacaatactgtccggtggacaaaatgacaattgatatgtttttctgatataattactttagctgcactaacagtacaatgcttgttaatggttaatataggcagggcgaatactactttgtaacttttaaagtcttaaacttttcaataaaattgagtgagacttataggccc

SEQ ID NO: 5065 - DNA, 2834 bp, Artificial Sequence
  derived and/or modified sequence
tggagggcagaaggctttgacatatcaatgcaccagggatcttaccaaactaaattttaagcacttatagctcaagattctccctctgagatgaaacatacttccaccctgtcatgtgtcagcttcagaagatatcaattgctcaagaaagtgttggacaagcagaaaagcacactgaacatttctggacttgtgaaagagctctgaatatggatctctcagggatattccatccccaccaatgctttaccaatgcgagagctggccaggctgagacatttaatgataacatggaacaatttattcaggaagatagtcaactactcatgtggctttatgattataaaacccactgaaaattgggtcccttgattctcttgatttttcctaagccttactccctaaagtctccaatttgatgaggtatttgatacttgatctctccttgaagtaaaatttggagcaaaatatattggactggaaggcctgagacctcgataagaagaaacatgaaccccagagccacagaatgaaaatgcggttcttggggttggtggtctgtttggttctctggaccctgcattctgaggggtctggagggaaactgacagctgtggatcctgaaacaaacatgaatgtgagtgaaattatctcttactggggattccctagtgaggaatacctagttgagacagaagatggatatattctgtgccttaaccgaattcctcatgggaggaagaaccattctgacaaaggtcccaaaccagttgtcttcctgcaacatggcttgctggcagattctagtaactgggtcacaaaccttgccaacagcagcctgggcttcattcttgctgatgctggttttgacgtgtggatgggcaacagcagaggaaatacctggtctcggaaacataagacactctcagtttctcaggatgaattctgggctttcagttatgatgagatggcaaaatatgacctaccagcttccattaacttcattctgaataaaactggccaagaacaagtgtattatgtgggtcattctcaaggcaccactataggttttatagcattttcacagatccctgagctggctaaaaggattaaaatgttttttgccctgggtcctgtggcttccgtcgccttctgtactagccctatggccaaattaggacgattaccagatcatctcattaaggacttatttggagacaaagaatttcttccccagagtgcgtttttgaagtggctgggtacccacgtttgcactcatgtcatactgaaggagctctgtggaaatctctgttttcttctgtgtggatttaatgagagaaatttaaatatgtctagagtggatgtatatacaacacattctcctgctggaacttctgtgcaaaacatgttacactggagccaggctgttaaattccaaaagtttcaagcctttgactggggaagcagtgccaagaattattttcattacaaccagagttatcctcccacatacaatgtgaaggacatgcttgtgccgactgcagtctggagcgggggtcacgactggcttgcagatgtctacgacgtcaatatcttactgactcagatcaccaacttggtgttccatgagagcattccggaatgggagcatcttgacttcatttggggcctggatgccccttggaggctttataataaaattattaatctaatgaggaaatatcagtgaaagctggacttgagctgtgtaccaccaagtcaatgattatgtcatgtgaaaatgtgtttgcttcatttctgtaaaacacttgtttttctttcccaggtcttttgtttttttatatccaagaaaatgataactttgaagatgcccagttcactctagtttcaattagaaacatactagctattttttctttaattagggctggaattttaaaattgtgttgtcattggtaaatctgtcactgacttaagcgaggtataaaagtacgcagttttcatgtccttgccttaaagagctctctagtctaacggtcttgtagttagagatctaaatgacattttatcatgttttcctgcagcaggtgcatagtcaaatccagaaatatcacagctgtgccagtaataaggatgctaacaattaattttatcaaacctaactgtgacagctgtgatttgacacgttttaattgctcaggttaaatgaaatagttttccggcgtcttcaaaaacaaattgcactgataaaacaaaaacaaaagtatgttttaaatgctttgaagactgatacactcaaccatctatattcatgagctctcaatttcatggcaggccatagttctacttatctgagaagcaaatccctgtggagactataccactattttttctgagattaatgtactcttggagcccgctactgtcgttattgatcacatctgtgtgaagccaaagccccgtggttgcccatgagaagtgtccttgttcattttcacccaaatgaagtgtgaacgtgatgttttcggatgcaaactcagctcagggattcattttgtgtcttagttttatatgcatccttatttttaatacacctgcttcacgtccctatgttgggaagtccatatttgtctgcttttcttgcagcatcatttccttacaatactgtccggtggacaaaatgacaattgatatgtttttctgatataattactttagctgcactaacagtacaatgcttgttaatggttaatataggcagggcgaatactactttgtaacttttaaagtcttaaacttttcaataaaattgagtgagacttataggcccaaag

SEQ ID NO: 5066 - DNA, 936 bp, Artificial Sequence
  derived and/or modified sequence
actgcgactcgagacagcggcccggcaggacagctccaggtgagagtgccggcgccgcggcgctgccagaatgaaaatgcggttcttggggttggtggtctgtttggttctctggaccctgcattctgaggggtctggagggaaactgacagctgtggatcctgaaacaaacatgaatgtgagtgaaattatctcttactggggattccctagtgaggaatacctagttgagacagaagatggatatattctgtgccttaaccgaattcctcatgggaggaagaaccattctgacaaaggtcccaaaccagttgtcttcctgcaacatggcttgctggcagattctagtaactgggtcacaaaccttgccaacagcagcctgggcttcattcttgctgatgctggttttgacgtgtggatgggcaacagcagaggaaatacctggtctcggaaacatgttacactggagccaggctgttaaattccaaaagtttcaagcctttgactggggaagcagtgccaagaattattttcattacaaccagagttatcctcccacatacaatgtgaaggacatgcttgtgccgactgcagtctggagcgggggtcacgactggcttgcagatgtctacgacgtcaatatcttactgactcagatcaccaacttggtgttccatgagagcattccggaatgggagcatcttgacttcatttggggcctggatgccccttggaggctttataataaaattattaatctaatgaggaaatatcagtgaaagctggacttgagctgtgtaccaccaagtcaatgattatgtcatgtgaaaatgtgtttgcttcatttctgtaaaacacttgtttttctttcccaggtcttttgtttttttatatccaagaaaatgataactttgaagatgcccagttcactctagt

SEQ ID NO: 5067 - DNA, 660 bp, Artificial Sequence
  derived and/or modified sequence
atgaaaatgagatttctcgggctggttgtgtgtttggtgctatggaccctccatagcgagggttccggaggaaagctgaccgcagttgatccagagacgaacatgaatgtcagtgagatcatctcttactggggattcccctccgaagaatatttagtcgagaccgaagatggatatattctgtgcctcaatagaatcccacacggcagaaaaaatcacagcgataaaggccccaaacccgtcgtgttcctccaacatggtctgcttgctgatagttccaattgggtaacgaacctggccaattcttctctgggctttattctggcagacgcaggcttcgacgtgtggatgggaaacagcagaggaaacacctggagccgtaagcataagactcttagcgtctcccaggacgaattttgggcctttagttatgatgaaatggcaaaatacgatttacctgcatcaattaactttatactgaataaaaccggacaggaacaggtatattatgtgggacactcacaaggcaccaccattggctttattgcctttagtcagatccccgaactggccaagcgcataaagatgtttttcgcacttggcccagttgcgtccgttgcattttgtacctcccctatggcaaagttgggacgtctttag

SEQ ID NO: 5068 - DNA, 1200 bp, Artificial Sequence
  derived and/or modified sequence
atgaagatgaggttcttgggattggtcgtttgcctcgtactctggacactgcattctgaaggctcaggaggaaagctcacagccgtggaccccgaaacaaacatgaatgtaagtgaaatcatttcctactggggattcccctccgaagagtaccttgtcgaaacagaggatggctatattttatgcctaaatcgcattccccatggtcgtaagaatcactccgataaaggaccaaaacctgtagtgttccttcagcatggactcttggctgatagttcgaactgggtgacaaacctggctaattctagtctcggattcatactggccgatgctggattcgatgtgtggatggggaatagccggggtaatacttggtcacgcaaacacaagaccctgtctgtttcacaggatgaattctgggccttttcttatgacgaaatggcgaaatatgatttacccgcctccatcaatttcatactcaataaaaccggtcaagaacaggtctactacgtaggacattcacaaggcaccactataggctttatcgctttttcacagattccagagctcgccaagcgaattaaaatgttttttgccttaggccccgtggcatccgtggcattttgcacttcccccatggcaaagctagggcgactgcctgatcatctgattaaagacctgtttggcgacaaggagttcctgccccagtccgcgtttttgaaatggttgggtacccacgtgtgtacccatgttatcctaaaagagctttgtggcaacctgtgcttcttgttatgtggcttcaacgaaagaaatcttaatatgagcagggtggatgtttacaccacacattctccagccggaacctccgtacaaaatatgctacattggtctcaggccgtcaagtttcaaaaattccaagctttcgattgggggtctagtgcaaagaactacttccattacaaccagagttatcctcccacttataacgtcaaggatatgcttgtgccaaccgcagtatggtccggaggacacgattggctcgcggacgtctacgatgtgaatatactcctgacacagatcactaaccttgtgttccatgaatctatccctgaatgggagcacctcgactttatctggggactggacgcgccgtggcgcctgtataacaaaatcataaatctcatgcgcaaataccagtag

SEQ ID NO: 5069 - DNA, 1074 bp, Artificial Sequence
  derived and/or modified sequence
atgaaactgcggacattagctgttagcgccaccgttgttaaggacggagtcagcggagtttgctcctttcggtgcagcgacgtatctggcgtgttaccctcaggacctaaaccggtggttttccttcagcacggattgttagcggactcgtcaaattgggttacaaacctcgccaactcctctctggggttcattctcgccgacgctgggtttgacgtctggatgggtaattctaggggcaacacatggtcacgcaaacacaagaccctctcagtttctcaggatgagttttgggccttttcttacgacgagatggccaagtatgatctccccgcatccatcaacttcatcttaaacaagacgggccaagaacaagtgtactacgtggggcactctcaggggaccactattgggttcattgccttttctcaaatccccgagctcgctaagagaattaagatgttctttgccttagggccagttgcaagcgttgccttctgcaccagtccaatggccaaactaggaagactgcctgaccacctgattaaagatctgttcggcgacaaggagttcctgccacaatccgcattcctcaaatggttaggtacacacgtatgcacgcatgtaattcttaaagaactttgtggtaacttatgtttccttctgtgtgggttcaatgaaagaaatttaaacatgtctcgcgtcgatgtttacaccacacatagtcctgcaggtacttcagtgcaaaatatgttacactggtcccaagctgtgaaatttcagaagtttcaggcatttgactggggatcaagtgcaaagaattattttcactacaatcaatcctatcctccaacctacaacgtgaaggacatgctggtgcctaccgccgtatggtctggcggccacgactggctcgcggacgtgtatgacgttaacattcttttgactcagattaccaacctcgttttccacgaaagtatacctgaatgggagcatttggacttcatttggggactcgacgcaccctggaggttgtataacaaaatcataaatcttatgagaaagtatcagtag

SEQ ID NO: 5070 - DNA, 1200 bp, Artificial Sequence
  derived and/or modified sequence
atgaagatgagatttttaggcctcgtcgtttgtctggttttgtggacgctacactcagaaggctctgggggcaaattaacagccgtggacccggaaaccaacatgaacgtatccgaaatcattagctattggggatttccaagcgaagaatatcttgttgaaaccgaggatggctacatcctctgcctgaatcgcatccctcatggcaggaaaaatcacagtgacaaaggccccaaaccagtggtcttcctgcagcacgggctacttgccgattcatctaactgggtcactaatttggcaaattcatctcttgggttcattcttgcagacgctggtttcgacgtatggatgggtaattcaaggggaaacacctggtcgaggaaacataaaacattgagcgtatctcaggacgagttctgggcattcagctatgatgaaatggcgaaatacgacctaccagcatccattaactttatcctaaataagacagggcaggaacaggtttactacgtcggacatagtcagggaactactattggtttcatcgcgttttcacaaatcccagaactcgcaaaaaggattaagatgtttttcgccctcggtccagtggcatctgtcgccttctgtacctcccctatggcaaaacttggccgcttaccagatcacctgatcaaggatttatttggcgataaagaatttcttccccagtccgcattcctcaaatggctgggaacccacgtgtgtactcacgtgatcctgaaggaactgtgcggaaatctctgcttccttctttgcgggtttaacgagaggaatctgaatatgagcagagttgatgtttacactacccatagtcccgccggcacatcagtacaaaacatgctgcattggtcccaggccgttaagttccaaaaatttcaggcctttgattgggggtcatcagcaaagaactactttcattataaccaaagttaccctccaacctacaatgtcaaggatatgctggtgcctaccgcagtttggtccggcgggcacgactggcttgcagacgtgtacgacgtaaatattctgctgacacaaattaccaacttggttttccatgagtctattcctgagtgggaacatctggattttatctggggcttagatgccccttggcggctgtataataaaatcatcaatcttatgagaaaatatcaatag

SEQ ID NO: 5071 - DNA, 1032 bp, Artificial Sequence
  derived and/or modified sequence
atggcctgcttggagtttgtgccttttgatgtacagatgtgcctggagtttctcccatcaggccccaaaccagtcgtcttcctccagcacggacttttagcagacagcagcaactgggtgacaaatctggcaaacagttcactgggatttattcttgccgatgccggattcgatgtttggatgggaaactctagaggaaatacctggtcaagaaaacataagaccttgtccgtgagccaagacgagttctgggctttctcttatgatgaaatggctaagtacgacctgccagctagcattaacttcatcctgaataagacaggacaggaacaggtctattatgtgggacactcacaggggactaccatcgggtttatcgcgttctcccagataccagagctcgccaaacggatcaaaatgttctttgctctaggtcccgtggcttccgtcgccttttgcacctcccctatggccaaactcggtagactgcctgatcatctgattaaagacctatttggagacaaggagttccttccacagtcagcctttcttaagtggctgggaacacatgtgtgtacacacgtaattttaaaagagctctgcggcaacctctgtttcctgctatgcggtttcaacgaacgcaacttgaatatgtcccgcgtcgacgtgtacacgacccactcacctgccggaacctccgttcaaaatatgctgcactggtctcaagcagtcaagtttcagaagtttcaagccttcgactggggtagctccgcaaaaaattactttcactacaatcagtcttatccacccacgtacaacgtcaaggatatgctagtccctacggcggtctggagtggcgggcatgactggttggccgatgtatacgacgttaacatcctgctgacccagatcacgaacctggtattccacgagtccatacctgagtgggaacaccttgacttcatttggggattagatgccccatggagactatataacaagattatcaatcttatgcgcaaatatcagtag

SEQ ID NO: 5072 - DNA, 1206 bp, Artificial Sequence
  derived and/or modified sequence
atggcgtgcttggagttcgttcctttcgatgttcagatgtgtttggaattcctgccatcaggagaatttgtggtcttattgacaagcggcgtgcaacttcaaacttttaccgtctcagtaactgatttaaaagggggcgcttcgggcgtggtccggtcaagccgctgggtgcgcggtttcaccgatttcagatcaaaagctgtggacttatgtggacccaaaccggtcgtttttctgcagcatgggctcctggcagacagcagtaattgggtaaccaatctagccaactcatcactgggcttcattttggccgacgccgggtttgatgtttggatgggtaactccagaggaaacacatggtcaaggaaacataaaaccctttcagtgagtcaggacgaattctgggccttcagagtaccctttctcgactattcctatgatgagatggcaaaatacgatttaccagcaagtataaattttattctgaataagaccggccaggagcaggtgtattatgtggggcacagccagggaacaaccatcggatttatagccttttctcagattccggaactagccaagagaatcaaaatgttcttcgcgctaggccctgtggcctcagttgccttttgcacatcaccaatggccaaacttggaagattacccgaccatttgatcaaggacttatttggcgacaaagaattcttgccccaatctgcttttttgaaatggctcgggactcacgtttgtacccacgttattctgaaggaactctgcggtaacctatgcttccttctgtgtggttttaacgaaagaaatttgaacatgtcccgcgtcgacgtgtataccactcactccccagccggaacttcggtacaaaatatgctgcactggagtcaggctgtgaaattccagaaattccaagccttcgactggggatcatcagctaaaaactactttcactataaccaatcctacccccccacctacaacgtcaaagatatgctcgttcctacagctgtttggtcaggcggacatgactggttagctgacgtgtatgatgtaaacatcctgctaacgcaaatcacaaatttagttttccacgagtcaatccccgagtgggagcaccttgacttcatttggggcctggatgccccatggcgcctgtacaacaagatcatcaacctgatgcgtaaataccagtag

SEQ ID NO: 5073 - DNA, 873 bp, Artificial Sequence
  derived and/or modified sequence
atgaaaatgagatttttgggcctggtagtgtgtctggttttgtggaccttgcacagcgaaggatccggaggtaaacttactgccgtagacccagaaacaaacatgaacgtatcggaaatcatctcttattggggttttccttctgaggaatacctcgttgaaacagaagacgggtatatcttgtgcttgaatcgtattccccatggccgtaaaaaccacagtgataaaggtcctaagcccgttgtgttcttgcagcatggcctgttggctgacagttcaaactgggtgacgaacttggcgaactctagtctgggcttcatcctggccgacgcaggatttgatgtttggatgggtaacagtagaggtaacacctggtcgcggaaacacaaaacactctcagtaagccaggacgaattctgggcgttcagttatgacgagatggccaagtacgatctccccgcctcaataaacttcatactgaataagaccggtcaggaacaagtctattacgtaggtcactctcaaggaacaacgattgggttcatcgcttttagtcagattccggaactggccaaacggatcaaaatgttcttcgcattgggtcccgttgcatctgttgccttctgtacgtcacccatggccaaactgggacgattgcccgaccatcttatcaaggaccttttcggcgacaaagagtttcttccacaatctgcattccttaaatggctgggaactcacgtttgtacacacgttatccttaaggaactatgcggcaacttgtgctttttgctgtgcgggttcaatgagcggaatcttaacatgtcaagagtcgatgtctatactacccactcacctgccggcacttccgtgtag

SEQ ID NO: 5074 - DNA, 1200 bp, Artificial Sequence
  derived and/or modified sequence
atgaaaatgcgttttcttggcttggtggtctgcctggtactgtggacgctccactcagaaggttcaggtggaaaactgactgccgtagaccccgagacgaatatgaacgtgtccgaaattatctcttattggggttttccaagtgaagaatatcttgtagaaaccgaagacgggtacattctgtgtttgaaccgcataccccacggacggaagaatcactctgacaagggcccaaaaccggtagtgttcttgcagcatggtctgttggctgatagcagtaactgggttactaatctcgcgaatagcagtctcggcttcatcctggcggatgctggatttgatgtttggatgggtaactcccgcggaaacacttggtcccgtaaacacaaaactttgagcgtgtcacaggacgaattttgggccttcagttatgacgagatggctaagtacgatctccccgccagcattaacttcattctaaacaaaacaggacaagaacaagtatattacgttggccacagccaaggcacaacgatcgggtttatcgctttctctcaaatcccagaactcgcaaaacggattaagatgttctttgcactcggccccgtggcgtcagtggcattttgtactagtccgatggccaagctcgggcggctccctgatcatctgattaaagatctctttggggacaaggagtttcttccccagtccgcatttttaaaatggctcggaactcacgtgtgcactcatgtcatcttgaaggaactctgtggcaacctgtgttttctgttgtgtggctttaacgaacgaaatctgaatatgtcccgagtcgatgtatacacaactcattcaccagccggtacatccgtgcagaatatgctgcactggtctcaagcagtgaagttccagaaatttcaagcttttgactggggctcttcagcaaagaattattttcactataatcaaagctatcctccaacatacaatgtaaaagacatgcttgtgccaacagccgtgtggagtggcggtcacgattggctggccgacgtatacgacgtaaacatcctgcttacacaaattacaaaccttgttttccatgagtctatccccgagtgggagcacctggattttatctggggactcgatgccccatggcggctttataacaaaataataaatttaatgcgcaaataccagtag

SEQ ID NO: 5075 - DNA, 1200 bp, Artificial Sequence
  derived and/or modified sequence
atgaagatgcgcttcctggggctcgtagtttgtttagttctgtggacacttcacagtgaagggagcggtgggaagttgaccgcagttgaccccgaaactaatatgaatgtttccgaaatcattagctattggggcttcccatctgaggagtacctggtcgagaccgaggatggttacatactttgcctgaatcgaattccacatggccgcaaaaatcactccgacaaggggcccaaaccagttgtcttcctgcagcacggactcctcgctgatagtagcaactgggttacaaacctcgctaactcgtctctgggcttcattctggctgatgccggattcgatgtgtggatggggaacagcagaggtaatacatggtcacgcaagcacaagacactctcagtgtctcaggatgaattctgggctttctcatatgatgagatggcaaaatacgatctgccagcttctataaattttattttaaataagaccgggcaggaacaagtctactacgtgggtcattcacagggaacaactataggattcatcgctttctcacaaattccagaattggctaaaaggatcaagatgtttttcgcccttggcccggtcgcctctgttgccttttgtacctctccaatggctaagctgggtcgtctgcccgatcacctgatcaaagacctattcggggataaggagtttctccctcaatctgcgttccttaaatggctcggcactcacgtttgcacccacgtcattctgaaggaactgtgcggcaacttatgttttctattgtgcggatttaacgagcgcaacttgaatatgagcagagtcgacgtatacacaacacactcacctgcaggaaccagcgtgcagaatatgctccactggtcccaagctgtgaagttccaaaaatttcaggccttcgattggggatcaagcgccaaaaactactttcattataatcaatcctacccacccacctacaacgttaaagatatgctggtacccaccgccgtttggtcaggtggacatgattggctggctgacgtttatgacgtaaatatcctgctcactcaaattacgaatttggtctttcacgagtccattcccgaatgggagcacctcgattttatctggggcctagacgccccttggagactgtacaacaagattattaatctgatgcggaaataccaatag

SEQ ID NO: 5076 - DNA, 411 bp, Artificial Sequence
  derived and/or modified sequence
atgaaaatgagatttttaggacttgtcgtctgccttgtactttggactctgcacagtgagggatcaggcggaaagctgactgcggtggaccccgagaccaacatgaacgtcagcgagatcatttcctattggggattcccttctgaagaatacctggtagaaactgaagatggctacatactttgcctgaatcggatcccccatggccgaaagaaccactccgacaaaggtcccaagcccgttgtatttcttcagcacggactactcgctgattcaagcaactgggtcacaaacctggcaaactccagcctgggtttcatattagctgatgccggattcgacgtgtggatggggaacagtaggggaaatacatggagtagaaagcacgttacccttgaacctgggtgttag

SEQ ID NO: 5077 - RNA, 1343 nt, Artificial Sequence
  derived and/or modified sequence
gggaaauaagagagaaaagaagaguaagaagaaauauaagagccaccaugaagaugcgcuuucucgggcucguaguaugccugguccucuggacgcugcacucggagggauccaggggaaagcugacggccguagaccccgaaacgaauaugaaugucucggagauuaucuccuauuggggcuuuccgucagaggaguaucugguagagacagaggaugguuacaucuugugucucaaccggaucccccacggacggaaaaaccacucggauaaaggaccgaagccggucguguuucuucagcacggacuucuggccgacuccucgaauugggugacgaauuuggcgaacuccucguugggguuuauccucgcggacgccggauuugauguguggaugggcaacucgcgagguaacacguggucaaggaaacauaaaacccugucagucucgcaagacgaguucugggcauucucguacgaugaaauggcgaaguaugaccugcccgcgucaauuaacuucauccucaauaagaccggacaagaacagguauacuaugugggccauagccagggaacaacgaucggguuuaucgcuuucagccagaucccggagcucgcuaagcgcaucaagauguucuucgcgcucgggccuguggcgucaguggcguucugcacgucgcccauggcaaaauuggguagauugcccgaccaucuuaucaaagaucuguuuggggauaaggaauuucugccgcagucggccuuccucaaaugguuggggacacacgucuguacucacgugauuuugaaagaacuuugcgggaacuugugcuucuugcuuuguggauucaaugagcggaauuugaauaugucaagagucgaugucuacaccacccauucaccagcaggaacaucaguccagaauaugcugcauuggucccaagcggucaaauuccagaaguuccaagcauuugacuggggcucgagcgccaaaaacuauuuccacuauaaccagucguacccgccuacuuacaauguaaaggacaugcuuguccccacugcgguguggagcggugggcacgauuggcuugcggacguguaugaugugaacauucuucucacacagaucacaaaccugguguuucaugaguccauucccgaaugggaacaccucgacuucaucugggguuuggacgccccuuggaggcucuacaacaagauuaucaacuugaugcgaaaguaccagugauaagcugccuucugcggggcuugccuucuggccaugcccuucuucucucccuugcaccuguaccucuuggucuuugaauaaagccugaguaggaag

SEQ ID NO: 5078 - RNA, 660 nt, Artificial Sequence
  derived and/or modified sequence
augaagaugagguuccucggccugguugucugucuugugcucuggacacugcauagcgaaggaagcggaggcaagcugaccgcuguggauccugagacuaauaugaauguauccgaaauuaucaguuauuggggguuuccuagcgaagaauacuugguugaaacagaagacgguuacauacucugucugaaucgcauaccacacggccguaagaaccauucagauaagggccccaaaccaguuguguuucugcagcacgguuugcuggcggauucgucuaacugggugaccaaucucgcgaacucaagccucggauucauucucgccgacgccggcuuugacgucuggaugggaaacagucgugguaacacuuggucucgcaaacacaagacacugucagugagccaggacgaguucugggcuuucucuuacgacgaaauggcaaaguacgaccuuccugcaucaauaaauuucauuuuaaacaagacagggcaagaacagguguacuacguaggucacucacaggguaccaccaucggcuuuaucgcguuuucccagauacccgagcuggccaaaagaaucaaaauguuuuucgcgcugggcccaguggccaguguggccuucugcacauccccuauggcaaagcucggucgguuguag

SEQ ID NO: 5079 - RNA, 1200 nt, Artificial Sequence
  derived and/or modified sequence
augaagaugcgguuccugggacucguagugugccuuguccuguggacccugcacucugaaggcuccggcgguaagcugacagccgucgacccugagacaaacaugaacgugucagaaauuaucucauacugggguuuccccuccgaagaguaccuugucgaaacagaagacggauauauacugugccugaauagaauaccccacggccggaaaaaucacagcgauaaaggcccgaaaccaguaguauuucugcagcacggcuugcuggcagauucuaguaacugggugaccaaucuggcuaacucuucccugggcuucauucucgcugaugccggguucgacguguggauggggaauaguagggguaacacauggucgcgcaagcacaaaaccuugagcguaagccaagaugaguucugggccuuuagcuacgacgaaauggccaaauaugaucugcccgcuuccaucaauuuuauacucaauaagacuggacaggagcaggucuacuacguuggucacucucagggcacaaccauaggauuuauugccuuuagucagauucccgaacucgcuaagaggaucaaaauguuuuucgcccugggcccggucgccagugucgcauuuuguacaucuccaauggcaaaguugggcagauugccagaccaccucaucaaagaccuguuuggagauaaggaguuucucccgcaguccgcguuucucaaauggcuggggacgcacguguguacucaugucauccuaaaggaauuaugugggaauuuguguuuucuacuguguggauucaaugaacggaacuugaauaugucccguguugacguguauaccacucauucaccggcugggacauccguucaaaauauguugcauuggucgcaggcugugaaguuucagaaauuucaagcauuugacuggggcucgagcgcaaagaacuauuuccauuauaaucagaguuacccacccacuuauaaugucaaagacaugcuaguucccacagccguguggaguggggggcacgacuggcuggcggauguguaugacguuaacauccuacucacccaaauuacaaaucucguauuucaugaaagcauaccugaaugggaacaccuagacuuuaucuggggccuugacgccccuuggaggcuuuacaacaagaucauuaaucuaaugaggaaauaccaguag

SEQ ID NO: 5080 - RNA, 1074 nt, Artificial Sequence
  derived and/or modified sequence
augaaauugcgcacccuugccguuucugccacugucgucaaagacggagugagcgguguguguucuuuucggugcucugacguaucugguguucugccaagcgguccaaagcccguggucuucuuacagcauggauugcuggcagacagcaguaauugggucaccaauuuggcaaauucuucucucggcuucauacuagccgacgcaggcuucgacguauggaugggcaacucgcguggaaauacguggucccgcaaacauaaaacgcucucggucucgcaggacgaguuuugggccuuuucauaugacgaaauggccaaguacgacuugcccgccaguauuaauuucauuuuaaauaagacaggccaggaacaaguauacuauguuggccacucccaggguacaacgauuggauucaucgcguucucucagauuccugaguuggccaagcgcaucaaaauguuuuucgcacucgggcccguagccagcguugcguucugcacaucucccauggcaaagcugggucgacuccccgaucaccugauuaaagaccucuucggagauaaagaguuccucccucaaucagcguuccuaaaauggcugggcacucaugugugcacccauguaaucuugaaggaacucuguggcaaucucugcuuucuguugugcggcuucaacgagaggaaucuuaauaugucuagaguugacguuuacacaacccauagccccgccggcaccucugugcaaaacaugcuccauuggucccaggccgugaaauuccagaaguuccaagcguuugacugggguagcagcgcuaagaacuauuuucauuauaaccaaucuuacccaccaacguacaauguuaaggauaugcuggugccuacagccguuuggucuggcggccaugacugguuagcugacguuuaugacgugaacauucuucugacucagaucaccaaccuuguuuuucacgaguccaucccugaaugggaacauuuagacuucaucuggggucuagacgccccuuggaggcucuacaauaagaucauuaaucucaugagaaaauaccaguag

SEQ ID NO: 5081 - RNA, 1200 nt, Artificial Sequence
  derived and/or modified sequence
augaaaaugcgauuccugggccuggucguuugccugguacuguggacacuucauucugaaggaagcggcggcaaguuaacugcaguggacccagaaaccaacaugaacgucucagaaauuaucaguuauuggggguucccgagcgaagaguaccugguggagacugaagacgguuauauucucugccugaaccggaucccgcacggccguaaaaaccauucagauaaaggcccuaagccaguggucuuccugcagcacggcuuacuggcggacagcagcaacugggugacaaaucuggccaauucaucucuagguuuuauccuggccgaugccggauucgacguguggauggguaauucccgcggaaacacuuggucacguaaacacaaaacucugucugucagccaggacgaauuuugggccuuuagcuaugaugagauggcaaaguacgauuugcccgcuucuaucaacuucauucuuaauaaaacaggacaggaacagguguacuacgucggacauucacaaggcaccacgaucggcuucauugcauuuagccaaaucccugagcuagcaaaaaggaucaaaauguuuuuugcacuggggccaguagcuucgguugcauuuuguacuuccccuauggcgaaguuagguaggcugcccgaccaccugauuaaagaccucuuuggcgauaaggaauuccuuccucagucagcuuuuuuaaaauggcugggcacccacguaugcacucaugugauccucaaggaacugugcgguaaccuuuguuuccugcuauguggguuuaaugaacgcaaccuuaacaugucgcgaguggaugucuacacuacucacagcccugccggcacaaguguucagaacauguugcauuggagccaggccgugaaguuucagaaguuucaggcuuuugacugggggagcuccgcaaagaacuacuuccacuauaaucagucauacccccccacuuacaacgucaaggauaugcuggugccgaccgccgucuggucuggaggccacgauuggcuggcugacgucuacgauguaaauauucuccucacacagauuacaaaucuuguuuuccacgagucuauucccgagugggaacaucuggacuuuaucuggggcuuagaugcuccauggcgacuguauaacaaaaucauuaauuuaaugcgcaaauaucaguag

SEQ ID NO: 5082 - RNA, 1032 nt, Artificial Sequence
  derived and/or modified sequence
auggcuuguuuggaguuugugcccuuugacguccagaugugccucgaguuucugcccagugggccaaagccuguuguguuccuccagcauggccuucucgcagauuccuccaacuggguuacaaaucucgccaauucaucucuuggguucauacucgcagacgcuggauucgauguguggaugggcaacaguagaggcaacacauggucaaggaagcacaagacacuuucagucucccaggacgaauucugggcauuuucuuacgaugagauggccaaguaugaccuccccgccuccaucaauuucauucucaauaaaacaggucaggagcagguuuauuaugugggacacagccagggaacgacuauaggauucaucgcuuuuagccaaauuccugagcuggccaaaagaauuaaaauguuuuucgcccugggaccaguggcaagcgucgccuuuuguacuuccccaauggcgaaacucggaaggcuuccugaccauuugauuaaggaccuguucggagacaaggaguuccugccccagagcgcauuuuugaaaugguugggcacccacgucuguacgcacgugauuuuaaaagaguugugugggaaucugugcuuuuugcucuguggcuuuaacgagcggaaccucaacaugucccggguggaugucuacacuacacauucccccgccggaaccucaguacaaaauauguugcacuggagucaagccgucaaauuucagaaguuccaagccuuugauuggggguccagcgccaagaauuacuuccauuauaaccaauccuaucccccuacauacaauguuaaggauauguuaguuccaaccgcugucuggucaggcggccacgauuggcuggcagacguguaugacgugaacauucuccucacccagauuacgaaccugguuuuucaugaauccaucccagagugggaacaccuugacuucaucuggggacuagaugcaccauggagacuguacaauaaaauuauuaaccugaugcggaaauaucaguag

SEQ ID NO: 5083 - RNA, 1206 nt, Artificial Sequence
  derived and/or modified sequence
auggcgugcuuggaguucguuccuuucgauguucagauguguuuggaauuccugccaucaggagaauuuguggucuuauugacaagcggcgugcaacuucaaacuuuuaccgucucaguaacugauuuaaaagggggcgcuucgggcgugguccggucaagccgcugggugcgcgguuucaccgauuucagaucaaaagcuguggacuuauguggacccaaaccggucguuuuucugcagcaugggcuccuggcagacagcaguaauuggguaaccaaucuagccaacucaucacugggcuucauuuuggccgacgccggguuugauguuuggauggguaacuccagaggaaacacauggucaaggaaacauaaaacccuuucagugagucaggacgaauucugggccuucagaguacccuuucucgacuauuccuaugaugagauggcaaaauacgauuuaccagcaaguauaaauuuuauucugaauaagaccggccaggagcagguguauuauguggggcacagccagggaacaaccaucggauuuauagccuuuucucagauuccggaacuagccaagagaaucaaaauguucuucgcccugggcccugucgccucagucgccuucuguacuuccccaauggccaaguuaggcagacugccagaucacuuaauaaaagaucucuucggcgauaaagaguuccuaccccaaucugcauuucugaaguggcuugggacacacguaugcacccaugugauucuaaaggagcuaugugggaaucugugcuuccuccugugcggcuuuaacgaacguaaucucaauaugucuagggucgacguguacacuacacacagcccagcuggcacuagcguccagaauaugcuccacuggucccaggcaguuaaguuccagaaguuccaagccuuugauuggggguccagcgccaaaaauuacuuccacuauaaucaaucuuacccaccuacauacaaugucaaagacaugcuggugccaacggcggucugguccggcgggcaugacuggcucgcugaugucuaugacguaaauauccuucuuacacagaucaccaacuuaguauuccacgagaguaucccugaaugggaacaccuggauuuuaucuggggccuggacgcucccuggcggcuuuacaauaagauuauuaaucucaugcggaaauaccaguag

SEQ ID NO: 5084 - RNA, 873 nt, Artificial Sequence
  derived and/or modified sequence
augaagaugcguuuccucggccucguggucuguuuagucuuauggacauugcacucagaaggcagcggcgggaaacugacggcaguggauccugagacuaacaugaaugugucggagaucauuucguacuggggguuccccucugaagaguacuugguggagacugaggacggcuacauucugugucucaauaggauuccccauggacgaaagaaccauagugauaaaggaccaaagccaguuguauuccuucagcauggccuucucgcagacuccaguaauugggugaccaaccuggcgaacuccucccuuggguuuauuuuagcagacgccggguuugauguauggaugggcaauucgcgcggaaacaccuggaguaggaagcauaaaacucugucugucagucaggaugaguuuugggcauuuucauaugaugaaauggcuaaauacgaccugccagccagcauaaauuuuauccucaauaaaacagggcaggaacagguguauuaugucgggcacucccaggggaccacuaucggauuuaucgcauucucacaaauuccugaacuggcuaaacgcauaaaaauguuuuuugccuugggacccguagccaguguggcuuucugcaccaguccaauggccaaauuagggcgguugccugaccaucuuauaaaggaucuguucggggauaaagaguucuuaccacaaucagcuuuucugaagugguuggguacacacguuugcacucacguaauuuugaaagaacucuguggaaauuuguguuuucugcucugcggcuucaacgaacgcaaucuuaacaugucuagagucgacguguauacuacacauucuccggcaggcacgucaguuuag

SEQ ID NO: 5085 - RNA, 1200 nt, Artificial Sequence
  derived and/or modified sequence
augaaaaugcguuuucuuggcuugguggucugccugguacuguggacgcuccacucagaagguucagguggaaaacugacugccguagaccccgagacgaauaugaacguguccgaaauuaucucuuauugggguuuuccaagugaagaauaucuuguagaaaccgaagacggguacauucuguguuugaaccgcauaccccacggacggaagaaucacucugacaagggcccaaaaccgguaguguucuugcagcauggucuguuggcugauagcaguaacuggguuacuaaucucgcgaauaguucucucggauucauacucgcagacgccggcuuugacgucuggaugggcaauucacgaggcaacaccuggucccguaaacauaagacuuuaagcgugucacaggacgaguucugggcuuucucauaugacgaaauggcuaaguaugacuugccagcuuccaucaauuucauccucaauaagacuggccaggagcagguguacuauguaggccauucccaagguacuacuaucggguucauugccuuuucccagaucccggagcucgcgaaaagaaucaagauguucuucgcucugggccccguggcgucaguggcauuuuguacuaguccgauggccaagcucgggcggcucccugaucaucugauuaaagaucucuuuggggacaaggaguuucuuccccaguccgcauuuuuaaaauggcucggaacucacgugugcacucaugucaucuugaaggaacucuguggcaaccuguguuuucuguuguguggcuuuaacgaacgaaaucugaauaugucccgagucgauguauacacaacucauucaccagccgguacauccgugcagaauaugcugcacuggucucaagcagugaaguuccagaaauuucaagcuuuugacuggggcucuucagcaaagaauuauuuucacuauaaucaaagcuauccuccaacauacaauguaaaagacaugcuugugccaacagccguguggaguggcggucacgauuggcuggccgacguauacgacguaaacauccugcuuacacaaauuacaaaccuuguuuuccaugagucuauccccgagugggagcaccuggauuuuaucuggggacucgaugccccauggcggcuuuauaacaaaauaauaaauuuaaugcgcaaauaccaguag

SEQ ID NO: 5086 - RNA, 1200 nt, Artificial Sequence
  derived and/or modified sequence
augaaaaugcgcuucuugggccucgugguuugucuggugcucuggacacuacacuccgaagguucuggugggaaacugaccgccgucgauccagaaaccaacaugaaugugagcgaaauuaucagcuacuggggauucccauccgaagaauaucuuguggaaacugaggauggguacauccugugccucaaccguaucccgcacggccggaaaaaucacuccgauaaggggccuaagcccguuguauuccugcagcacgggcugcuagccgauagcuccaauugggucacaaaccucgccaacuccucacugggcuucauucucgccgacgcuggauuugauguguggaugggcaauagccgaggcaacaccuggucacgcaagcacaaaacacucucagugucucaagacgaguuuugggccuucagcuacgacgagauggccaaguaugaccugccugcauccauuaauuuuaucuugaauaagacugggcaggaacagguguauuacgucgggcacucacagggaacaacgaucggauuuaucgcauuuucucagauucccgagcuggcuaaacgcauuaaaauguucuuugcucuuggcccggucgccucuguugccuuuuguaccucuccaauggcuaagcugggucgucugcccgaucaccugaucaaagaccuauucggggauaaggaguuucucccucaaucugcguuccuuaaauggcucggcacucacguuugcacccacgucauucugaaggaacugugcggcaacuuauguuuucuauugugcggauuuaacgagcgcaacuugaauaugagcagagucgacguauacacaacacacucaccugcaggaaccagcgugcagaauaugcuccacuggucccaagcugugaaguuccaaaaauuccaagcuuucgauuggggaagcucugcuaaaaacuacuuccacuauaaucaaucauacccgccaacauacaauguaaaggacaugcucgugccaacggccguguggagcggcgggcacgauuggcuggcagacguauacgauguaaacauacugcucacacagauuacaaaccuggucuuucaugagucuauuccugagugggaacaucucgacuuuaucugggggcuggaugcaccuuggcgccucuacaacaagauaauuaaccucaugagaaaauaucaauag

SEQ ID NO: 5087 - RNA, 411 nt, Artificial Sequence
  derived and/or modified sequence
augaagaugcgcuuccugggacugguuguuuguuuggugcuguggaccuugcacagugagggcaguggagguaagcuuaccgccguggauccagaaaccaacaugaauguuucugaaauuauuuccuauuggggauuuccguccgaggaguauuuagucgagacugaagacgguuacauccugugccugaacagaauaccucauggccgaaagaaccacucggacaagggcccuaagccugucgucuuccuucaacauggacucuuagcugacucaucaaauuggguuacuaaccucgccaacucaucucugggauucauucuugcggacgccggguuugacguguggaugggcaacucucgggggaauacuuggucacgcaagcaugugacucuggagccaggcugcuag

SEQ ID NO: 5088 - RNA, 660 nt, Artificial Sequence
  derived and/or modified sequence
augaaaaugagauuucucgggcugguuguguguuuggugcuauggacccuccauagcgaggguuccggaggaaagcugaccgcaguugauccagagacgaacaugaaugucagugagaucaucucuuacuggggauuccccuccgaagaauauuuagucgagaccgaagauggauauauucugugccucaauagaaucccacacggcagaaaaaaucacagcgauaaaggccccaaacccgucguguuccuccaacauggucugcuugcugauaguuccaauuggguaacgaaccuggccaauucuucucugggcuuuauucuggcagacgcaggcuucgacguguggaugggaaacagcagaggaaacaccuggagccguaagcauaagacucuuagcgucucccaggacgaauuuugggccuuuaguuaugaugaaauggcaaaauacgauuuaccugcaucaauuaacuuuauacugaauaaaaccggacaggaacagguauauuaugugggacacucacaaggcaccaccauuggcuuuauugccuuuagucagauccccgaacuggccaagcgcauaaagauguuuuucgcacuuggcccaguugcguccguugcauuuuguaccuccccuauggcaaaguugggacgucuuuag

SEQ ID NO: 5089 - RNA, 1200 nt, Artificial Sequence
  derived and/or modified sequence
augaagaugagguucuugggauuggucguuugccucguacucuggacacugcauucugaaggcucaggaggaaagcucacagccguggaccccgaaacaaacaugaauguaagugaaaucauuuccuacuggggauuccccuccgaagaguaccuugucgaaacagaggauggcuauauuuuaugccuaaaucgcauuccccauggucguaagaaucacuccgauaaaggaccaaaaccuguaguguuccuucagcauggacucuuggcugauaguucgaacugggugacaaaccuggcuaauucuagucucggauucauacuggccgaugcuggauucgauguguggauggggaauagccgggguaauacuuggucacgcaaacacaagacccugucuguuucacaggaugaauucugggccuuuucuuaugacgaaauggcgaaauaugauuuacccgccuccaucaauuucauacucaauaaaaccggucaagaacaggucuacuacguaggacauucacaaggcaccacuauaggcuuuaucgcuuuuucacagauuccagagcucgccaagcgaauuaaaauguuuuuugccuuaggccccguggcauccguggcauuuugcacuucccccauggcaaagcuagggcgacugccugaucaucugauuaaagaccuguuuggcgacaaggaguuccugccccaguccgcguuuuugaaaugguuggguacccacguguguacccauguuauccuaaaagagcuuuguggcaaccugugcuucuuguuauguggcuucaacgaaagaaaucuuaauaugagcaggguggauguuuacaccacacauucuccagccggaaccuccguacaaaauaugcuacauuggucucaggccgucaaguuucaaaaauuccaagcuuucgauugggggucuagugcaaagaacuacuuccauuacaaccagaguuauccucccacuuauaacgucaaggauaugcuugugccaaccgcaguaugguccggaggacacgauuggcucgcggacgucuacgaugugaauauacuccugacacagaucacuaaccuuguguuccaugaaucuaucccugaaugggagcaccucgacuuuaucuggggacuggacgcgccguggcgccuguauaacaaaaucauaaaucucaugcgcaaauaccaguag

SEQ ID NO: 5090 - RNA, 1074 nt, Artificial Sequence
  derived and/or modified sequence
augaaacugcggacauuagcuguuagcgccaccguuguuaaggacggagucagcggaguuugcuccuuucggugcagcgacguaucuggcguguuacccucaggaccuaaaccggugguuuuccuucagcacggauuguuagcggacucgucaaauuggguuacaaaccucgccaacuccucucugggguucauucucgccgacgcuggguuugacgucuggauggguaauucuaggggcaacacauggucacgcaaacacaagacccucucaguuucucaggaugaguuuugggccuuuucuuacgacgagauggccaaguaugaucuccccgcauccaucaacuucaucuuaaacaagacgggccaagaacaaguguacuacguggggcacucucaggggaccacuauuggguucauugccuuuucucaaauccccgagcucgcuaagagaauuaagauguucuuugccuuagggccaguugcaagcguugccuucugcaccaguccaauggccaaacuaggaagacugccugaccaccugauuaaagaucuguucggcgacaaggaguuccugccacaauccgcauuccucaaaugguuagguacacacguaugcacgcauguaauucuuaaagaacuuugugguaacuuauguuuccuucuguguggguucaaugaaagaaauuuaaacaugucucgcgucgauguuuacaccacacauaguccugcagguacuucagugcaaaauauguuacacuggucccaagcugugaaauuucagaaguuucaggcauuugacuggggaucaagugcaaagaauuauuuucacuacaaucaauccuauccuccaaccuacaacgugaaggacaugcuggugccuaccgccguauggucuggcggccacgacuggcucgcggacguguaugacguuaacauucuuuugacucagauuaccaaccucguuuuccacgaaaguauaccugaaugggagcauuuggacuucauuuggggacucgacgcacccuggagguuguauaacaaaaucauaaaucuuaugagaaaguaucaguag

SEQ ID NO: 5091 - RNA, 1200 nt, Artificial Sequence
  derived and/or modified sequence
augaagaugagauuuuuaggccucgucguuugucugguuuuguggacgcuacacucagaaggcucugggggcaaauuaacagccguggacccggaaaccaacaugaacguauccgaaaucauuagcuauuggggauuuccaagcgaagaauaucuuguugaaaccgaggauggcuacauccucugccugaaucgcaucccucauggcaggaaaaaucacagugacaaaggccccaaaccaguggucuuccugcagcacgggcuacuugccgauucaucuaacugggucacuaauuuggcaaauucaucucuuggguucauucuugcagacgcugguuucgacguauggauggguaauucaaggggaaacaccuggucgaggaaacauaaaacauugagcguaucucaggacgaguucugggcauucagcuaugaugaaauggcgaaauacgaccuaccagcauccauuaacuuuauccuaaauaagacagggcaggaacagguuuacuacgucggacauagucagggaacuacuauugguuucaucgcguuuucacaaaucccagaacucgcaaaaaggauuaagauguuuuucgcccucgguccaguggcaucugucgccuucuguaccuccccuauggcaaaacuuggccgcuuaccagaucaccugaucaaggauuuauuuggcgauaaagaauuucuuccccaguccgcauuccucaaauggcugggaacccacguguguacucacgugauccugaaggaacugugcggaaaucucugcuuccuucuuugcggguuuaacgagaggaaucugaauaugagcagaguugauguuuacacuacccauagucccgccggcacaucaguacaaaacaugcugcauuggucccaggccguuaaguuccaaaaauuucaggccuuugauugggggucaucagcaaagaacuacuuucauuauaaccaaaguuacccuccaaccuacaaugucaaggauaugcuggugccuaccgcaguuugguccggcgggcacgacuggcuugcagacguguacgacguaaauauucugcugacacaaauuaccaacuugguuuuccaugagucuauuccugagugggaacaucuggauuuuaucuggggcuuagaugccccuuggcggcuguauaauaaaaucaucaaucuuaugagaaaauaucaauag

SEQ ID NO: 5092 - RNA, 1032 nt, Artificial Sequence
  derived and/or modified sequence
auggccugcuuggaguuugugccuuuugauguacagaugugccuggaguuucucccaucaggccccaaaccagucgucuuccuccagcacggacuuuuagcagacagcagcaacugggugacaaaucuggcaaacaguucacugggauuuauucuugccgaugccggauucgauguuuggaugggaaacucuagaggaaauaccuggucaagaaaacauaagaccuuguccgugagccaagacgaguucugggcuuucucuuaugaugaaauggcuaaguacgaccugccagcuagcauuaacuucauccugaauaagacaggacaggaacaggucuauuaugugggacacucacaggggacuaccaucggguuuaucgcguucucccagauaccagagcucgccaaacggaucaaaauguucuuugcucuaggucccguggcuuccgucgccuuuugcaccuccccuauggccaaacucgguagacugccugaucaucugauuaaagaccuauuuggagacaaggaguuccuuccacagucagccuuucuuaaguggcugggaacacauguguguacacacguaauuuuaaaagagcucugcggcaaccucuguuuccugcuaugcgguuucaacgaacgcaacuugaauaugucccgcgucgacguguacacgacccacucaccugccggaaccuccguucaaaauaugcugcacuggucucaagcagucaaguuucagaaguuucaagccuucgacugggguagcuccgcaaaaaauuacuuucacuacaaucagucuuauccacccacguacaacgucaaggauaugcuagucccuacggcggucuggaguggcgggcaugacugguuggccgauguauacgacguuaacauccugcugacccagaucacgaaccugguauuccacgaguccauaccugagugggaacaccuugacuucauuuggggauuagaugccccauggagacuauauaacaagauuaucaaucuuaugcgcaaauaucaguag

SEQ ID NO: 5093 - RNA, 1206 nt, Artificial Sequence
  derived and/or modified sequence
auggcgugcuuggaguucguuccuuucgauguucagauguguuuggaauuccugccaucaggagaauuuguggucuuauugacaagcggcgugcaacuucaaacuuuuaccgucucaguaacugauuuaaaagggggcgcuucgggcgugguccggucaagccgcugggugcgcgguuucaccgauuucagaucaaaagcuguggacuuauguggacccaaaccggucguuuuucugcagcaugggcuccuggcagacagcaguaauuggguaaccaaucuagccaacucaucacugggcuucauuuuggccgacgccggguuugauguuuggauggguaacuccagaggaaacacauggucaaggaaacauaaaacccuuucagugagucaggacgaauucugggccuucagaguacccuuucucgacuauuccuaugaugagauggcaaaauacgauuuaccagcaaguauaaauuuuauucugaauaagaccggccaggagcagguguauuauguggggcacagccagggaacaaccaucggauuuauagccuuuucucagauuccggaacuagccaagagaaucaaaauguucuucgcgcuaggcccuguggccucaguugccuuuugcacaucaccaauggccaaacuuggaagauuacccgaccauuugaucaaggacuuauuuggcgacaaagaauucuugccccaaucugcuuuuuugaaauggcucgggacucacguuuguacccacguuauucugaaggaacucugcgguaaccuaugcuuccuucugugugguuuuaacgaaagaaauuugaacaugucccgcgucgacguguauaccacucacuccccagccggaacuucgguacaaaauaugcugcacuggagucaggcugugaaauuccagaaauuccaagccuucgacuggggaucaucagcuaaaaacuacuuucacuauaaccaauccuacccccccaccuacaacgucaaagauaugcucguuccuacagcuguuuggucaggcggacaugacugguuagcugacguguaugauguaaacauccugcuaacgcaaaucacaaauuuaguuuuccacgagucaauccccgagugggagcaccuugacuucauuuggggccuggaugccccauggcgccuguacaacaagaucaucaaccugaugcguaaauaccaguag

SEQ ID NO: 5094 - RNA, 873 nt, Artificial Sequence
  derived and/or modified sequence
augaaaaugagauuuuugggccugguagugugucugguuuuguggaccuugcacagcgaaggauccggagguaaacuuacugccguagacccagaaacaaacaugaacguaucggaaaucaucucuuauugggguuuuccuucugaggaauaccucguugaaacagaagacggguauaucuugugcuugaaucguauuccccauggccguaaaaaccacagugauaaagguccuaagcccguuguguucuugcagcauggccuguuggcugacaguucaaacugggugacgaacuuggcgaacucuagucugggcuucauccuggccgacgcaggauuugauguuuggauggguaacaguagagguaacaccuggucgcggaaacacaaaacacucucaguaagccaggacgaauucugggcguucaguuaugacgagauggccaaguacgaucuccccgccucaauaaacuucauacugaauaagaccggucaggaacaagucuauuacguaggucacucucaaggaacaacgauuggguucaucgcuuuuagucagauuccggaacuggccaaacggaucaaaauguucuucgcauugggucccguugcaucuguugccuucuguacgucacccauggccaaacugggacgauugcccgaccaucuuaucaaggaccuuuucggcgacaaagaguuucuuccacaaucugcauuccuuaaauggcugggaacucacguuuguacacacguuauccuuaaggaacuaugcggcaacuugugcuuuuugcugugcggguucaaugagcggaaucuuaacaugucaagagucgaugucuauacuacccacucaccugccggcacuuccguguag

SEQ ID NO: 5095 - RNA, 1200 nt, Artificial Sequence
  derived and/or modified sequence
augaaaaugcguuuucuuggcuugguggucugccugguacuguggacgcuccacucagaagguucagguggaaaacugacugccguagaccccgagacgaauaugaacguguccgaaauuaucucuuauugggguuuuccaagugaagaauaucuuguagaaaccgaagacggguacauucuguguuugaaccgcauaccccacggacggaagaaucacucugacaagggcccaaaaccgguaguguucuugcagcauggucuguuggcugauagcaguaacuggguuacuaaucucgcgaauagcagucucggcuucauccuggcggaugcuggauuugauguuuggauggguaacucccgcggaaacacuuggucccguaaacacaaaacuuugagcgugucacaggacgaauuuugggccuucaguuaugacgagauggcuaaguacgaucuccccgccagcauuaacuucauucuaaacaaaacaggacaagaacaaguauauuacguuggccacagccaaggcacaacgaucggguuuaucgcuuucucucaaaucccagaacucgcaaaacggauuaagauguucuuugcacucggccccguggcgucaguggcauuuuguacuaguccgauggccaagcucgggcggcucccugaucaucugauuaaagaucucuuuggggacaaggaguuucuuccccaguccgcauuuuuaaaauggcucggaacucacgugugcacucaugucaucuugaaggaacucuguggcaaccuguguuuucuguuguguggcuuuaacgaacgaaaucugaauaugucccgagucgauguauacacaacucauucaccagccgguacauccgugcagaauaugcugcacuggucucaagcagugaaguuccagaaauuucaagcuuuugacuggggcucuucagcaaagaauuauuuucacuauaaucaaagcuauccuccaacauacaauguaaaagacaugcuugugccaacagccguguggaguggcggucacgauuggcuggccgacguauacgacguaaacauccugcuuacacaaauuacaaaccuuguuuuccaugagucuauccccgagugggagcaccuggauuuuaucuggggacucgaugccccauggcggcuuuauaacaaaauaauaaauuuaaugcgcaaauaccaguag

SEQ ID NO: 5096 - RNA, 1200 nt, Artificial Sequence
  derived and/or modified sequence
augaagaugcgcuuccuggggcucguaguuuguuuaguucuguggacacuucacagugaagggagcggugggaaguugaccgcaguugaccccgaaacuaauaugaauguuuccgaaaucauuagcuauuggggcuucccaucugaggaguaccuggucgagaccgaggaugguuacauacuuugccugaaucgaauuccacauggccgcaaaaaucacuccgacaaggggcccaaaccaguugucuuccugcagcacggacuccucgcugauaguagcaacuggguuacaaaccucgcuaacucgucucugggcuucauucuggcugaugccggauucgauguguggauggggaacagcagagguaauacauggucacgcaagcacaagacacucucagugucucaggaugaauucugggcuuucucauaugaugagauggcaaaauacgaucugccagcuucuauaaauuuuauuuuaaauaagaccgggcaggaacaagucuacuacgugggucauucacagggaacaacuauaggauucaucgcuuucucacaaauuccagaauuggcuaaaaggaucaagauguuuuucgcccuuggcccggucgccucuguugccuuuuguaccucuccaauggcuaagcugggucgucugcccgaucaccugaucaaagaccuauucggggauaaggaguuucucccucaaucugcguuccuuaaauggcucggcacucacguuugcacccacgucauucugaaggaacugugcggcaacuuauguuuucuauugugcggauuuaacgagcgcaacuugaauaugagcagagucgacguauacacaacacacucaccugcaggaaccagcgugcagaauaugcuccacuggucccaagcugugaaguuccaaaaauuucaggccuucgauuggggaucaagcgccaaaaacuacuuucauuauaaucaauccuacccacccaccuacaacguuaaagauaugcugguacccaccgccguuuggucagguggacaugauuggcuggcugacguuuaugacguaaauauccugcucacucaaauuacgaauuuggucuuucacgaguccauucccgaaugggagcaccucgauuuuaucuggggccuagacgccccuuggagacuguacaacaagauuauuaaucugaugcggaaauaccaauag

SEQ ID NO: 5097 - RNA, 411 nt, Artificial Sequence
  derived and/or modified sequence
augaaaaugagauuuuuaggacuugucgucugccuuguacuuuggacucugcacagugagggaucaggcggaaagcugacugcgguggaccccgagaccaacaugaacgucagcgagaucauuuccuauuggggauucccuucugaagaauaccugguagaaacugaagauggcuacauacuuugccugaaucggaucccccauggccgaaagaaccacuccgacaaaggucccaagcccguuguauuucuucagcacggacuacucgcugauucaagcaacugggucacaaaccuggcaaacuccagccuggguuucauauuagcugaugccggauucgacguguggauggggaacaguaggggaaauacauggaguagaaagcacguuacccuugaaccuggguguuag

SEQ ID NO: 5098 - protein, 475 aa, Artificial Sequence
  derived and/or modified sequence
MESKALLVLTLAVWLQSLTASRGGVAAADQRRDFIDIESKFALRTPEDTAEDTCHLIPGVAESVATCHFNHSSKTFMVIHGWTVTGMYESWVPKLVAALYKREPDSNVIVVDWLSRAQEHYPVSAGYTKLVGQDVARFINWMEEEFNYPLDNVHLLGYSLGAHAAGIAGSLTNKKVNRITGLDPAGPNFEYAEAPSRLSPDDADFVDVLHTFTRGSPGRSIGIQKPVGHVDIYPNGGTFQPGCNIGEAIRVIAERGLGDVDQLVKCSHERSIHLFIDSLLNEENPSKAYRCSSKEAFEKGLCLSCRKNRCNNLGYEINKVRAKRSSKMYLKTRSQMPYKVFHYQVKIHFSGTESETHTNQAFEISLYGTVAESENIPFTLPEVSTNKTYSFLIYTEVDIGELLMLKLKWKSDSYFSWSDWWSSPGFAIQKIRVKAGETQKKVIFCSREKVSHLQKGKAPAVFVKCHDKSLNKKSG

SEQ ID NO: 5099 - protein, 115 aa, Artificial Sequence
  derived and/or modified sequence
MVIHGWTVTGMYESWVPKLVAALYKREPDSNVIVVDWLSRAQEHYPVSAGYTKLVGQDVARFINWMEEEFNYPLDNVHLLGYSLGAHAAGIAGSLTNKKVNRITGLDPAGPNFEY

SEQ ID NO: 5100 - protein, 106 aa, Artificial Sequence
  derived and/or modified sequence
MESKALLVLTLAVWLQSLTASRGGVAAADQRRDFIDIESKFALRTPEDTAEDTCHLIPGVAESVATCHFNHSSKTFMVIHGWTVTGMYESWVPKLVAALYKREPDS

SEQ ID NO: 5101 - protein, 130 aa, Artificial Sequence
  derived and/or modified sequence
MESKALLVLTLAVWLQSLTASRGGVAAADQRRDFIDIESKFALRTPEDTAEDTCHLIPGVAESVATCHFNHSSKTFMVIHGWTVTGMYESWVPKLVAALYKREPDSNVIVVDWLSRAQEHYPVSAGYTKL

SEQ ID NO: 5102 - protein, 461 aa, Artificial Sequence
  derived and/or modified sequence
MESKALLVLTLAAADQRRDFIDIESKFALRTPEDTAEDTCHLIPGVAESVATCHFNHSSKTFMVIHGWTVTGMYESWVPKLVAALYKREPDSNVIVVDWLSRAQEHYPVSAGYTKLVGQDVARFINWMEEEFNYPLDNVHLLGYSLGAHAAGIAGSLTNKKVNRITGLDPAGPNFEYAEAPSRLSPDDADFVDVLHTFTRGSPGRSIGIQKPVGHVDIYPNGGTFQPGCNIGEAIRVIAERGLGDVDQLVKCSHERSIHLFIDSLLNEENPSKAYRCSSKEAFEKGLCLSCRKNRCNNLGYEINKVRAKRSSKMYLKTRSQMPYKVFHYQVKIHFSGTESETHTNQAFEISLYGTVAESENIPFTLPEVSTNKTYSFLIYTEVDIGELLMLKLKWKSDSYFSWSDWWSSPGFAIQKIRVKAGETQKKVIFCSREKVSHLQKGKAPAVFVKCHDKSLNKKSG

SEQ ID NO: 5103 - protein, 275 aa, Artificial Sequence
  derived and/or modified sequence
MVIHGWTVTGMYESWVPKLVAALYKREPDSNVIVVDWLSRAQEHYPVSAGYTKLVGQDVARFINWMEEEFNYPLDNVHLLGYSLGAHAAGIAGSLTNKKVNRITGLDPAGPNFEYAEAPSRLSPDDADFVDVLHTFTRGSPGRSIGIQKPVGHVDIYPNGGTFQPGCNIGEAIRVIAERGLGDVDQLVKCSHERSIHLFIDSLLNEENPSKAYRCSSKEAFEKGLCLSCRKNRCNNLGYEINKVRAKRSSKMYEDSFSDALQSLPLPSKDSFFWD

SEQ ID NO: 5104 - protein, 17 aa, Artificial Sequence
  derived and/or modified sequence
LSPDDADFVDVLHTFTR

SEQ ID NO: 5105 - protein, 17 aa, Artificial Sequence
  derived and/or modified sequence
SIHLFIDSLLNEENPSK

SEQ ID NO: 5106 - DNA, 1425 bp, Artificial Sequence
  derived and/or modified sequence
atggagagcaaggccctgctggtgctgaccctggccgtgtggctgcagagcctgaccgccagccgcggcggcgtggccgccgccgaccagcgccgcgacttcatcgacatcgagagcaagttcgccctgcgcacccccgaggacaccgccgaggacacctgccacctgatccccggcgtggccgagagcgtggccacctgccacttcaaccacagcagcaagaccttcatggtgatccacggctggaccgtgaccggcatgtacgagagctgggtgcccaagctggtggccgccctgtacaagcgcgagcccgacagcaacgtgatcgtggtggactggctgagccgcgcccaggagcactaccccgtgagcgccggctacaccaagctggtgggccaggacgtggcccgcttcatcaactggatggaggaggagttcaactaccccctggacaacgtgcacctgctgggctacagcctgggcgcccacgccgccggcatcgccggcagcctgaccaacaagaaggtgaaccgcatcaccggcctggaccccgccggccccaacttcgagtacgccgaggcccccagccgcctgagccccgacgacgccgacttcgtggacgtgctgcacaccttcacccgcggcagccccggccgcagcatcggcatccagaagcccgtgggccacgtggacatctaccccaacggcggcaccttccagcccggctgcaacatcggcgaggccatccgcgtgatcgccgagcgcggcctgggcgacgtggaccagctggtgaagtgcagccacgagcgcagcatccacctgttcatcgacagcctgctgaacgaggagaaccccagcaaggcctaccgctgcagcagcaaggaggccttcgagaagggcctgtgcctgagctgccgcaagaaccgctgcaacaacctgggctacgagatcaacaaggtgcgcgccaagcgcagcagcaagatgtacctgaagacccgcagccagatgccctacaaggtgttccactaccaggtgaagatccacttcagcggcaccgagagcgagacccacaccaaccaggccttcgagatcagcctgtacggcaccgtggccgagagcgagaacatccccttcaccctgcccgaggtgagcaccaacaagacctacagcttcctgatctacaccgaggtggacatcggcgagctgctgatgctgaagctgaagtggaagagcgacagctacttcagctggagcgactggtggagcagccccggcttcgccatccagaagatccgcgtgaaggccggcgagacccagaagaaggtgatcttctgcagccgcgagaaggtgagccacctgcagaagggcaaggcccccgccgtgttcgtgaagtgccacgacaagagcctgaacaagaagagcggc

SEQ ID NO: 5107 - DNA, 345 bp, Artificial Sequence
  derived and/or modified sequence
atggtgatccacggctggaccgtgaccggcatgtacgagagctgggtgcccaagctggtggccgccctgtacaagcgcgagcccgacagcaacgtgatcgtggtggactggctgagccgcgcccaggagcactaccccgtgagcgccggctacaccaagctggtgggccaggacgtggcccgcttcatcaactggatggaggaggagttcaactaccccctggacaacgtgcacctgctgggctacagcctgggcgcccacgccgccggcatcgccggcagcctgaccaacaagaaggtgaaccgcatcaccggcctggaccccgccggccccaacttcgagtac

SEQ ID NO: 5108 - DNA, 318 bp, Artificial Sequence
  derived and/or modified sequence
atggagagcaaggccctgctggtgctgaccctggccgtgtggctgcagagcctgaccgccagccgcggcggcgtggccgccgccgaccagcgccgcgacttcatcgacatcgagagcaagttcgccctgcgcacccccgaggacaccgccgaggacacctgccacctgatccccggcgtggccgagagcgtggccacctgccacttcaaccacagcagcaagaccttcatggtgatccacggctggaccgtgaccggcatgtacgagagctgggtgcccaagctggtggccgccctgtacaagcgcgagcccgacagc

SEQ ID NO: 5109 - DNA, 390 bp, Artificial Sequence
  derived and/or modified sequence
atggagagcaaggccctgctggtgctgaccctggccgtgtggctgcagagcctgaccgccagccgcggcggcgtggccgccgccgaccagcgccgcgacttcatcgacatcgagagcaagttcgccctgcgcacccccgaggacaccgccgaggacacctgccacctgatccccggcgtggccgagagcgtggccacctgccacttcaaccacagcagcaagaccttcatggtgatccacggctggaccgtgaccggcatgtacgagagctgggtgcccaagctggtggccgccctgtacaagcgcgagcccgacagcaacgtgatcgtggtggactggctgagccgcgcccaggagcactaccccgtgagcgccggctacaccaagctg

SEQ ID NO: 5110 - DNA, 1425 bp, Artificial Sequence
  derived and/or modified sequence
atggagtcgaaggcgttgcttgtcctgacccttgcggtctggctccagtccctgaccgcgtcgagaggtggagtggctgcagctgatcagcgaagagatttcattgacatcgaatcgaagtttgccctgagaactcccgaagatacggcagaggatacgtgtcatctgatcccaggcgttgcagaatcggtcgcaacttgtcatttcaatcactcgagcaagaccttcatggtaatccacgggtggaccgtgactggaatgtatgaaagctgggtcccaaagctggtcgcggccctgtacaagcgagagccagattcgaacgttatcgtggtggattggctttccagagcacaagaacactatcctgtctcggcaggttacactaagctcgtgggacaagacgtggcccgcttcatcaactggatggaagaagaattcaattacccgctggacaacgtccaccttttgggttactcactgggtgcacacgcggcaggcattgctgggtcgttgaccaacaagaaagtgaatcgtattaccggccttgatccagcaggtccaaactttgaatacgcggaagccccttcgagactgagtcctgacgatgcagattttgtggacgtgctgcacacctttactaggggttcaccaggccggtccataggcattcagaagcctgtgggacatgtggacatctacccaaacggaggcacctttcaacccggatgcaatatcggtgaagcaattagggtcatagcagaaagggggttgggtgacgtggatcagcttgtgaaatgttcccatgagcgctctatacacctgttcatcgactcacttctgaatgaagaaaatccgtcgaaggcctacagatgctcctcgaaggaagcattcgaaaaggggctgtgtctgtcctgccgcaagaacagatgcaataaccttggttacgagatcaacaaagtgcgcgccaagcggtcctcaaaaatgtaccttaaaacgcgatcacagatgccctacaaggtttttcattaccaagtcaaaattcacttttcgggcactgagtcggagactcataccaaccaagcatttgaaattagcctgtacggaactgtggcggagagcgaaaacattccctttaccctccccgaagtctctaccaacaaaacctactcgttcttgatctacaccgaagtggacattggagagcttttgatgctcaaactcaagtggaagtccgattcttacttctcctggagcgattggtggagctctccaggtttcgcaattcaaaagattcgcgtcaaggcgggcgagactcagaaaaaagtcatcttttgttccagagagaaagtgtcgcatttgcaaaagggaaaagcgcctgcggtgttcgtgaaatgtcatgataagagccttaacaagaagtcagga

SEQ ID NO: 5111 - DNA, 1425 bp, Artificial Sequence
  derived and/or modified sequence
atggagtcgaaggccctgctggtgctgaccttggcggtgtggctgcagtcgctcaccgcttcacgcggaggggtggcagctgccgatcagcgcagagactttatcgacattgagtccaagttcgccctccggaccccggaggacacggccgaggacacttgccatctgattccaggagtggccgaatcagtggccacttgccatttcaaccattcctccaaaacgttcatggtcattcacggatggaccgtgacggggatgtacgagtcgtgggtgccaaaactcgtcgccgccctttacaagcgcgaaccggattcgaatgtgatcgtggtcgactggttgtccagagcacaggaacattacccggtgagcgcgggatacaccaagctggtcggacaagatgtcgctcggttcatcaactggatggaagaagaattcaactaccctcttgacaacgtgcacctgctcgggtacagcttgggagcccatgctgctggaattgccggaagcctgactaacaaaaaggtgaaccggattaccggcttggatccggctgggcccaacttcgagtatgcggaggccccatcacgccttagcccggatgacgccgattttgtggacgtcctccataccttcacgcggggatctccgggacgctctatcggcattcaaaagccggtgggacacgtcgatatctaccctaatggtggcacgtttcagccggggtgcaacattggcgaggcgatccgcgtcatcgcagaacgcgggctcggagatgtggatcaactcgtgaagtgctcgcacgagcggtcaattcacctgttcatcgatagcctgctgaacgaagaaaacccaagcaaagcataccgctgttcctccaaggaggcgttcgaaaaggggctctgcctctcctgccggaagaaccggtgtaacaacctgggatacgagatcaacaaggttcgcgctaaacgatcgtcgaagatgtacctcaagactcgctcccagatgccgtacaaggtttttcactatcaggtgaaaatccacttctcaggcactgaatcggaaactcacaccaaccaggccttcgaaatctccctctacggcaccgtggcagagtccgagaacatccctttcactttgccggaagtgtcaaccaacaagacctattcgtttttgatctacactgaagtggacatcggcgaactgctgatgctgaaacttaagtggaagtcggattcctacttctcttggtccgactggtggagctcaccagggttcgcaatccagaaaatacgtgtcaaagccggcgagacgcagaagaaggtgatcttttgttcaagggaaaaagtctcgcacctccagaaaggcaaggctccagccgtgttcgtcaaatgtcacgacaaaagcctgaacaagaagtcggga

SEQ ID NO: 5112 - DNA, 1425 bp, Artificial Sequence
  derived and/or modified sequence
atggaaagtaaggcccttctcgtgctgacgttggcggtgtggttgcaatctctaacagcttctagaggcggcgtcgccgcagccgaccagagaagggatttcattgacattgaatccaagtttgcacttcggacccctgaagataccgccgaagatacctgccacctcatccccggcgtggccgaaagcgtggcgacctgccactttaaccactctagcaagacctttatggtaattcacggctggaccgtcaccggtatgtacgagtcttgggtacccaagttagtggcagctctgtacaagagggagccggattccaacgttattgtagtcgactggctctctcgggcccaagagcattatccagtgtccgcaggttacactaaactcgtggggcaagatgtggctcgatttatcaattggatggaggaggaattcaattaccctctggataacgtacacttactcgggtattcactaggagctcacgctgcgggaattgcagggtctctgactaacaagaaggttaaccgcatcaccgggttagaccctgctggcccaaacttcgaatacgccgaggcacccagcaggttgagcccagacgacgctgatttcgtggacgtgctgcacacctttaccaggggatccccaggccgctccatcggaatacagaaacccgtgggccatgttgacatctatcccaatggcggcacctttcaaccaggctgtaacatcggagaagctatccgggtaattgcggaacgagggctgggcgacgtggatcagcttgtaaaatgtagccacgaaaggtctattcatctgttcatcgattcactcttaaacgaagaaaatccctcaaaggcttataggtgttcgtccaaggaagctttcgaaaagggcctctgtctttcatgtcgcaaaaatcggtgcaataacctgggatatgagattaataaggtaagagctaagcggtcctctaaaatgtatctgaaaacccggtctcagatgccttacaaggtgtttcactaccaagtaaaaattcatttctctggaactgagtctgaaacacacaccaaccaggcatttgaaatttcgctatatggaactgtcgcagagtctgagaacatccctttcacgctccctgaggtgagcacaaataaaacctattcctttcttatttatacagaggtggatataggcgagttgttgatgctgaagttaaaatggaaatcagattcctacttctcttggagcgactggtggtcctctcccgggtttgccattcaaaagattcgcgttaaagcgggcgagacacagaaaaaggtaatattctgtagccgagagaaagtaagtcacctgcagaagggaaaggctccagccgtcttcgtgaagtgccacgacaaaagcctgaataagaagtccgga

SEQ ID NO: 5113 - DNA, 1425 bp, Artificial Sequence
  derived and/or modified sequence
atggagtcaaaggccttgctggtcctgactctggccgtatggcttcagtcgctgactgcctccagaggcggtgtggcagcagctgaccagagacgcgatttcatcgatatcgagtccaaatttgcgctcagaaccccggaagacaccgccgaggatacctgccacctgatcccaggcgtggcggaatcagtggccacttgccattttaaccacagctcgaagaccttcatggttattcacggttggacggtgaccgggatgtacgaatcttgggtaccgaaactggtcgcggctctgtacaaacgggagcctgactcgaacgtcatcgtggtcgactggctctcgcgggcccaggaacactacccagtctcagcgggatacaccaagctcgtgggtcaggatgtggcacggttcataaattggatggaggaagagttcaattacccacttgacaatgtgcacctgctcggctactcgctgggagcccatgcggccgggatcgctggatcactgaccaacaaaaaggtgaacaggattactggactggaccctgccggaccgaacttcgaatacgccgaggcgccgagccgtctgagccccgacgacgccgatttcgtggatgtgcttcatactttcacgcggggatctccgggcaggtccatcgggatacagaagccagtgggtcacgtcgacatctacccgaatggaggaaccttccaaccagggtgcaacatcggagaagccattcgggtcatcgcagagcggggactgggagacgtggaccagctggtgaagtgctcacacgagcgctcgattcatctgtttattgactccctccttaacgaagaaaacccgagcaaggcgtatcgatgttcttccaaagaagcgttcgaaaagggattgtgtctttcatgccgcaaaaaccgttgtaacaatctgggatacgagatcaacaaggtccgggcaaagagatcgtcgaagatgtacctcaagactagatcccaaatgccctacaaggtgtttcattaccaggtgaagatccatttctcggggactgagtccgaaactcacacgaaccaggcgttcgagatcagcctctacggaaccgtagccgaaagcgagaatatccctttcaccctgccggaggttagcactaacaagacctactcgttcctcatctatactgaagtcgatatcggcgaacttctcatgctgaagctcaagtggaaatcggactcctacttttcttggtcagactggtggtcctcgcctggattcgctatccaaaagatcagggtgaaggccggcgaaacccaaaagaaagtgatcttctgcagccgcgaaaaggtgtcacacctgcaaaaagggaaggcaccggcagtgtttgtgaaatgccacgataaaagccttaataagaagtccggt

SEQ ID NO: 5114 - DNA, 1425 bp, Artificial Sequence
  derived and/or modified sequence
atggagtcaaaagcactcctggtgttgaccctagccgtatggttgcagagcctgactgcgtcccgcgggggcgtggctgcagccgatcaacgccgagattttattgatatcgagtcaaagttcgccttacgcacccccgaggatactgctgaagatacgtgccacctcatacccggcgttgccgaatccgtggccacatgccatttcaatcacagctctaagactttcatggttattcatggctggaccgtcaccgggatgtatgagtcttgggtgccaaaacttgttgccgctttgtataagagggaacccgacagtaatgttatcgtagtggattggttatcgagggctcaggagcattaccccgtatcagccggatatacgaagctggttggccaggacgttgctaggttcatcaactggatggaggaggagtttaactatcctctggataacgtgcatcttttgggctactcgctgggggcccacgcagctggaatagctggcagcctcacgaacaaaaaagtaaatcgtattacgggccttgatcctgctggcccaaattttgagtatgctgaagcgccttcccgcctcagcccagatgacgctgattttgttgacgtgcttcatacattcacccgcgggtcccctggtagaagtatcggtattcagaagccagttgggcacgtggacatctacccgaacggaggcacctttcagccaggctgcaatatcggagaggcaatccgggtgatcgcagagagagggctgggagacgtggaccagcttgtcaaatgctcccatgagcgatcaatccatctgtttattgattctctgctcaatgaggagaacccatcaaaagcctatcgctgctcgtccaaagaagccttcgagaaaggtctttgcctgagttgtagaaaaaacaggtgtaataacctggggtacgaaattaataaggttagggcaaaaaggtccagtaaaatgtatctgaaaacccggtcccagatgccttataaagtgtttcattatcaggtcaagatccacttttctggaaccgagtccgagacccacaccaaccaagctttcgaaattagcctgtatggaactgtggccgagagcgagaacattcccttcacattacctgaagtttctaccaataagacctactcgtttctgatttatactgaggtggacatcggcgagctcctgatgctcaagttgaagtggaaatctgacagctactttagttggtcagattggtggtcaagccctggctttgcaatccagaaaatcagagtgaaggcaggagaaactcagaaaaaggttattttctgttcacgcgaaaaagtatcacatctgcaaaaaggaaaggcccccgccgtttttgtcaaatgccatgataaatctcttaacaagaagtctggg

SEQ ID NO: 5115 - DNA, 1425 bp, Artificial Sequence
  derived and/or modified sequence
atggaatcaaaggcacttctggttctgacacttgcagtctggttgcagtctctgacagcgtcacgagggggtgtggcggcggcggaccagaggcgagattttatcgatatcgagtcaaagttcgcactgaggactcccgaggacactgcagaggacacatgtcacctgattcccggcgtggctgaaagcgtcgccacctgccactttaaccatagctcaaaaacattcatggtcatccacggatggactgtcactggtatgtacgaaagctgggtgccaaagcttgtggctgctctgtataaaagagagccggattccaatgtgattgtcgtggactggttgagtagggcacaagaacattatcccgtgtccgctggctacaccaagcttgttggacaggacgtggcgagattcatcaattggatggaggaagagtttaattaccctttagataatgtgcatctgctcggatactccctaggggcacacgcagcgggcattgccggttctctgaccaataagaaggtaaataggataacgggactggaccccgctgggccgaacttcgaatacgctgaagccccaagccggctgtcaccagacgatgcagactttgtggatgtcctgcacacctttacccggggtagtcctggtcggagcatcgggattcagaaacccgtggggcacgttgacatctacccaaatgggggcacttttcagcccggatgcaacattggtgaagccatccgcgtaatcgctgagcgtggactcggagatgttgatcagttggtaaagtgcagtcacgagaggagcatacacttatttatcgactccctactcaatgaggaaaatccctcaaaagcctaccgctgctcatctaaggaggcctttgagaagggcctgtgtctgtcctgcagaaaaaatagatgtaataatctgggctatgaaattaataaagtgcgggcgaagcgatcttcaaagatgtaccttaagaccaggtctcagatgccctacaaggtctttcattaccaggtcaagatacacttctcaggcaccgaaagcgaaactcacaccaatcaggccttcgaaatttccttgtatggcaccgtagcagaatccgagaacattcctttcaccttgcctgaggtgtcaacgaacaagacttacagcttcttgatttataccgaagttgacattggtgagctcctgatgctgaaattgaaatggaagtcggattcctacttcagctggtctgattggtggagctcaccggggttcgccatccagaaaattagggttaaggcgggggagacacagaagaaggtgatattctgctctcgcgagaaggtcagtcacctgcagaaagggaaggcaccagcagttttcgtgaaatgccatgataagtctttaaataaaaagtccggg

SEQ ID NO: 5116 - DNA, 1425 bp, Artificial Sequence
  derived and/or modified sequence
atggagtcgaaggccctgctggtgctcaccctggctgtctggttgcaatctttaactgcctccagggggggtgtggctgcagcggaccagagaagggacttcatagatatcgagtcaaagttcgcattaaggaccccggaggacactgccgaagacacctgtcacttgataccaggggtggccgagtccgtggcaacttgtcactttaatcactcttctaagacttttatggtgatccacgggtggactgtaaccggaatgtatgaatcttgggtacctaagctggttgcggcactctataaacgagagcctgacagcaacgtgatagttgttgactggctctctagagcccaggagcattaccctgtttccgctggatacactaaacttgtcgggcaggatgtcgcccgatttatcaactggatggaagaggagttcaactatcctttagataacgtgcatttgcttggctactctctgggtgcccatgctgcaggaatagcaggctctcttacaaacaaaaaagttaatcgcatcacagggttggaccccgccggaccaaattttgagtacgctgaggccccctcaaggcttagccccgatgatgcggacttcgtagatgtgctccacacgtttacgcggggttcgcctggtcgaagcatcggaattcagaaacctgttggtcacgttgatatctatcctaatggagggacattccagccgggctgtaacatcggcgaagctattcgtgttattgccgaaagggggttgggggatgtcgaccaactggttaagtgttcccatgagcgctcaatccacttatttatagatagcttgctgaacgaggaaaaccccagcaaggcctaccggtgttctagcaaggaggcatttgaaaaagggttatgtttgagctgcagaaagaatcgttgcaataacttaggatacgaaatcaataaagtgagggcgaaacgtagctcaaaaatgtacctgaaaactcgcagccagatgccctacaaagttttccactaccaggtaaagattcacttcagcgggaccgaatcagagacacacactaaccaggcattcgagatttctctgtacggcaccgtagccgagagcgagaatataccctttaccctgcccgaagtgtccacaaacaaaacatactcgttcctgatctacaccgaggtggacattggggagctgctgatgctgaagctcaaatggaaaagcgatagttacttttcatggagcgactggtggagctccccaggcttcgcaattcagaagatccgtgtgaaagcaggtgaaactcagaaaaaggtcattttttgcagtcgggagaaggtttctcatctgcagaaagggaaggctccagcagtgttcgtaaagtgtcatgacaaatccttgaataagaaatccggt

SEQ ID NO: 5117 - DNA, 1425 bp, Artificial Sequence
  derived and/or modified sequence
atggagagtaaggccttgctcgtccttaccctggccgtctggctgcagagcctcactgcctcgcgcggcggtgtcgctgctgccgatcagcgccgcgactttatcgatatagaatccaagttcgcactgcggaccccggaggacaccgctgaagatacttgtcatctgattcctggagtggcggaaagcgtggcgacttgccacttcaaccattcatcaaagactttcatggttatccacggatggactgttaccggcatgtacgaaagctgggtgcctaagctggtggctgcgctgtacaagagggaacctgattcaaacgtgatcgtggtggactggctctcaagagcgcaggaacactacccggtgagcgcgggctacaccaaactcgtgggacaggacgtggcccggttcatcaattggatggaggaagagtttaactacccgcttgacaacgtccatctgcttggatacagccttggagcccatgccgcaggaatcgccggatcacttaccaacaagaaagtcaatcggattaccggtctggacccggccggaccgaatttcgaatacgccgaggcgccatcccgactctcaccggacgatgccgatttcgtggacgtgctgcacaccttcacccggggctcccccggcagatccatcggtatccagaagcctgtggggcacgtggatatctaccctaacggaggaaccttccagcctggatgcaacatcggagaggccattagggtgatcgcagaaagaggcttgggagacgttgaccaacttgtgaagtgcagccacgagcggtcaattcacctgtttatcgacagcctcctcaacgaggaaaacccgtccaaggcttaccgatgtagcagcaaggaggcattcgaaaaaggactgtgcctgtcgtgccggaagaacaggtgcaacaatcttggatacgaaatcaacaaagtccgcgccaaacggtcctccaaaatgtacttgaaaaccagatcccagatgccgtacaaggtctttcattaccaggtaaagattcatttctcgggtacggagagcgaaacgcacactaaccaggcgttcgaaatttccctgtacgggaccgttgccgagtcggagaatattcccttcaccctgccggaagtgtcgaccaataagacctacagcttcctcatttacactgaggtggacatcggtgagctcctcatgctgaaactgaagtggaaatctgacagctacttcagctggagcgactggtggtcctccccggggttcgccatccagaagattcgggtgaaggccggcgaaacccaaaagaaggtcatcttttgctcccgcgagaaagtgtcacacctgcagaaggggaaagcaccagccgttttcgtcaagtgccacgataagtcgttgaataagaagagcggg

SEQ ID NO: 5118 - DNA, 1425 bp, Artificial Sequence
  derived and/or modified sequence
atggaatcgaaagcattattagtacttacacttgccgtttggctgcagtcactgacggcctcacgcggtggggttgctgctgccgatcaaagacgtgatttcatagacatagaaagcaagtttgcactgcggacgcctgaagatacggcggaggatacgtgtcaccttattccaggggttgccgaatccgttgcgacatgtcatttcaatcattcgtctaagacatttatggtgattcatggctggacagttactggaatgtacgaatcttgggtccctaaattagttgcagcactctataaaagagaacctgactctaatgtgattgtggtagattggttatctcgtgcgcaggaacattatccggtgtccgcaggttacacgaaattagtgggccaggatgtggcacggtttatcaattggatggaagaagaattcaattatcctctggataatgttcaccttttggggtatagtctgggtgctcacgcagcaggcattgctggatctcttaccaataaaaaagtaaatcgcattacagggcttgaccctgccgggcctaacttcgaatatgcggaagcaccttcacgtctttcaccggacgatgcagatttcgtcgatgttcttcacactttcacccgcggcagtccgggcagatctataggcatacagaaacctgtaggtcatgtggatatctatccaaatggcggaacgtttcaacctgggtgcaatattggagaagctattagagtaatcgcagagcgcggccttggcgacgttgatcagctggtcaaatgctcgcatgaacgttctatacatctttttattgactcgctgttaaacgaggaaaatccatcgaaagcgtatcgctgtagttccaaggaagcttttgagaaagggctctgtctttcttgtaggaaaaatcggtgcaacaatttaggatacgagattaacaaagtaagagcaaagagatcatctaaaatgtatttaaaaacacggtcccagatgccttataaggtatttcattaccaggtaaagattcatttttcgggtactgagtccgagacccatacaaaccaggcatttgaaattagcttgtacggaaccgtggctgagtccgaaaatatccctttcacactcccggaggtatctacgaacaaaacatatagttttctgatttatacggaggttgatattggcgaactgcttatgttaaaactgaaatggaagtcagatagctatttttcttggtccgattggtggagctctcctggtttcgccattcaaaaaattcgcgttaaagctggagaaactcagaaaaaagtcatcttttgcagccgtgagaaggtgtcgcaccttcagaagggtaaggcaccagcagtctttgtcaagtgccatgacaaatctttgaataaaaaatcaggt

SEQ ID NO: 5119 - DNA, 1425 bp, Artificial Sequence
  derived and/or modified sequence
atggagtcaaaagcactgctggtgctcaccctggcggtgtggctccaatccctgaccgcctcaagaggtggtgttgctgcagctgaccagaggagagatttcattgatattgaatcgaaatttgcactccgaacgcccgaagatacggccgaagatacttgtcacttgatccctggtgtcgccgagtcagtggcaacctgtcatttcaatcacagctcgaaaactttcatggtgattcatgggtggaccgtaactggcatgtatgaatcctgggtgcctaagctcgtggctgcactgtacaaaagggaaccagacagcaacgtgatcgtcgtggattggttgtcgcgggcccaggaacactacccggtcagcgcaggctacacgaagttggttggtcaggacgttgcgcggtttatcaactggatggaagaggagtttaactatccacttgacaacgtccatcttctgggttacagccttggggctcatgccgcagggatagcaggtagcctgactaataagaaagtgaatcggatcaccggattggatcccgcaggtcctaatttcgaatacgccgaagcgccttcccgcctgagccctgatgatgcggactttgtggatgtgcttcatacctttactagaggatccccagggcgttcgattggcatacaaaagcccgtcggacacgtggacatctaccctaatggtggaacttttcagcccggatgcaacattggcgaggcgattagggtcattgctgaaagaggactgggagatgtggaccagttggtgaagtgctcccatgaaagatcgattcatttgtttattgattccctccttaacgaagagaacccttctaaagcataccgctgtagttccaaggaggcctttgaaaaggggctgtgcctctcatgtaggaagaatagatgcaacaacctcggttacgagataaacaaggtacgtgcaaagagaagttctaagatgtatctcaaaactcgatcgcaaatgccctacaaggtgtttcactaccaagtgaaaattcatttctcgggaaccgaatcggaaacccacacgaatcaggcatttgaaatctccctttacggaaccgtggcagaatccgaaaacattcctttcactcttccagaagtgtcgaccaataagacttacagcttcttgatctacaccgaggtggatattggcgaactgcttatgctgaaactgaaatggaagtctgacagctacttttcgtggtcagattggtggtcgtccccaggatttgcaattcaaaagatacgcgtcaaggcaggggagacgcaaaagaaggtcatcttttgttccagagagaaggtcagtcatctgcagaaaggaaaggcaccggctgtgttcgttaagtgtcatgacaagtcgcttaacaagaagtcgggt

SEQ ID NO: 5120 - DNA, 1425 bp, Artificial Sequence
  derived and/or modified sequence
atggagagcaaggctctgctggtcctaacactggcggtgtggttgcaaagcttgaccgctagcagaggtggcgtggccgctgcagaccagcgacgggatttcattgatatagagtcgaaattcgccttgcgtactcctgaagacactgctgaggacacctgccacctgatccccggtgtggccgaatcggtggcgacatgtcatttcaatcactcttccaaaacatttatggtgatccacggatggaccgtgacaggcatgtatgaatcttgggtgcctaagcttgtcgccgcattatacaaaagagagcctgattcaaacgtgattgttgtcgattggctgagtagagcacaggaacactatcccgtatcggcgggatacactaaactcgtcgggcaagatgtagctcgtttcatcaattggatggaagaagagttcaattacccactcgacaatgtgcatctgctggggtattcgcttggggcccatgcggctggaatagcgggcagcctgacaaacaaaaaggtgaacagaatcactggcctggatcctgctggccccaatttcgagtatgctgaggcacccagcaggctgtcccccgatgacgctgacttcgtagacgtcctccatactttcacacggggctcaccgggaaggtccatcggcattcagaagcctgttgggcatgtggatatttatccgaatggcgggacattccagcccggctgtaatatcggagaggccatcagagttatcgccgaacgtgggctgggtgatgttgaccagttggtgaagtgttctcatgaacgctctatccatctatttattgacagccttctaaacgaagagaatccatccaaagcctaccggtgtagcagcaaagaagccttcgaaaaggggctgtgtttgagctgccgaaagaaccggtgcaataatcttggatacgagattaacaaagtgagagccaagcgatcctctaaaatgtacctcaagacccgcagtcaaatgccctataaagtgtttcactaccaggtgaagattcatttctccggcacggaatcagaaacccacacaaaccaggcattcgaaatcagcctctacgggacagtcgctgagagtgagaatattcctttcactttgccagaagtgagcacaaataagacatacagcttcttaatctatacagaagtagatattggagagctcttgatgctgaagctgaaatggaagagcgatagctatttcagctggagcgactggtggtcctctccgggtttcgctatacagaagattcgcgtaaaagccggggagacacagaagaaggtaattttctgcagcagggaaaaggtttctcacctgcagaaagggaaggccccagccgtatttgttaaatgtcatgataaatcattgaataagaaatcagga

SEQ ID NO: 5121 - DNA, 1425 bp, Artificial Sequence
  derived and/or modified sequence
atggagagtaaagctctcttggtcctgactctcgcagtatggctgcaaagccttacagcctccagggggggggtggctgctgccgatcaacgcagagactttattgacatagaatccaaatttgcgcttagaacacccgaggacaccgccgaggacacctgccatttgattccaggcgtggcagaaagtgtagctacctgccatttcaaccatagctcaaaaacttttatggttattcacgggtggactgttactggcatgtacgaatcttgggtccctaaacttgtggccgcactgtacaagcgtgagcccgacagtaacgtgattgtggtggattggctgtcccgagcccaggagcactatcctgtgtctgccgggtatactaagctcgttgggcaagacgtcgcacgcttcatcaattggatggaggaggaatttaactatcccctggataacgtgcacttgctgggctatagcttgggcgcacatgcggcaggcatcgccggatctctgacaaacaagaaagtaaacagaattacgggactcgacccggctggccccaacttcgagtacgccgaggcgccttcccggttaagccccgacgacgctgactttgtcgacgtgttgcatacattcactagggggtctcctggacgaagtattggaatccagaagcctgtgggacacgtcgacatctatccaaatgggggtacgttccagccaggatgtaacattggtgaggcaatccgtgtcatcgccgaaagggggctgggagatgtcgaccagttggtgaaatgctctcacgaacgcagcattcacctcttcattgacagcctgcttaatgaagagaacccatctaaagcgtatcggtgtagttcaaaggaagcgtttgaaaaaggactctgcttatcttgccgcaaaaacagatgcaataacctgggctacgagattaataaggttcgggcaaaacggtctagcaagatgtaccttaaaactagatcccagatgccctataaggtctttcactaccaggtcaaaatccacttttctgggacagaaagtgagacgcatactaatcaggcattcgagatctctctgtacggtaccgttgccgaatccgaaaacattccattcacactaccagaggtcagcacaaacaagacctactccttcctgatttacactgaagttgatattggcgagctactcatgctaaagctaaaatggaaaagtgactcatactttagttggtccgactggtggtctagccctggcttcgccatccagaagattcgcgtgaaagctggtgagacgcagaagaaggtaatcttttgctcaagggagaaagtgtctcacctacaaaaaggcaaggcccctgccgtcttcgttaaatgtcacgacaagagcttgaacaaaaaatccggc

SEQ ID NO: 5122 - DNA, 1425 bp, Artificial Sequence
  derived and/or modified sequence
atggagtctaaagcattgttggtgttgactctggccgtgtggttgcagagtctgacagcatcccgcggtggagtcgctgctgctgaccaaagacgtgacttcatcgatatagagagtaaatttgctctgcgtacccccgaggacactgccgaagacacatgccatttgattcctggtgttgctgaatctgtcgctacatgccacttcaatcattcctccaagacctttatggtcattcacggatggaccgtgaccggcatgtacgagtcttgggttcctaaactggtcgctgccctttacaagcgtgaacctgactctaatgtgatcgtggttgactggctgagtagagcacaagaacactaccccgtatccgccggatataccaagctggtcggacaagacgtagcccgcttcatcaattggatggaggaggagttcaactaccctctggacaatgttcaccttctgggctattcacttggagctcacgcagctggaattgccggatctctgaccaacaagaaggtgaataggattacaggcctggatcccgccggtcccaactttgagtatgctgaggctccctctcgcctgagtcctgacgatgctgattttgtagacgtcctgcacacctttactcgtggatctcccggcagaagtattggaatccagaaaccagtaggccacgtggacatctaccctaatggcggtacttttcaacccggttgtaacatcggagaggccattcgtgtcatcgctgagcgcggacttggagatgtcgaccagcttgtaaagtgtagtcacgagaggtctatccatctgttcattgatagtctgctgaatgaagagaacccttctaaggcttataggtgctccagcaaagaagctttcgagaaaggtctgtgtctgtcatgtagaaaaaacagatgtaacaacctcggatatgagattaacaaggtgcgcgctaagcgttcctccaagatgtatctgaaaacaaggtcacagatgccttacaaggtcttccactaccaggtaaaaatccacttctctggaactgaatcagaaacccacaccaaccaggcattcgagatttccctctatggcactgtggccgagtccgaaaacatcccatttacattgcccgaggtctccactaacaagacctattcattcctgatttatactgaagtcgatatcggagagctgttgatgctcaaactcaagtggaagtccgacagctacttcagctggagtgattggtggtcatcccccggatttgctattcagaagattcgcgtaaaagccggagagactcagaagaaagtgatcttctgcagcagggagaaggtctcacaccttcagaagggaaaggccccagccgtctttgtcaagtgtcatgacaagagtctgaataagaagagtggt

SEQ ID NO: 5123 - DNA, 1425 bp, Artificial Sequence
  derived and/or modified sequence
atggagtcaaaggccttgttggtgttgactctggcagtgtggttgcaatccctgacggcaagcagaggcggagtcgccgcagcagatcaaagacgtgatttcatcgacattgagtccaagtttgcactcagaacccccgaggataccgcagaagatacctgtcacctgatccccggagtggctgaaagcgtcgcaacttgccatttcaatcattcgtccaaaacttttatggtgatccatgggtggaccgtgacggggatgtacgaatcctgggtgccgaagctggtggcagctttgtacaaacgggagcctgattcgaacgtcatcgtggtggattggctcagccgcgcgcaagaacattacccagtgtcagccggttacactaagctcgtcggacaggacgtagccagatttatcaactggatggaagaagagttcaactaccccctggataatgttcatctcctgggatactccctgggagcccatgcagcaggaattgcaggttccctgactaacaagaaggtgaacaggattaccggtctggatcctgcaggtcctaactttgaatacgccgaggcaccttcgcggctcagcccagacgacgccgattttgttgatgtccttcacacgttcaccagaggatcgccaggaagaagcatcggcattcaaaagcctgtcgggcatgtggacatctatcctaacggcgggacttttcaaccaggatgtaacattggggaagccattcgagtgattgcggaaagaggcctgggggatgtcgatcagctggtgaaatgctcacacgaacggtccatccacctcttcatcgattcgctgctgaacgaagaaaatccctctaaggcataccgatgttcaagcaaggaagcattcgaaaagggtctttgtctgtcatgtcggaaaaaccggtgtaacaatctgggctacgagattaacaaggtcagagccaagagatccagcaagatgtacctcaaaactcgttcgcagatgccttacaaagtgtttcactaccaggtcaagatacacttttccggcaccgaatcggagactcacacgaatcaagcatttgaaatctctctgtatggaaccgtggcagaatccgagaatatcccgtttaccttgcctgaagtgtcaaccaacaagacgtacagcttcctgatttacaccgaagtggatattggagaacttcttatgctcaaactcaaatggaaatcagattcctacttctcgtggtcagactggtggagctcacctgggttcgcaatccaaaagattagggtgaaggctggagagactcagaagaaggtgatcttttgtagcagagaaaaggtgtctcatctgcagaagggaaaggcacctgcagtgtttgtgaaatgtcatgacaagtccctgaacaaaaagagcgga

SEQ ID NO: 5124 - DNA, 1425 bp, Artificial Sequence
  derived and/or modified sequence
atggaatctaaggctctgttggtcctaacactcgccgtatggctgcagtctcttactgcgtccagggggggtgtggccgccgccgaccagaggcgcgatttcattgacatagagtctaagttcgctctgcgaactcctgaagacacggctgaagatacatgtcatctgatccccggagtggctgagtcagtggccacctgtcacttcaatcactcctcaaaaacttttatggtaatccatgggtggacagtgaccggtatgtatgagagctgggtccctaagctggtcgccgccctgtataagcgcgaacccgatagcaatgtcatcgtcgttgactggttgagcagggcgcaggaacactatcctgtgtccgcaggctataccaagctggtaggtcaggacgtcgcaagatttatcaattggatggaagaggagttcaattaccctttggacaacgtgcacctattaggctactcactcggcgcccacgctgccggaatcgcaggtagtctgaccaataaaaaagtaaataggattactggcctcgatcccgctggcccgaacttcgagtacgccgaagccccttcccgcctctcaccagacgacgcagattttgtcgacgtgctacatacttttacaagaggatccccagggagaagcattggaatccagaagccagttggtcacgttgatatttacccaaacggcggcaccttccagcctggctgcaatattggtgaggctatcagggtgatcgcagaaagaggcctgggagatgtcgaccagttggtgaagtgtagtcacgagcgctcgatccacctgttcatcgacagtctactgaatgaggagaacccatccaaagcttaccgatgctcgtcaaaagaggcttttgaaaaaggtctctgccttagctgcagaaagaaccgctgcaataacctcggatacgagattaataaggtgcgcgccaaacgctctagtaagatgtatctgaagaccaggtcccagatgccttacaaggtgttccattaccaggtcaagatccatttctctggtaccgagtccgagacccataccaatcaggcattcgaaataagcctctacggcacagtggccgagtctgaaaacattcccttcaccctcccagaggtgtcaacaaacaaaacatactctttcctcatatacaccgaagtagacatcggcgaacttttaatgttaaaactaaaatggaagagtgattcctacttttcctggtctgattggtggagttcaccaggcttcgccatccagaaaattcgcgtaaaagcaggcgagacccaaaaaaaggtcattttttgcagtcgcgagaaagtcagccaccttcaaaagggaaaggcccccgccgtgtttgtgaaatgtcacgacaagtcactcaacaagaaaagcggc

SEQ ID NO: 5125 - DNA, 1425 bp, Artificial Sequence
  derived and/or modified sequence
atggagagtaaggcccttcttgttttgacactggccgtttggctacaatcgctgacggcgtcccgcggtggagtggcggcggcggatcagcgcagggatttcatcgatattgaaagcaaattcgctctccgcacccctgaagacactgcggaggatacgtgtcatctcatccctggagtcgccgagtccgtggcgacctgtcactttaaccatagcagtaaaacgttcatggttatccatgggtggaccgttacgggtatgtacgagagctgggtgcccaagttggtagcagcgctgtataaacgggagcctgactccaatgttatcgttgttgattggttgagcagggcgcaggaacattatcccgttagcgccggttacacgaagttggtgggacaagacgtcgctagattcataaattggatggaggaggagttcaactatcctcttgataatgtgcacctcctgggttactccctgggtgcacacgcagctggaattgccggcagtctgacaaacaagaaggtcaatcgaattaccgggctcgatccagcaggtcccaactttgagtatgctgaggcaccgtcccggctttctcccgacgacgcagatttcgtggacgtacttcacactttcactcgaggaagccccggaaggtccatagggatacagaagccggtcggacacgtagacatctatccaaacggtggcactttccaacccgggtgcaatatcggcgaggccattcgtgtcattgctgaacgcgggctcggcgatgtagatcagcttgtaaagtgctctcatgagcgaagcattcatttgttcattgactcgttactgaacgaagagaatccgtctaaggcgtatcggtgctcctctaaagaggctttcgagaaaggtttgtgtctttcctgccgaaagaatcgctgcaataacctagggtacgagatcaacaaagtacgagccaaacgctcgtctaagatgtacctgaagactcgttcccagatgccttacaaagttttccactatcaggtcaaaatccatttttcaggcacggagtctgagacccatacaaatcaggctttcgaaatttccctctacgggacggtcgctgaatctgaaaacattcccttcactctaccagaggtctcgacgaataagacgtatagcttcttgatttataccgaagtagatatcggtgagctcttgatgcttaagttgaagtggaagagtgattcctacttctcatggtcggattggtggagttcgccgggattcgctattcaaaagatccgggtgaaggcgggcgagacccagaagaaggtgatattttgctcccgagagaaggtctcgcacctccagaaggggaaagccccagccgtgttcgtgaaatgccacgataaaagccttaataagaaatccggc

SEQ ID NO: 5126 - DNA, 1425 bp, Artificial Sequence
  derived and/or modified sequence
atggaatcgaaagcccttctcgtgcttactctcgcagtctggctgcaatcgcttaccgcttccagagggggtgtggcagcagccgatcagcgaagagatttcatagatattgagtcaaagtttgccctgaggaccccagaggatacggctgaagatacttgtcaccttatcccgggagtggctgaatccgtggcaacttgtcactttaatcatagctccaagacctttatggtgatccacggctggaccgtgaccggtatgtatgagagctgggtgccaaaacttgtcgccgcattgtacaagagggagcctgactcgaatgtcattgtcgtggattggctttcacgggcacaagaacactaccctgtgagtgcaggttacactaagttggtcggccaggatgtcgcacgattcattaactggatggaggaagagtttaactaccctctcgataacgttcatctgctggggtactctcttggtgcgcacgcggcaggaatcgccggaagccttactaacaaaaaggtcaatcgcattaccggactggatccagcgggacctaatttcgagtacgcagaggccccatcccgcctttcccccgacgacgcagattttgtcgatgtcctgcacacttttactcgagggtcgccagggcgttccatcggaatacaaaagcccgtcggacatgtggacatatacccaaacggtggaaccttccaacccggttgcaacattggagaagctatccgcgtgattgctgagcggggtctgggtgatgtcgaccagcttgtgaagtgctcgcatgaaaggagcattcatctgtttattgactccctccttaacgaagaaaatccctcaaaggcttatagatgtagctcgaaggaggcattcgaaaagggtttgtgcctctcgtgccggaaaaaccggtgcaataatctgggatacgaaatcaacaaagtgagagcaaagaggtcctccaagatgtatcttaagactcgctcccaaatgccatacaaagtgtttcactaccaagttaagatccatttttccggtactgaatctgagactcacaccaaccaagcatttgagatttcgctctacgggactgtcgcagagagcgaaaacattccatttaccctccccgaagtctctaccaacaagacgtactcattcttgatatacacggaagtggatattggggagttgcttatgctcaagttgaagtggaagtcggactcttacttcagctggtcagactggtggtcatcgccgggttttgcaattcaaaagatccgggtgaaggcaggggaaacccaaaagaaggtcatattctgtagccgggaaaaggtgagccatctccaaaagggaaaggcgcccgccgtgtttgtcaagtgtcatgacaaatccctcaacaaaaagtccggg

SEQ ID NO: 5127 - DNA, 1425 bp, Artificial Sequence
  derived and/or modified sequence
atggagagcaaggccctgctggtcctcacgctggcagtatggctccagtcacttaccgcctcacggggtggagtggctgccgcagatcagcgccgagacttcatagatatagagtcaaagttcgcacttcggaccccggaggatactgctgaggatacctgccacttgatcccaggggtggcggagtccgtcgccacatgccattttaaccattctagcaagacgtttatggtgatccacggttggacagttacagggatgtacgagagctgggtgcccaagctggtggcagcactgtacaagcgcgagccagacagtaatgtaatcgtggtggactggctcagtcgtgcccaggaacattaccctgtgtcggcgggttacactaaattggtggggcaggacgtcgcgagattcatcaactggatggaagaggagttcaactacccccttgataatgtacatttactgggctattccctgggcgctcatgccgccgggatcgccggtagcctcaccaacaagaaggtgaatcggataaccggcctcgaccccgctggtcccaacttcgagtacgctgaggccccttcacgactgtcccccgacgacgccgactttgtcgacgtactccacacgttcactaggggctcccccggaagaagcatagggattcagaaacccgtggggcacgttgacatctatcccaacggaggaacctttcagccgggatgtaacatcggggaagccatacgggtgattgcagaacggggcttgggggacgtcgaccaactggtgaagtgcagccatgagcgcagtatccatctctttattgactcactcttgaacgaggaaaacccgtcgaaggcttatcgttgttcctccaaagaagcttttgagaagggactgtgtctctcctgccggaagaatcggtgtaataacctgggctatgaaattaataaggtgcgggcaaagaggagctccaagatgtaccttaagacacgatctcagatgccttacaaggtcttccactaccaggtgaagattcacttcagtggtactgagtcggagacccacacgaatcaggccttcgagattagtttatatgggacagtcgccgagtctgagaatattccgtttaccctgcctgaagtgtccactaacaagacatactccttcctgatatacacagaggtcgacataggggagttattgatgctgaagctaaagtggaaatccgacagctatttttcttggagcgattggtggtccagtcctggcttcgcaatccagaaaatccgcgtgaaggctggggagacccaaaagaaggtcattttttgcagcagagagaaagtgagccacttacagaaaggcaaggcgcccgccgttttcgtgaaatgtcacgataagagtctcaataagaagagcggc

SEQ ID NO: 5128 - DNA, 1425 bp, Artificial Sequence
  derived and/or modified sequence
atggagtccaaggcgctgctggtgctgacgctcgcagtctggttgcaatcgctgaccgcttcccgcgggggcgtggctgcagctgaccaacgcagagatttcatcgatattgaatcaaagttcgccctcagaaccccggaggataccgccgaggacacttgtcaccttatccctggagtggcagagagcgtggcaacgtgtcacttcaaccactcgtcaaagaccttcatggttatccacggatggactgtgactggaatgtacgaatcctgggtgccaaaacttgtggccgctctctacaagagagagcctgactccaacgtgatcgttgtggactggctgtcaagggctcaagaacattacccggtcagcgctgggtacactaagctggtcggccaagacgtggccagattcatcaattggatggaagaggaattcaactacccgctggataacgtgcatctcctcggatactcgctgggtgctcatgctgccggaatcgcgggatcgctgactaacaagaaagtgaaccggataaccggccttgacccggcgggaccgaattttgaatatgctgaagctccaagcaggctgtcaccggacgatgcggactttgttgacgtgctgcacacttttaccagaggatcgccaggccggtcaattggcatccagaagccggtgggacacgtcgacatctacccgaatggaggaactttccagcccggatgtaatatcggagaagccatccgcgtcatcgcggagcgcggcctcggcgatgttgaccagctcgtgaagtgctcgcatgaaaggtctatccacctgttcatcgatagcctgctgaatgaggagaatccttcaaaggcatacagatgctcgtcaaaagaggctttcgagaaagggttgtgcttgtcctgccggaagaaccggtgcaacaacctgggttacgaaatcaataaggtccgggccaaacggagctccaagatgtatctgaaaaccagatcacagatgccgtacaaggtgtttcactaccaagtgaagatccatttctccggaactgaaagcgaaacccacactaatcaggcattcgagatctcactctacgggactgtcgccgaatccgagaacatcccattcactctccctgaagtgtcgactaacaagacttactcattcctgatctacactgaagtggatatcggcgagctgctgatgctgaaattgaagtggaagtcggactcgtacttcagctggtccgactggtggtcctctccgggctttgccattcaaaagatcagagtcaaagcaggtgaaacgcagaaaaaagtcattttctgctcccgggaaaaggtttcccatctgcagaaggggaaggcgcccgcagtgttcgtgaagtgccacgacaagtcgcttaacaagaagtcagga

SEQ ID NO: 5129 - DNA, 1425 bp, Artificial Sequence
  derived and/or modified sequence
atggaatcgaaagcgttactagtattaacgttagcggtatggctacaatcgctaacggcgtcgcgtggtggtgtagcggcggcggatcaacgtcgtgattttatagatatagaatcgaaatttgcgctacgaacgccggaagatacggcggaagatacgtgtcatttaataccgggtgttgcggaatcggttgcgacgtgtcattttaatcattcgtcgaaaacgtttatggtaatacatggttggacggttacgggtatgtatgaatcgtgggttccgaaattagttgcggcgttatataaacgtgaaccggattcgaatgttatagtagtagattggttatcgcgtgcgcaagaacattatccggtttcggcgggttatacgaaattagtaggtcaagatgttgcgcgatttataaattggatggaagaagaatttaattatccgctagataatgtacatctattaggttattcgctaggtgcgcatgcggcgggtatagcgggttcgttaacgaataaaaaagttaatcgtataacgggtttagatccggcgggtccgaattttgaatatgcggaagcgccgtcgcgtttatcgccggatgatgcggattttgttgatgttctacatacgtttacgcgtggttcgccgggtcgatcgataggtatacaaaaaccggtaggtcatgtagatatatatccgaatggtggtacgtttcaaccgggttgtaatataggtgaagcgatacgtgtaatagcggaacgtggtttaggtgatgttgatcaactagttaaatgttcgcatgaacgttcgatacatctatttatagattcgttactaaatgaagaaaatccgtcgaaagcgtatcgatgttcgtcgaaagaagcgtttgaaaaaggtttatgtctatcgtgtcgtaaaaatcgatgtaataatctaggttatgaaataaataaagtacgtgcgaaacgatcgtcgaaaatgtatttaaaaacgcgttcgcaaatgccgtataaagtttttcattatcaagtaaaaatacatttttcgggtacggaatcggaaacgcatacgaatcaagcgtttgaaatatcgctatatggtacggtagcggaatcggaaaatataccgtttacgttaccggaagtatcgacgaataaaacgtattcgtttttaatatatacggaagttgatataggtgaattattaatgttaaaactaaaatggaaatcggattcgtatttttcgtggtcggattggtggtcgtcgccgggttttgcgatacaaaaaatacgtgtaaaagcgggtgaaacgcaaaaaaaagttatattttgttcgcgtgaaaaagtttcgcatttacaaaaaggtaaagcgccggcggtttttgtaaaatgtcatgataaatcgctaaataaaaaatcgggt

SEQ ID NO: 5130 - DNA, 1425 bp, Artificial Sequence
  derived and/or modified sequence
atggaatccaaagccctgctggtgctgactcttgcagtgtggcttcaaagcctgaccgcatcccgaggtggtgtggcagccgccgaccaaaggagagactttatagatattgaaagtaagtttgcgctccggaccccagaggacactgccgaagatacttgccatcttatacctggggtcgcggaatcagtggcaacctgtcacttcaatcactcatcgaaaacctttatggtgatccatggttggaccgtgaccggcatgtacgagtcctgggtgcctaagctggtggctgcattgtacaaaagagagccagactcgaatgtcattgtggtggattggctttcgagagcacaggaacattaccctgtctccgccggatacaccaagctggtggggcaagatgtggcacgcttcataaactggatggaagaagaattcaattaccctctggataatgtccacttgcttggttactccctcggggcacatgccgcaggaatcgcaggatcccttacgaacaagaaggtgaataggattaccgggcttgacccagcgggaccgaacttcgagtacgccgaagctcctagtaggttgagcccagacgatgcggatttcgtggacgtccttcataccttcacccgtgggtcccctggccgttcaatcggtatccaaaaacccgtggggcatgtggacatctaccccaacggtggcaccttccaacccggatgtaatatcggagaagctatccgcgtgattgcagaaagaggtcttggggatgtcgaccaacttgtgaagtgttcgcatgaaaggagcattcatcttttcattgatagcctgctcaacgaagaaaacccttcaaaggcataccggtgctcctcaaaggaagcatttgaaaagggactgtgtctctcgtgcagaaagaaccgttgtaacaacctgggatacgaaatcaataaagtccgtgcaaagcgcagcagcaaaatgtacttgaaaacgagatcccagatgccctacaaggtgttccattaccaagtgaaaatccacttctcgggaaccgagtcggagactcatactaatcaggcattcgagatttccctctatggtactgtcgcagaatcggaaaacatccctttcacgcttccggaagtttcgacgaacaaaacctactcgttcctgatttacacggaagtcgacattggtgagctcctcatgctcaaacttaagtggaagtcagatagctacttctcgtggagcgactggtggtcgtctccaggctttgccatccagaaaatacgtgtcaaagcaggcgaaactcagaagaaagtgattttctgtagcagggaaaaagtctcccatttgcagaagggaaaggctccagcagtctttgtcaagtgtcatgataagagcctcaacaagaagtccggc

SEQ ID NO: 5131 - DNA, 1425 bp, Artificial Sequence
  derived and/or modified sequence
atggaatccaaagccctactcgtcctgactctcgccgtttggttacaatccctcactgcctcacgggggggggtggctgccgcagatcagagacgtgactttatagatatcgaatctaaattcgccttgcgaactcctgaggatactgccgaagatacatgtcacttaatacccggagtggccgaatcagtcgccacttgccactttaatcatagtagtaaaacttttatggtcatacatgggtggacagtgacagggatgtatgagagttgggtccccaaacttgtcgcggctctatataaacgcgaacccgatagtaacgtgatcgtcgttgattggctttctcgggctcaggaacactaccctgtctcagcaggatatactaagctcgtgggacaggatgtggcacgctttattaactggatggaagaggagttcaactatccattagacaatgtacaccttcttggatacagtcttggggcacatgcagcaggaatagccgggtctcttactaataaaaaagtcaataggattacagggttagatcccgccggacccaacttcgaatatgctgaagccccctctcggttatctcccgatgatgccgattttgtggatgtgttacatactttcacacggggaagtcctgggagaagtataggaatacagaaaccagtcgggcacgtagatatctatcctaacggaggaactttccagcctgggtgcaatataggagaagctataagggtgatagccgaaagagggttaggggatgtggatcagctggtgaaatgctcacatgaacggtccatccacctttttatcgactccctgctcaatgaggaaaacccctccaaggcatatcgatgttcctccaaagaagcatttgaaaaaggactgtgtctctcttgtcggaaaaataggtgcaataacctgggatacgaaataaacaaagtgcgcgctaaaagatcctccaaaatgtatctgaaaactcgctcacagatgccctataaagtgtttcactaccaggtgaagattcatttctctggaactgaatccgaaacacatacaaatcaagccttcgaaatctccctttatggaactgtggcggagtctgaaaacatccctttcactctccccgaagtttccacaaacaaaacttatagtttcctcatatatacagaggttgatatcggggaactactgatgctaaagctcaagtggaaatctgattcatatttttcatggtcagattggtggtcttctcccgggtttgccatacagaaaatccgggttaaggctggggaaacacagaaaaaagtcatcttttgttctcgggaaaaggtctcacatctccaaaaggggaaagctcctgcagtgtttgtgaagtgccatgacaaaagtctcaacaagaaatcggga

SEQ ID NO: 5132 - DNA, 1425 bp, Artificial Sequence
  derived and/or modified sequence
atggaaagcaaggctctccttgtgctcaccctggccgtttggctccagagccttaccgccagccgcggcggcgtggccgccgcggatcagaggagggatttcatagatatcgaatctaagttcgcgctgagaacccccgaggataccgctgaagacacatgtcacctcatccctggggtcgctgagagcgtggcaacctgccatttcaaccacagcagcaagacatttatggtgatacacggatggacagttaccggtatgtatgagagttgggtccccaagttggtggccgctctttacaaacgcgagcctgactctaacgtgatcgtagtcgattggctgtcaagagcacaggaacattacccagtaagcgctgggtatactaagctcgtgggtcaggatgtggctcgatttataaactggatggaagaagagttcaactaccccttagataatgtgcatcttctggggtactcacttggcgcacacgcggctggtatcgccggatccctcacaaataaaaaagtgaaccgcatcacagggctggaccctgccggaccaaactttgaatacgccgaggccccttctcgcctgtctccagatgatgcagatttcgtggatgtcctgcacacttttacgagaggatccccgggaagaagtatcggcatacagaaaccagttgggcacgtggatatttaccctaacggtggtacctttcagcctgggtgcaacatcggtgaagccattagggttattgctgagagagggctcggtgatgtggaccagttggtgaaatgttcccacgagaggagcatccacctgtttattgacagcctgttgaacgaggaaaaccccagcaaggcctacaggtgttccagtaaagaggcattcgagaagggactttgcctcagctgcagaaaaaaccggtgcaataacctgggttacgaaatcaacaaggtccgagccaagagatctagcaagatgtatctcaaaactcggtcgcagatgccttacaaggtgttccactaccaggtcaagatccactttagcggaacagaaagcgagacccataccaaccaagcttttgaaatctccctctatgggaccgtcgccgaatctgagaatattcctttcaccctgcctgaagtcagtaccaacaagacctattcttttctcatatacacagaggtggacattggcgaactgttgatgctcaaactgaaatggaaatcagacagctattttagctggagtgattggtggtccagcccagggtttgcaatccagaaaattcgtgtgaaggctggagagacccagaaaaaagtcatcttctgttcacgtgaaaaagtaagccatctgcagaaaggaaaagctcccgccgtgttcgtaaagtgtcacgacaaaagcttgaacaaaaaatccggt

SEQ ID NO: 5133 - DNA, 1425 bp, Artificial Sequence
  derived and/or modified sequence
atggagtcgaaggccctgctcgtgctgactctcgcggtttggctccagagcctgaccgcctctagaggtggggtggctgcagccgaccagcgaagggatttcatcgacattgaatctaaatttgcgctgagaacaccggaggataccgctgaggatacttgccacttgataccaggagtggccgagtctgtagcaacatgtcatttcaaccacagtagcaaaaccttcatggtgattcacggctggaccgttactggcatgtacgaatcgtgggtacccaagctggtggcggctttatacaaacgagagccggactcgaacgtgatcgtggtcgattggttgtctagggcgcaggaacattatcctgtgtcggctggctacactaaactcgtaggccaggacgttgcgcggtttatcaattggatggaagaagagtttaactatcccctggataacgtgcacctgcttgggtatagcttgggtgctcatgcagccgggatcgcgggaagtctgacgaacaagaaggtcaaccggattactggacttgaccccgctggaccaaactttgagtacgcagaagcgcccagcaggctgtcccccgatgacgctgactttgtggacgtcctgcacacatttacaaggggcagcccaggacggtcgatcggcatccagaagcccgtaggacatgtcgatatataccctaacggaggaacattccagccgggctgcaatataggcgaagccattcgagtcattgctgagcgcgggctgggcgatgtggatcagctggttaaatgttcacatgagaggtcgatccatctgttcatcgattctctccttaacgaagagaacccatctaaagcataccggtgtagctctaaagaagcttttgaaaagggcctgtgtctgtcctgtcgtaaaaatcgctgcaacaatctcggctacgaaatcaacaaagtgcgtgcaaagcgatcatctaagatgtatctgaagaccagatcacaaatgccctacaaggtgtttcactaccaagttaagatccatttttccggcacagagtccgaaacgcacacaaatcaagcctttgaaatcagtttgtacgggaccgtggcagaatctgagaatattccattcacgctgcctgaagtgtcaaccaataagacttatagtttcctgatctacactgaggtagacataggcgagctattaatgctaaagttgaagtggaagtctgactcttatttttcctggagtgactggtggagctcacccggcttcgccatccaaaaaattcgggtgaaagcgggtgagactcagaagaaagtcattttctgttccagggaaaaggtatcccatcttcagaagggcaaggccccagcggtttttgtgaaatgccacgataagtccttaaataagaagagtgga

SEQ ID NO: 5134 - DNA, 1425 bp, Artificial Sequence
  derived and/or modified sequence
atggaaagtaaggccctactggttttaacactggccgtgtggttacagagtctcactgcttcaagggggggtgtcgccgcagccgaccagcgaagggatttcatcgacattgagagcaaattcgccctgagaacacctgaggacacagcagaagatacatgccacctgatccctggcgtggctgaatcagttgctacatgccattttaaccactcatcaaagacattcatggtcatccacgggtggactgtgacagggatgtatgaaagctgggtccccaagttggttgctgcgctgtacaagcgcgagccagatagcaatgtgatcgtagtagactggctgtcacgagcacaggagcactatcctgtctcagccggttacactaagttggtggggcaagacgtcgcgcgattcattaattggatggaagaagaatttaactatccgcttgacaacgtgcatctgctaggttattctcttggggcacacgctgctgggatcgctggctcactaaccaataagaaagtaaaccgcataactggcctggatccagccgggccaaatttcgagtatgcagaagcgcctagccgtttatccccagatgacgctgacttcgttgatgttttacacaccttcaccagggggagtccagggagaagtatcggtattcagaagcctgtggggcatgtggacatttacccgaacggcgggacctttcagccgggttgtaatattggggaagccataagagtgatcgccgaacgagggctgggcgacgtggatcagctggtaaagtgctcgcacgagcgatcaatccatctgttcatcgatagcctgctgaacgaggagaacccatctaaggcctatcgatgttcatcaaaggaagcttttgagaagggtttatgcctgtcctgtaggaagaatcggtgtaacaacttgggctacgagatcaacaaggtgcgagcgaaaagaagctctaagatgtatctgaagacaagatcccaaatgccttataaggtctttcactaccaagtgaaaatccatttctccgggacagagtctgaaacacacaccaaccaggctttcgagattagcctgtacggcaccgttgccgagagtgaaaacattccctttacattaccagaggtgagtaccaacaagacctacagcttcctgatttatactgaggttgatatcggtgagctcctgatgcttaaactgaagtggaagagcgactcttacttctcttggagtgattggtggtcaagccccggattcgccatccagaagatcagggtaaaggccggtgagacccagaagaaagtgattttctgctctagagaaaaggtgagccacctgcaaaagggtaaagctcctgcagtattcgttaagtgtcacgacaagtctctcaataagaagagcggc

SEQ ID NO: 5135 - DNA, 1425 bp, Artificial Sequence
  derived and/or modified sequence
atggaaagcaaggctctcctggtgctgacccttgcagtctggctccaatcccttaccgcaagcaggggaggtgtggcagcagcggatcaaaggagagatttcatcgacattgagtccaagttcgcacttagaaccccagaagataccgccgaggacacctgccacctgatacctggtgtcgccgagtccgtggccacttgtcatttcaaccattcctcgaaaacttttatggtgatccacggctggaccgtgaccggtatgtacgaaagctgggtcccaaaactggtggcggccctgtacaaaagagaacctgactcgaatgttattgtggtggattggttgtccagagcacaggagcactatcctgtgtcggcaggatacactaagctcgtcggacaagatgtcgcacgattcatcaactggatggaggaagagtttaactacccccttgataacgtgcatctgctgggctactccttgggtgctcatgcagcaggaattgcgggatcgctgacgaacaagaaggtcaacaggattactggtcttgacccagcaggcccaaatttcgaatacgcagaagcaccatcaagactgtcgcctgacgatgcggattttgtcgacgtgcttcacactttcactcgaggctcacctggacggtccattggaatccagaagcctgttggacacgtggacatttacccgaacggtggcacctttcagcctggttgtaacattggggaggcgatcagagtgattgctgaacggggtctgggtgatgtcgaccagctggtgaaatgcagccacgagcgttcgattcacctgttcatcgattcacttcttaacgaagaaaacccgagcaaggcataccggtgttcctccaaggaagcattcgaaaaaggactgtgtctgtcctgtcgaaagaacagatgcaacaacctcgggtacgaaatcaacaaggtgcgggccaagagatcgtcgaagatgtatctcaagaccaggagccaaatgccatacaaggtttttcactaccaagtgaagatacatttttcgggaactgagagcgaaacccacactaaccaggcattcgaaatttcactgtacggcacggtggccgagagcgagaacatccccttcaccctgcctgaagtctccactaataagacgtactcgtttttgatatacaccgaagtggatatcggagaactgcttatgttgaagttgaagtggaagagcgattcgtacttttcttggtcggattggtggagctcccccggatttgcgatccagaaaatacgagtgaaggcaggagaaactcaaaagaaagtcattttctgttcgcgggaaaaggtcagccacctccagaagggtaaggcccccgcagtgtttgtgaagtgtcatgataagagcctgaataagaaatcaggg

SEQ ID NO: 5136 - DNA, 1425 bp, Artificial Sequence
  derived and/or modified sequence
atggagtctaaggcactgctggtcttgacattggcggtctggttacagagtttgactgcttccaggggaggtgtcgccgctgccgaccaacggcgggatttcattgatatagaatctaagtttgcattgagaacaccggaggataccgcagaggacacatgccacctcattccgggcgtagcagagtccgtagccacttgtcacttcaatcactcttctaagacctttatggtaatccacggatggaccgtcactggtatgtacgaatcttgggtgcccaagcttgtcgcagccctgtacaagagagagcccgattctaatgtcatagtggttgactggctgtcaagggctcaggagcactaccccgtgagcgccggatatactaagttagtcgggcaggacgtggcccgcttcatcaattggatggaggaagagtttaattatccgctcgataatgtgcatcttctggggtacagcctaggcgctcatgctgccgggatagccggatcgctcactaacaagaaggtgaataggatcaccggcctggatcctgctggaccaaacttcgagtacgccgaagccccctctagactgtcacccgacgacgctgactttgtggatgttctgcacacattcacacgagggagtcctggtcggagcatcggcatccaaaaacctgtcggccatgtcgatatttaccctaacggcggcaccttccagcctggatgtaacataggagaagctattcgtgtgatcgccgagcgggggctaggagacgtggatcagcttgtgaagtgttcccacgagcgttcaatccatcttttcattgatagcctactcaacgaggagaatccatctaaggcataccgctgttcttccaaggaggcattcgagaagggcctgtgtctcagttgcaggaagaatcggtgcaacaatctgggatatgagatcaataaggtgagggcgaaaaggtcaagtaagatgtacctcaagactaggagtcaaatgccctataaggtgtttcactaccaggtgaaaattcacttctctggaacagaaagcgaaactcataccaaccaagccttcgagatttcactgtatggcaccgtagcagagagtgagaacatcccattcaccctgcccgaagtgagcactaataagacgtactcattccttatctacaccgaggttgatataggagagttgcttatgctcaagctgaaatggaaatctgatagctattttagttggtccgattggtggtcaagtccgggcttcgctattcagaagattcgcgtcaaagcaggtgagacacagaaaaaggtgatcttctgctcacgcgaaaaagtttcccatctgcaaaaaggcaaagctccagcggtgtttgtcaagtgccacgacaagtcacttaataagaagagcgga

SEQ ID NO: 5137 - DNA, 1425 bp, Artificial Sequence
  derived and/or modified sequence
atggaatcaaaggcactactggtcttgactcttgcagtgtggctgcagagtctgacggcctctcgcggaggagtggcagccgccgaccaaaggcgcgatttcatcgatatcgagtcaaaatttgctttgagaacccccgaggataccgctgaagacacatgtcacttaatcccaggtgttgctgaaagcgttgctacatgtcattttaatcactccagtaagacattcatggtcatacatggatggaccgtcacggggatgtacgaatcttgggttcccaaactcgttgcagctctgtataagcgcgagccagactccaacgtgattgtggttgactggttatcaagggcgcaagagcactaccccgtgagcgcagggtacacaaagcttgtggggcaggatgttgcacggtttatcaactggatggaggaggagtttaactatccccttgataatgtgcacttgctgggttactcactgggagcacatgccgcaggcattgccggctccttgactaataaaaaagttaatcgcattaccggcttggacccagccggtcccaactttgaatacgccgaggccccatcacggttgtctcctgatgatgcggacttcgtggatgttctccacacattcacccgcggtagtcccggccggtctataggcatccagaaaccagtcggccatgtcgatatataccccaatggggggactttccagcccggctgtaatattggagaagcaattcgcgtcattgccgagagaggattaggcgatgtggaccaattggtgaaatgctcccacgaacggagcatccacttgttcatagattcactgctcaatgaggagaatccatctaaagcctacagatgtagcagtaaggaagccttcgagaaggggttatgtctgagttgccgtaagaacaggtgtaataaccttgggtacgagatcaataaggttagagccaagaggtcctcaaagatgtacttgaagaccaggtctcagatgccctacaaggtttttcactatcaggtgaagatccatttcagcggaaccgagagcgagacccatacgaatcaggccttcgagatctccctgtacggaactgtcgcggagtccgaaaacatcccctttacactgcctgaagtctccactaataagacctatagctttctgatttatacggaagtggacatcggtgagctcttaatgttgaagctgaagtggaaatccgattcttacttcagttggtccgactggtggagctctcctggatttgctattcaaaagatacgggtgaaggccggcgaaacccaaaaaaaggttattttttgtagcagagaaaaagtaagtcatctgcagaagggcaaggcacctgcagttttcgtaaagtgccacgacaaatccttgaataagaaatcaggc

SEQ ID NO: 5138 - DNA, 1425 bp, Artificial Sequence
  derived and/or modified sequence
atggaatcgaaagcattgctcgttcttaccttggcagtgtggctccaatcccttactgcgagcagagggggcgtggccgccgccgaccagcggagagatttcattgacatagaatccaagtttgctttgaggaccccagaagataccgccgaggacacctgccatctgatacccggagtggcagaatcagtcgcaacctgccactttaatcattcttcaaagactttcatggttatccatggatggactgtcaccggtatgtacgaatcctgggtgcccaaactcgtggcagcactttacaaacgcgaacctgactccaatgtcattgtggtggactggctgtcacgggcgcaggaacattaccctgtgtccgcaggttataccaagttggtaggccaagacgtcgcccggtttatcaactggatggaagaagagttcaattatccacttgataacgtgcacctgctgggatactcccttggcgcccacgctgcaggaatcgcaggcagcctgaccaacaagaaggtcaaccgaataactggactggaccctgcaggaccaaactttgaatacgccgaagcacccagccgactttctccagatgatgcggattttgtggatgtgcttcatactttcacccgagggagccctggccgctcgattgggatccaaaagccagtcggtcatgtggacatttacccgaatggagggacttttcagcccggatgcaacatcggggaagcaatccgggtgattgccgaacggggtcttggagatgtggatcaacttgtgaaatgctcgcatgagagatccattcatttgtttatcgactcactgcttaacgaagaaaatccgtccaaggcgtatagatgtagctccaaggaggccttcgagaaaggtctttgtctgtcctgccggaagaataggtgtaacaacctgggctacgagattaacaaagtgcgggctaagcggtcctcgaagatgtaccttaaaacccgctctcagatgccctacaaggtgtttcattaccaggtgaagattcatttttctggcacggaaagcgagactcacaccaaccaagccttcgaaatttcactttacgggactgttgcagagtcagaaaacatcccgtttactcttcctgaagtctcaaccaacaaaacttactcctttttgatttacaccgaagtcgacatcggtgagctcctgatgcttaagctgaaatggaagtcagattcatacttcagctggtcggattggtggtcctccccaggttttgcaatacagaagatcagggtgaaggcaggggaaacgcagaaaaaggtgatcttctgttcgcgagaaaaggtgtcgcatctgcaaaaaggcaaggcccctgcagttttcgtgaaatgtcacgataagtcgcttaacaaaaagagcggt

SEQ ID NO: 5139 - DNA, 1425 bp, Artificial Sequence
  derived and/or modified sequence
atggagagcaaagcccttcttgttctgaccctcgccgtgtggctccagtctctgaccgccagtcggggaggagtggcagctgccgaccagcgcagggattttatagatattgagtccaaattcgcattgcgaactcccgaggataccgcggaagacacttgtcacctcatccccggcgttgccgaaagcgtagccacctgtcactttaaccactcctcaaagaccttcatggtaattcatggctggacggtcaccggcatgtacgagtcttgggtgccgaagctggttgctgctctgtacaagagagaacccgatagtaacgtcatcgtggtggattggctgtccagagcccaggaacattatccggtcagcgcaggatataccaagttggttggtcaagacgtggccagatttataaactggatggaagaagagtttaattatcctctcgacaacgtacaccttttgggatactctctgggagcccatgccgccggtatcgccggctccctcacaaacaaaaaagttaacaggattactggcttggaccctgcgggacccaacttcgaatatgccgaggcgcccagcaggcttagtcccgacgacgctgacttcgttgatgtcctccatacctttacaaggggaagtcctgggcggtccatcggtatacagaaacctgtggggcatgttgacatctatcctaatggcggcacctttcagccaggatgcaacattggtgaggccatacgggtaatcgccgaaaggggcttgggagacgtggatcagctcgtaaagtgctcacacgagcgcagcatccacctattcatagactccctgttaaatgaagagaatccgtcaaaggcatataggtgctcgagtaaggaggctttcgagaaaggactttgcttgagttgtcggaagaatcggtgtaacaacctaggatatgaaattaataaagtgagggccaaacgcagcagtaaaatgtatctgaagacacggagccaaatgccatataaggtgtttcattatcaggtcaaaattcacttttccggcaccgaatcggagacgcatactaatcaggcctttgaaatctccctgtacgggaccgtggcagaaagcgaaaatataccatttactttacctgaggtcagcactaacaagacctactcctttttgatctataccgaagtggatattggcgaactccttatgcttaagctcaagtggaagtccgactcctatttctcctggtctgactggtggagctcccccggattcgccatccagaaaatcagggtgaaagctggagagacgcagaagaaagttatattctgctcccgggagaaagtctctcacctgcagaagggtaaggctcctgctgtgttcgtgaaatgtcacgacaagtctctaaataagaaaagcggg

SEQ ID NO: 5140 - DNA, 1425 bp, Artificial Sequence
  derived and/or modified sequence
atggaatccaaagcactcctggtgctcactctcgcggtctggctgcaatcgcttaccgcttcgagaggaggggtggctgccgcagatcagagacgggatttcatagacatagaatcgaagttcgcacttagaacgccagaagataccgcagaagatacctgccacctgattccaggcgtcgcggagagcgtggcaacttgtcatttcaaccattcgagcaagacctttatggtgatccatggttggaccgtcaccggaatgtatgagagctgggtgcccaaacttgtggccgcactgtacaagcgcgaacctgacagcaatgtgatagtggtggactggctttcaagagcacaggaacattacccagtatcagctggatacactaagttggttggacaagatgtggcccgctttatcaactggatggaagaggagtttaactaccctcttgataatgtgcatctgctcggatactctcttggtgcacacgctgcgggcatcgcaggctccctgacgaacaagaaggtgaacagaatcactgggcttgaccccgcagggccaaatttcgagtacgcagaagctccatcaaggctcagcccggacgatgctgacttcgtggacgtgctccatacgtttactaggggttcgccaggaaggagcatcggcattcaaaaaccagtcggacacgtcgacatttaccccaacggaggcacttttcaacctggatgtaacattggggaagccattagagtcatcgctgaaagaggactcggcgatgtggatcagcttgtgaagtgtagccatgaaaggtcaattcacctcttcattgactcccttctcaacgaggaaaatccctccaaggcctacagatgctcatccaaggaggcctttgagaagggcctttgcctgtcatgtcgcaagaaccgttgcaacaaccttgggtacgagatcaacaaggtgcgggccaagcggtcctccaagatgtacctcaaaacccgatctcaaatgccttacaaggtctttcattaccaggttaagattcactttagcggaaccgagagtgaaacgcataccaatcaggcttttgaaataagcctttacggaactgtggcagagtcggagaacattcctttcactctgcctgaagtgtccaccaacaaaacctattccttcctcatctataccgaagtggatattggagaacttctgatgttgaagctcaagtggaagtcggactcatactttagctggagcgattggtggtcatccccggggttcgcaattcagaagattagggtgaaagccggcgaaacccaaaagaaggtcattttctgctcacgggaaaaggtgtcccacctccaaaaagggaaagctccagccgtgtttgtgaagtgtcatgataagtcgctgaataagaagtcaggg

SEQ ID NO: 5141 - DNA, 1425 bp, Artificial Sequence
  derived and/or modified sequence
atggaatcgaaggcacttctggtactgacccttgctgtgtggcttcagtccctgactgcctcccgtgggggagtcgcagcagcagatcaaagacgcgactttatcgatattgaatcgaagtttgcactccggacccctgaggacactgccgaggatacgtgccatctgattccaggagtcgccgaatcggttgccacctgtcatttcaaccattcctccaaaacctttatggtgatccacgggtggacggtgactggtatgtacgagtcctgggtgccgaagctcgtcgcagcactttacaagcgggaaccagactccaatgtgattgtggttgattggctgtcgagagcacaagaacattacccagtgagcgccggatataccaagttggtgggccaggatgtggcgcgtttcattaactggatggaggaagagtttaactacccactcgataatgttcacttgctcgggtactcgctgggcgcacacgcggcaggtatcgcgggttcactgactaacaagaaggtgaacagaattaccggccttgatccagccggtcctaacttcgagtacgccgaggcgccttcacgactttcgccagacgatgcagactttgtcgatgtccttcatacttttacgagaggaagccctgggcgatcaatcggtatccagaagcctgtaggacatgtcgacatataccctaatggaggtacgttccaaccaggatgtaatatcggtgaagcaatccgggtgatcgcagaacgtggtcttggagatgtggaccaactcgtgaagtgttcccacgagcgctcgatacatttgtttatagactccttgcttaatgaagagaatccttccaaggcatatcgttgctcctccaaggaagcatttgaaaaaggactctgtctttcgtgtagaaaaaacagatgtaataacctcggctacgagattaacaaagtcagggccaagagatcgagcaagatgtacctcaagacccgctcgcagatgccttacaaggtttttcattaccaggtcaagattcacttcagtggtactgaatcagaaacccacaccaaccaagcgttcgaaatttccctgtacggcactgtcgcagaaagcgaaaacattccatttacgctgcctgaggtgagcactaacaaaacttactccttcctgatttacaccgaggtcgatattggcgaactcctgatgttgaagctcaagtggaagagcgatagctacttttcctggagcgactggtggtcgtcacctgggtttgcaatccagaagatacgtgtgaaggccggggaaacccagaagaaagttatcttctgttcgagggaaaaagtgtcgcacctgcagaaaggcaaagcaccggcggtctttgtgaaatgccatgataagtcgctgaacaagaagagcggc

SEQ ID NO: 5142 - DNA, 1425 bp, Artificial Sequence
  derived and/or modified sequence
atggagagcaaagcccttctcgtgttgaccttggcggtgtggttgcagtccctcactgcctcccggggaggagtcgcggcagcagatcaacgtcgcgactttatagatatagaatcaaagttcgcactgcgtactcccgaggacaccgctgaggacacttgtcatcttattccaggagtggcggagtccgtggcaacttgtcatttcaatcattcgagcaagacttttatggttatccatggttggaccgtaaccggtatgtacgaatcatgggtccctaagctggtggcagctctgtacaagagagaacccgacagcaatgtaattgtagtggattggttgtcccgagcacaagaacactaccctgtttcggccggatacaccaaactggtgggtcaagatgtggcacggtttatcaattggatggaagaggagttcaactacccactcgacaacgttcatcttctgggatattctctgggagcacatgcagccggaatagcggggtcgctgaccaacaaaaaggtgaaccggattactggcctcgacccagccggtccaaatttcgaatatgcagaagctcccagccgcttgtcgccggatgatgccgattttgtggacgttctccacacttttaccaggggctcaccaggcagatccattggaattcaaaagccagtggggcatgtggatatctaccctaacgggggcactttccaacctggttgcaatatcggtgaggccatccgggtgatagcagagaggggcctgggggacgtggatcaacttgtcaaatgctcccacgaaagatcgattcacctctttattgatagcctgctgaacgaagaaaacccgtctaaggcatacagatgttcatccaaggaggcatttgagaaggggctttgcctctcctgtaggaagaatcgctgtaacaacctcgggtatgaaatcaataaggtgagagccaagagatcctcgaaaatgtaccttaagacgcgctcgcagatgccttacaaggtgttccactaccaagtcaaaattcatttttccggtaccgaatcggaaacccacaccaaccaggcttttgaaatttccctctacggcactgtcgccgaaagcgaaaacattccttttaccttgccagaagtctcgactaacaagacgtacagctttctgatctataccgaggtcgatatcggagagcttctgatgctgaaacttaaatggaagtcggattcgtactttagctggagcgattggtggtcatcgcctggtttcgcaatccagaaaatacgcgtgaaggcgggagaaacgcagaagaaagtgattttctgttctagggagaaagttagtcacctccagaagggaaaggcaccggccgtgtttgtgaagtgccatgacaagagcctgaacaagaagtcggga

SEQ ID NO: 5143 - DNA, 1425 bp, Artificial Sequence
  derived and/or modified sequence
atggaatcaaaggccctgctcgtgctgacactcgctgtctggctccagtcactgaccgccagcagagggggggttgccgctgccgaccagcgccgcgactttatcgatatcgagtccaaatttgctctcagaacccccgaggacacagctgaagatacctgtcacttaatccctggcgttgctgaaagcgttgctacctgtcacttcaaccacagtagtaagacctttatggtgatacatgggtggaccgttactgggatgtacgagagctgggtgcctaaactagtcgctgctctgtataagcgcgaacctgattcaaacgtgatcgtggtggattggttgtcacgtgcacaggaacactaccctgtgagcgccggctacaccaagctggtcggccaggacgtggcacgattcattaattggatggaggaggagttcaactatcccttagacaatgttcatctactgggatactccttgggtgcacacgctgccggcatagctgggagcctgactaacaagaaggtgaaccggatcaccgggttagaccctgcaggcccaaactttgagtacgctgaggccccatcccgcctgagccctgacgacgccgacttcgtggacgtgttgcatacctttacccgaggatctcccggccgttccattggcatacaaaaaccagtggggcacgtggacatttacccaaacggcggcacctttcagcccggctgcaatattggtgaggccattcgtgttatcgctgagcgtggcttaggcgacgtcgaccagctcgtgaaatgtagccacgaacgaagcatacatctgtttatcgatagtctgctcaatgaagagaatccctccaaagcatatcgttgtagtagcaaagaagcttttgagaagggactgtgtctgagttgccggaagaatcggtgcaacaatctgggttacgagatcaacaaggtgcgagcaaaacgcagttctaagatgtacctgaagacccgttcacagatgccatacaaggtattccactatcaggtgaaaatccactttagcggcaccgagagcgagacacacaccaatcaggctttcgagattagcctgtacggcaccgtagctgaatccgagaacatcccattcacactgccagaggtttcaaccaacaagacctactcatttttgatctacacagaggtagacataggggaactgttgatgctgaagttaaaatggaaatccgatagctacttcagttggtcagactggtggagttccccaggatttgcaatccaaaaaataagagtcaaagcaggcgaaacccagaagaaggtcatcttctgctctcgggagaaagtgagtcaccttcagaaaggcaaagcaccagctgtgttcgtgaaatgccacgacaaatccctaaacaaaaagagtggc

SEQ ID NO: 5144 - DNA, 1425 bp, Artificial Sequence
  derived and/or modified sequence
atggagagtaaggctctgcttgtgcttacattggcggtgtggctccaatcactcactgctagcagaggcggagtggcagccgctgatcagcgccgggactttatcgacatagagtctaaatttgctctccgaacaccagaggacactgccgaggacacttgtcacctgattcccggagtagctgagtctgtggctacttgccacttcaaccatagtagtaagaccttcatggtcatacacggctggaccgttactggaatgtatgagtcttgggtcccaaagctggtcgctgctctatacaaacgcgaacccgatagtaacgtaatcgtcgtcgattggctgagcagggcccaagagcactaccctgtgagtgcaggctataccaagctcgtggggcaggacgtggcccggttcatcaactggatggaagaggaatttaattatccgttagacaatgtgcatttgctaggctattctttgggtgctcatgccgctggcatcgcagggagtttaactaataaaaaggtcaacagaattactgggttggaccccgcaggcccaaattttgagtatgccgaagccccttcccggctaagtcccgatgacgcagatttcgtcgatgtcctgcacacattcacacgcggcagcccaggccggagtatcggaattcaaaagccagtgggacatgttgacatttacccaaacggaggtacttttcaaccagggtgtaacatcggtgaggccattcgggtcattgcagagcggggacttggcgatgtcgatcaactggtgaaatgttcccacgaaaggtctatacacctgttcattgattccttgctgaacgaagagaatcccagcaaggcttatcggtgcagctccaaggaggccttcgagaagggactttgcttgtcttgccggaaaaatcgctgtaataatctcgggtatgaaataaataaagtgagagcaaagaggagctccaagatgtacctgaaaacccgaagccaaatgccttataaggtctttcactaccaggtgaaaattcatttttcgggtacagagagtgagactcacaccaatcaggctttcgagatctctttgtatggaaccgtggccgagtctgagaatatcccttttactctgccagaggtctcaaccaataaaacgtattccttcctgatctatacagaggttgatataggggagctgcttatgttaaaactgaagtggaagtctgattcctacttttcctggtcagattggtggagcagtcccgggtttgccattcagaaaatccgcgttaaagcaggggagacacagaagaaagtgatcttctgttcaagagagaaggtttcccatctccaaaagggcaaggcgcctgccgtgttcgtaaaatgccacgacaagagcctcaataaaaaaagcgga

SEQ ID NO: 5145 - DNA, 1425 bp, Artificial Sequence
  derived and/or modified sequence
atggaatctaaggctctgctagtgcttactctggcagtgtggctacagtctttgacagccagcagaggaggtgtagccgccgcagaccagcggagagactttatcgatatcgaaagcaagtttgcactgcgcacccctgaggacacggcggaagacacctgccaccttattccaggagtagcagaatccgttgcaacttgccattttaaccatagcagcaaaactttcatggtgatacatggctggaccgttacaggcatgtacgaatcctgggtcccaaaattggttgcagcgctgtacaagagagagccagatagcaatgttatcgtagtggactggctctccagggcgcaggaacattaccctgtgtcagcagggtataccaaactagtcgggcaggatgtggccagattcatcaactggatggaagaagagtttaactatcccttggacaatgtccatctgctgggctatagcctgggcgcccacgctgctggcattgccggatccctcacgaataagaaagtcaatagaattaccggtttggatcctgcaggccctaactttgagtacgctgaagccccatcaaggctgtctcccgacgatgctgactttgttgatgtcctgcacacctttactagagggagtccaggccgcagcatcggaatacagaaacctgtggggcacgtggacatttaccctaacggtggtacattccagccaggttgcaatatcggcgaggcaattcgagtaatagctgagcggggcctgggggacgtggatcaactagtcaagtgttcccacgagcgtagcattcacctatttatcgattctcttctgaatgaggaaaacccttcaaaggcatataggtgcagttcaaaggaagccttcgaaaaagggttgtgcctgtcctgccgaaagaaccggtgcaacaacctgggctatgagataaataaggtgagagctaagcggagcagcaagatgtatctgaaaaccaggtcacaaatgccatacaaagtttttcattatcaggtcaaaatacatttcagtgggactgaaagcgagacacacaccaatcaggcctttgagatatctctgtacggcaccgtagccgagtcggaaaacatcccctttactctgcccgaagtcagcaccaataagacctactcttttctcatatacactgaagtggacatcggagagctgctgatgctgaaactgaagtggaaaagcgattcttacttttcctggtctgattggtggtcaagtcctgggttcgccatccagaagatccgcgtgaaggccggggagactcagaagaaagtcattttttgtagcagagagaaggtctctcacctgcagaaagggaaagcccccgcagtcttcgtcaaatgccatgataagagtttgaacaaaaaatccggg

SEQ ID NO: 5146 - DNA, 1425 bp, Artificial Sequence
  derived and/or modified sequence
atggagtccaaggcactgttggtgctgaccctcgccgtgtggctgcagtctctcaccgcaagccggggtggggtggctgccgctgaccaaagaagggacttcattgacatcgaaagcaaatttgccctgcggacgccggaggacaccgccgaagatacttgccacctcatcccgggagtagccgagtccgtcgcgacctgccactttaaccacagctcgaaaactttcatggtgatacatggttggaccgtgaccggcatgtacgaatcatgggtcccgaagctggtcgctgcactgtataagcgcgaaccagactcaaacgtcatcgtggtggattggctgtcgcgggcacaggaacattaccccgtgtcggcgggatacacgaaacttgtcggccaagatgtggcaagattcatcaactggatggaagaagagtttaactacccactcgacaacgtccatctgttgggatacagcctgggcgcgcatgccgcgggaatcgctgggtcactcaccaacaagaaggtcaacagaatcactggcctcgaccccgcgggaccaaacttcgagtatgcggaagctccttcaagactgagcccggatgacgcggattttgtggatgtactgcacactttcactcgaggttcgccgggacggtccatcggaatccagaagcccgtggggcacgtggacatttacccaaatggtggaaccttccagcccgggtgcaatataggcgaggccatcagggtgatcgctgagagagggctgggtgatgtggatcagctggtcaagtgctcgcacgagcggtcgattcacctgttcatcgactcgctgttgaatgaagaaaacccgagcaaggcgtaccgctgttcgtccaaagaggcgtttgaaaagggactctgcctctcgtgtaggaaaaacagatgcaataatctcggatacgagatcaacaaagtgcgggcgaagcgctcatctaagatgtaccttaagacccggtcccagatgccgtacaaagtgttccactaccaagtgaagatccatttttcaggaaccgagagcgaaacccatactaaccaggcttttgagatttccctgtacggaactgtggccgagtcggaaaacatcccattcactttgccggaggttagcactaacaagacctactcgttcttgatctatacggaagtggatatcggggagctgcttatgctcaagctgaaatggaagtccgacagctacttctcctggtcagactggtggagcagcccgggcttcgcgatccaaaagatcagagtcaaagcaggagagactcagaagaaggtgatcttctgtagccgcgagaaggtttcgcatctccagaaaggaaaggctccggcggtgttcgtgaagtgccatgacaagagcctgaacaaaaagtccggt

SEQ ID NO: 5147 - DNA, 1425 bp, Artificial Sequence
  derived and/or modified sequence
atggagagtaaggcactgttggtactgacacttgccgtgtggcttcagtccctgactgccagcaggggaggcgtggctgccgcagatcagaggcgcgacttcattgacatcgaaagcaagttcgccctgcgcacacctgaagacacagccgaggacacatgtcacctgattccgggagtggctgagtctgtggcaacatgtcacttcaatcattcttccaaaacattcatggtgattcacggctggaccgttactggaatgtacgaaagctgggtgcctaagctcgtggccgctctctacaaacgggagccagactccaatgtgatcgtggttgattggctcagccgagcacaggaacactaccctgtcagcgcaggctatacaaagctcgtggggcaagatgtcgctagatttatcaattggatggaggaggaattcaactatcccctcgataacgtccatctcctcggttatagcctgggagcccatgcagccgggattgccgggtcactgaccaacaaaaaggttaaccgcatcactggtctggacccagcaggccccaactttgagtatgccgaggctccatctagactttcaccggacgacgccgacttcgtcgatgtactgcacacctttaccaggggctcccccggaagatccattgggattcagaagcccgtgggacatgtggatatatatccgaatggcggcacattccagccggggtgcaacattggggaagcaattcgggtgatagcagagcgcgggctgggagatgtggatcagctggttaagtgttcccacgaacggtccattcacctgtttattgatagtttgttgaacgaggaaaatccgtcaaaggcatatcgctgttcctcaaaggaagccttcgagaagggtctctgcctgtcatgtaggaaaaacaggtgtaataatctcggctacgagatcaacaaagtgagagctaagaggagtagcaagatgtacctgaaaacccggtcccagatgccctacaaagtgttccactatcaggtgaaaatccattttagcggaaccgagagcgagactcatacaaaccaagccttcgagattagtctctacgggaccgttgctgaaagtgagaacatcccctttactctgcccgaggtgagcacaaacaagacttacagtttccttatctacactgaggtggacatcggcgagctgcttatgctgaagctgaagtggaagagcgacagctatttcagttggagtgattggtggagttcacctggcttcgcgatccagaaaatcagggtcaaggcaggtgagacgcaaaaaaaagttatattctgctctcgagagaaagtgtcacatctccaaaaggggaaggcgcctgccgtttttgtgaagtgtcatgacaaatcactcaataagaagtctggg

SEQ ID NO: 5148 - DNA, 1425 bp, Artificial Sequence
  derived and/or modified sequence
atggagagcaaggcgttgctggtgctcactctcgctgtgtggctccagagtttgacagctagccggggtggggtcgcagcagctgaccagcggcgggatttcatagacatcgaatcaaaattcgccctgaggaccccggaggatacagctgaggatacttgccatctaatcccaggggtggccgagtctgtagcaacctgccacttcaaccactcttctaagacattcatggtgatccacggctggacagtgactggtatgtatgagtcctgggtgcccaagcttgtggcggcactttataaaagagaacccgattccaatgtgatagtggtcgactggctctcgcgtgctcaggagcattatcctgtgtccgccgggtacacaaagctcgtggggcaggacgtggctcggtttatcaattggatggaggaggagttcaattaccctctcgacaacgtccacctgctgggatattccctgggcgcacacgccgctgggatcgcaggctctctcacaaacaagaaagtcaacaggattactggtttggaccccgcgggtcctaactttgagtacgccgaggcaccgtctaggctgtcacccgacgacgcagactttgttgacgtgttgcacacatttacgagaggcagccccgggagaagcatcggaatccagaaacccgtcggacatgtggacatctaccccaatggcggcacgttccagcctgggtgcaacatcggggaagccatacgggtcattgccgaaaggggattgggcgacgtcgatcagttggttaaatgctcccacgaaagatctatacatctttttatcgatagcctgctgaacgaggaaaatccatctaaagcctaccgctgctcctcaaaggaggcgttcgagaaaggtctttgtctgtcgtgcagaaaaaaccgctgcaacaatctggggtatgaaataaacaaagtccgcgcaaagcgatccagtaagatgtacctcaaaacccggagccaaatgccctacaaagtcttccattatcaagttaaaattcacttttccggaactgagtctgaaactcacaccaatcaagcctttgaaatcagtctctatgggactgtcgccgaatctgagaacatccctttcaccctgccagaggtaagtactaataaaacctattccttcctgatttacaccgaggtcgatatcggcgaactgctaatgctgaaactgaagtggaagagtgacagctacttttcatggtccgactggtggtcaagcccagggtttgcaatacagaagataagagttaaggctggggagacccagaaaaaggttattttctgcagccgagaaaaggtgagccatctgcagaagggtaaggcaccagccgtgtttgtgaaatgccacgataaatcccttaacaagaagtccggc

SEQ ID NO: 5149 - DNA, 1425 bp, Artificial Sequence
  derived and/or modified sequence
atggaaagcaaagcactcctcgttcttaccctggcagtgtggttgcaaagtcttaccgcgagccgagggggcgttgcagccgcagaccaaaggagggattttatcgatattgagagcaagttcgccttgaggactccggaagacacagcagaagatacatgccatctgattccgggagtggctgaaagcgttgccacctgccacttcaatcatagctctaaaacctttatggtgattcatggatggacagttaccggcatgtacgaaagttgggtgcctaagctggtggctgcactgtacaagagagagccagactctaatgtaatcgtggtcgattggctgtcgagggcacaggagcactaccctgtgagcgctggctacaccaaactcgttgggcaggacgtggcacgctttattaactggatggaagaggagttcaactatcccctggataacgttcacctgctggggtactctctaggagcccacgccgcaggcatcgctggtagtctgaccaacaaaaaagttaacagaatcaccggcctcgacccggccgggccgaattttgagtatgcagaagcaccttcgcggctcagcccagatgacgcagattttgtcgatgtgctgcacacgttcacacgcgggagccctgggcgcagcatcggtatacagaaacctgtaggccacgtggacatataccccaatggaggaaccttccaaccaggatgtaacatcggcgaggccatcagagttatcgctgaacggggactgggtgatgtggaccagttggttaaatgttcccacgaaagatcgatacatctgtttatcgacagccttctgaacgaggagaatccgagtaaggcatataggtgttccagtaaggaagcttttgaaaaaggtttatgcctaagctgcagaaagaaccgctgcaataatttgggctatgagattaataaggtccgggctaaaagaagctctaaaatgtacttgaaaaccagatcacagatgccctacaaggttttccattatcaagttaaaattcacttcagcgggacagagtccgagacccacacgaaccaagcattcgaaatctcactctacgggacagtcgcagagagcgaaaacatccccttcacacttcctgaggtgtcaactaacaaaacctatagttttctgatttacaccgaggtggacattggggagttgctgatgctaaaattgaaatggaaaagcgattcttacttctcttggtctgactggtggagtagcccgggatttgctatacagaaaattagggtgaaagctggagaaactcagaagaaggtgatcttttgttcaagagaaaaagtgtcacatcttcagaaaggcaaagcacctgcggtttttgtgaaatgtcatgataaatccctgaacaaaaagagcgga

SEQ ID NO: 5150 - DNA, 1425 bp, Artificial Sequence
  derived and/or modified sequence
atggagtccaaggcgctgttggtcctgactctggccgtgtggctgcagtcgctgactgcatctcgcggaggagtcgcggccgcggatcagcggcgcgatttcattgacatcgaatcaaagtttgctttgagaacccctgaggataccgcagaggacacttgtcacctgatcccaggagttgccgaaagcgtggctacctgccacttcaaccattcaagcaagacttttatggtcatccacggatggaccgtgactggaatgtacgaaagctgggtgccgaagctggtagcggcgctctataagagggaaccggactcaaacgtcatcgtggtggactggctgtcgcgggcccaggaacactaccccgtgtccgcggggtacactaaacttgtcggacaagacgtcgccaggttcattaactggatggaagaagaattcaactacccactggacaatgtgcacctgctcggttactcactgggtgcacacgccgcgggcatcgcgggctcgcttactaacaagaaggtgaatcgcatcaccggccttgatccggcaggaccaaatttcgagtacgccgaagccccatcgcggctttcccctgacgacgccgacttcgtggatgtgcttcacaccttcactcggggatctccaggacgctcgatcgggatccagaagccagtcggccacgtggacatataccctaacggaggaacctttcaaccgggatgcaatatcggagaagcaatccgcgtcatcgccgagcggggactcggcgacgtggaccagctggtgaagtgtagccacgagcgctccatccatttgttcattgactcactgctcaacgaagaaaacccgagcaaagcctacaggtgttcgtcaaaggaagccttcgagaaagggctctgcctctcgtgtcggaagaatcgctgcaacaatcttggatacgagattaacaaggtgcgcgctaagcggtccagcaaaatgtacctgaaaacccggtcccagatgccgtacaaggtgttccattaccaagtgaagatccatttttcgggaaccgagtccgaaactcacacgaaccaagcctttgaaatctcgctgtacggaactgtggcggagtccgagaatattcctttcaccttgcctgaagtctcaactaataagacttactcattccttatctacactgaagtggacatcggtgaactgcttatgttgaagctgaaatggaagtcagactcctacttctcgtggtcggactggtggtcctccccggggtttgccatccaaaagatcagagtgaaggcgggggagactcagaagaaggtcattttctgctccagggagaaggtgtcgcatctgcaaaaaggcaaggcaccggccgtgttcgtcaagtgccatgacaagtcccttaacaagaagtccgga

SEQ ID NO: 5151 - DNA, 1425 bp, Artificial Sequence
  derived and/or modified sequence
atggagtcaaaggccctcctcgtgctcaccctggccgtttggctgcagtctcttactgccagtagaggtggtgtagccgctgccgaccagaggcgcgattttatagacatcgagtcaaaattcgccctgcgcacacctgaggatacggccgaggacacctgccatctcatcccaggcgtggctgagagtgttgcaacttgtcattttaaccatagctccaagacatttatggtcatacacgggtggaccgtgacaggtatgtatgaatcatgggtgcccaaactcgttgctgccctgtacaagagggagcccgacagtaacgtgattgtggtggactggctgtccagggcccaggagcattaccctgtctccgccgggtatacaaagctcgtggggcaggacgttgctcgatttattaactggatggaggaggagtttaactacccactggacaacgttcatctcctgggttactctctgggcgcacacgctgcggggatcgccggatctcttactaataagaaagttaatcgaatcaccggtctggatcctgctgggcccaacttcgaatacgccgaggcaccatctcgactttctcccgacgacgctgattttgtggacgtcctgcacacattcaccaggggctcccctggacgatccataggaatccagaaacccgtaggtcatgtggatatctacccgaatgggggtaccttccagcccggatgtaacatcggagaggcaatacgcgtgattgctgagcggggcctcggcgatgtcgaccaactggtgaaatgctctcacgagcgctccattcatctttttatagatagcttgctgaacgaggagaacccctcaaaagcctaccgctgtagcagcaaagaggcctttgagaaggggctgtgcctctcctgtcggaagaacaggtgtaacaacctggggtatgagattaacaaggtgcgggcaaaaaggtcctctaagatgtacctgaagacgcgcagccagatgccgtacaaggtgttccactaccaggtgaagatccatttctctggaactgaaagcgagacccatactaaccaagcttttgagatcagcctctacggcacggttgccgagtccgaaaacataccattcactctcccggaagtgagtacgaacaagacctactctttcctgatttacaccgaagttgatatcggagagcttctgatgctgaaactgaaatggaagtccgattcttacttcagctggtctgattggtggtccagccccggttttgcgatacaaaagataagagtgaaggcaggagagactcagaagaaggttatcttttgttcaagagagaaggttagtcatctccagaagggcaaggcacctgcggtgttcgtgaagtgccatgacaagtcattgaacaaaaaaagtggg

SEQ ID NO: 5152 - DNA, 1425 bp, Artificial Sequence
  derived and/or modified sequence
atggagtcaaaggcgctgctggtgctgaccctcgcagtctggcttcaatcactgaccgcatcaagaggtggagtggccgctgcagaccagaggcgggactttatagatatcgaatcgaagtttgcccttagaaccccagaagatactgccgaggatacctgtcacctgatcccaggagtggccgagtcggtggcgacctgccactttaatcactcatccaagaccttcatggtgattcatggctggaccgttactggaatgtacgaatcgtgggttcctaaactcgtcgcggccctctacaagcgagaacctgatagcaacgtcattgttgtggattggctttcccgggcgcaagaacattaccctgtgtcagcaggatacaccaagctcgtcgggcaggatgtcgcacgattcatcaattggatggaggaggagttcaattatccgctcgataacgttcacctgctgggatattccctgggtgcgcatgccgcagggatagcaggatccctgactaacaagaaggtcaatagaatcaccggcctggaccctgccggcccaaactttgagtacgcagaagccccctcacgactctcgccagatgacgccgatttcgtcgatgtgcttcatacttttactagaggttcccctggccggagcattggcatccagaaaccagtgggtcacgtggacatctaccctaatggcggaaccttccaacccggctgtaacattggtgaagcgatacgcgtcattgcggagagagggctcggagacgtggatcagcttgtcaagtgctcacatgaacgttccattcatctctttatagactcactgctcaacgaagagaacccctcgaaagcgtaccggtgttccagcaaagaggcatttgaaaagggactttgcctgtcgtgtcggaagaaccgttgtaataaccttggatacgagatcaataaggtccgtgcaaaaagaagctcgaaaatgtacctcaaaactcgctcccagatgccctacaaggtgttccattaccaagtgaagatccatttctcgggcacggaatcggaaactcataccaaccaggcgttcgaaatttccttgtacggcaccgtggcagaatcggagaacattccattcactcttccggaagtgagcactaacaagacctactcctttctcatttacaccgaggtggatattggcgaactgctgatgctgaaacttaaatggaagagcgatagctacttttcctggagcgactggtggtcctcccctggatttgcaatccagaagatccgggtgaaagctggagaaacccagaagaaggtgattttctgtagcagggagaaggtgtcgcatctccaaaagggtaaggctcctgcagtgtttgtcaagtgccacgacaaatcacttaacaagaagtcagga

SEQ ID NO: 5153 - DNA, 1425 bp, Artificial Sequence
  derived and/or modified sequence
atggagtcgaaagcactgctcgtgcttactctcgccgtgtggctgcaatcactgactgccagccgtggtggagtcgccgctgcagaccaaaggcgcgatttcatcgatattgaatcgaaattcgccttgagaacccctgaggatactgcagaggatacttgccatcttatcccgggagtggccgaatctgtggcgacctgccacttcaaccactcgtcaaaaactttcatggtcattcatggctggactgtcactggaatgtacgaatcttgggtcccaaagctcgtggctgccctgtataagagagagccggactcgaacgtgatcgtcgtcgattggctctctcgcgcccaggagcactacccggtgtcagcgggctacacgaagctcgtgggccaggacgtggcaagattcatcaactggatggaggaggagttcaactacccgctcgacaatgtgcacctgctggggtactcgctcggagcccacgcggcaggaatcgcaggaagtctgaccaacaagaaggtgaatagaatcaccggactggatccagccgggccaaactttgagtacgcagaagccccgtcgcgcttgtcgcctgatgacgctgacttcgtggacgtgctgcacactttcaccagaggttcccctggacggagcatcggaattcaaaagccggtgggccacgttgacatttaccctaacggaggtaccttccagcctggatgtaacatcggagaggctatccgggttatcgccgagcgggggttgggagatgtggatcaactggttaaatgcagccacgaaagatcgatccatctgttcatcgactccctcctgaacgaagaaaatccgtccaaagcctatcggtgctcgtccaaagaagccttcgagaagggactctgtttgtcctgccgcaagaaccggtgcaataacctgggatacgagattaacaaagtgcgggcgaagcggagctccaagatgtacttgaaaactaggagccagatgccatataaggtgttccactaccaagtgaagatccacttcagcggtactgaaagcgaaacccacactaaccaggcctttgagatctcactgtacggaacggtggctgagtccgaaaacataccattcactctccccgaagtctcgactaataagacttactcattccttatctacactgaagtggacatcggagaactgctgatgctcaaacttaagtggaagtcggattcgtacttctcgtggtcggactggtggtcgtcgccaggattcgcaatccagaagatccgcgtgaaggccggtgaaactcagaaaaaggtgatcttctgctcgcgggaaaaagtgtcccacctccaaaagggtaaggcgccagccgtgttcgtgaagtgccatgataagagcctgaataagaaaagcggc

SEQ ID NO: 5154 - DNA, 1425 bp, Artificial Sequence
  derived and/or modified sequence
atggaaagtaaagcactgctggtcctaactctggccgtgtggctccagagtctcactgcatccagaggaggggtcgccgccgcagatcagcgacgagattttattgatatcgaatcaaaattcgcactacgcacaccagaagatacagcagaagatacatgccatcttatacccggggttgctgaatcggtcgctacttgccatttcaaccactcatctaaaacattcatggtgatccatggatggactgtgacaggaatgtatgaatcctgggtgcctaaactcgtcgcagctctctataagagggaaccagattccaatgtgattgtggtggattggctgtcaagagcccaggaacactatccagtgtcggctgggtatacaaaacttgtagggcaggatgtcgccagattcatcaactggatggaggaagaattcaattatccactagacaatgtccacctgcttggatattcattaggggcacacgctgccggaatcgcgggatcactcactaacaaaaaagtgaatcggattactgggctggatcctgccggaccaaatttcgaatatgcggaggcaccctcccgactctctcccgatgatgctgatttcgtggatgtactacacacatttacaagagggtctcctgggcgcagtattggaatccagaaaccagttggacacgtcgatatctatcctaacggaggaacgtttcagcctgggtgcaacataggagaggctattcgagtgattgccgagcgcgggcttggagatgttgatcagcttgttaagtgctcccacgaaagatctatacaccttttcatcgattctctactcaacgaagaaaacccatctaaagcttatcgctgttcatcaaaagaagcatttgaaaaagggttgtgcctgtcttgtagaaaaaataggtgcaataacctcgggtacgaaataaataaagttcgagctaaaaggtctagtaaaatgtacctgaaaactcgctctcagatgccatacaaagtcttccattatcaggtaaaaatacatttctctgggactgagtcagaaactcatacaaatcaagcatttgaaatatctctttatgggactgtagccgaatctgaaaacataccctttacactgcctgaagtgtccactaataagacatacagtttccttatctatacagaagtagatatcggagagcttctcatgctcaaactaaaatggaagtctgatagttatttcagttggtcagattggtggtcttctcctgggtttgccatacagaaaatccgagtgaaagcgggagagactcagaaaaaggttatcttttgttcccgagaaaaagtgtctcatctgcagaaaggaaaggcaccagctgtttttgtcaagtgtcacgataaatctctcaacaaaaaatcagga

SEQ ID NO: 5155 - DNA, 1425 bp, Artificial Sequence
  derived and/or modified sequence
atggagagcaaagcacttcttgtgctgaccctcgccgtgtggcttcaatccctcacggcctccagaggtggagtcgccgcagcagaccagcgccgggactttatcgatatcgaatcgaaatttgcccttcgcacccccgaggataccgcagaagatacttgccatctgatccctggcgtcgcggagtcggtcgccacttgtcactttaaccactcctctaaaacttttatggtgatccatggatggactgtgaccggaatgtatgagtcgtgggtgcctaagttggtggcagcactgtacaaacgggaaccagactcgaacgtgattgtggtggactggctcagcagggcccaggaacattaccccgtctcggcaggttacactaagctggtgggacaggacgtggcccgtttcattaactggatggaggaggagtttaactatccgctggacaacgtgcatcttttgggatattccctgggagcacatgcagcaggcattgccgggagcctgactaacaagaaagtgaataggattaccgggctggatcccgcaggtcctaactttgaatacgcggaagcgccgagccgcctttcacctgacgatgccgattttgtggatgtgctgcataccttcactcgaggatcgcctgggagaagcattggaattcaaaagcctgtgggtcatgtggacatctacccaaacggtggcacctttcaacctggatgtaacatcggagaagcaatcagagtgattgcagagcggggccttggggatgtcgaccaactcgtcaaatgttctcacgagagatcgattcatttgtttattgatagcctgctgaacgaggaaaatccttcaaaggcatacagatgcagctccaaagaagcattcgagaagggactctgtcttagctgtcgaaagaaccgctgtaataacctgggatacgagatcaacaaggttagagcaaaaagatcgtccaaaatgtatcttaagacccgttcccagatgccttacaaggtctttcactaccaggtgaagatacacttctcaggtactgaatcggaaactcacaccaatcaggcctttgaaatctctctgtacggaactgtggccgaaagcgaaaacattccgtttacccttccagaagtgtcgactaacaagacgtactcctttctcatctacaccgaggtggatatcggcgaactcctcatgcttaagctgaaatggaagtccgattcctacttttcctggtcagattggtggtcctcaccagggttcgccatacaaaagatcagagtgaaggcaggggaaactcagaaaaaagtcatattctgtagccgggagaaggtgtcccatctgcaaaaggggaaggcacctgccgtgttcgtgaagtgtcatgacaagtcgctgaataagaagtcagga

SEQ ID NO: 5156 - DNA, 1425 bp, Artificial Sequence
  derived and/or modified sequence
atggaatccaaagcgctgctggtcttgacgctggccgtgtggctgcagtcactgactgcctcccggggaggtgtcgcggccgctgaccagagacgggatttcattgacatcgagagcaagttcgccctccgaacgcccgaggacaccgcagaggacacctgccatctgatccctggtgtggcagagtcggttgccacctgtcatttcaaccacagctccaaaaccttcatggtgatccacggctggaccgtcaccggaatgtacgaatcatgggtgccgaaactcgtggcggctctctacaagcgcgaaccggatagcaacgtgattgtggtggactggctgagccgggcgcaggaacattaccccgtctcggctggatacactaagttggtcggacaggacgtcgcgagatttatcaattggatggaagaagagttcaactaccctctggataatgtgcacctgctgggatactcccttggagcccatgctgccggaatcgccggatcactgaccaacaagaaggtcaaccgcatcaccggcctcgatcctgcaggcccgaacttcgaatatgcggaagccccaagccgcctctcgccggatgatgccgacttcgtggacgtcttgcacacctttacccgcggatctccgggtcgctcgatcggtatccaaaagcccgtgggacacgtggatatctacccgaacggagggactttccagcctgggtgtaatatcggcgaggcaattcgtgtcatagcagaaaggggactgggggacgtggaccaactcgtcaagtgctcgcacgaaagatcgatccacctctttatcgactccctgctcaacgaagagaatccatcgaaggcctaccgctgctcatccaaggaggcattcgaaaagggcctctgcctgtcatgccggaagaatcggtgtaacaacctcggctatgaaatcaacaaagtcagagctaagcggtcctcgaaaatgtaccttaagactaggtcgcaaatgccgtacaaggtgttccactaccaggtgaaaatccacttcagtggcactgaaagcgagactcatactaatcaggcctttgagatctctctttacggaaccgtggctgaatcggaaaacatcccatttaccctgccagaagtgtccactaacaagacttacagctttctgatttacacggaggtggacatcggggagctgttgatgctgaaacttaagtggaagtcagatagctacttctcctggtccgattggtggtcatccccgggcttcgcgattcaaaagatcagggttaaggcaggggagactcagaaaaaagtgatcttctgcagccgcgagaaagtgtcgcatctccaaaagggaaaagcgccagccgtgttcgtgaagtgccacgacaagtcactgaataagaagtcggga

SEQ ID NO: 5157 - DNA, 1425 bp, Artificial Sequence
  derived and/or modified sequence
atggaatcaaaggcactcctcgtgctcaccctcgcggtgtggctccagtccctcactgcctcaagagggggcgtggcggcagcggatcagcgccgcgacttcatcgacatcgagtcgaagtttgcactcagaaccccggaggacaccgccgaagatacttgccacctgattccgggcgtggctgagtcagtggccacttgtcatttcaaccattcgtcaaagaccttcatggtgatccatggctggaccgtgactggaatgtacgaatcctgggtgccaaagttggtggccgccctgtacaagcgcgaacccgattccaatgtgatcgtcgtggactggctgtccagagcacaagaacactaccctgtgtcagccggatacaccaagttggtcggccaagacgtggcgcgattcattaactggatggaggaagagttcaattaccctctggacaacgtgcatctcctgggatactccctcggagcacacgctgcgggaattgctggttcactgacgaataagaaggtgaaccggatcactggactggatccggctggacccaacttcgagtacgctgaggccccttctcggctgtctccagatgacgccgacttcgtggatgtcctgcacacctttactagaggatcaccggggcgaagcatcggaatccaaaagccggtgggacacgtcgacatctacccgaatggcggaactttccagcctggatgcaacatcggagaagccatcagagtcatcgcggagcgggggctcggagacgtcgatcagctggtgaagtgctcgcacgaaaggtccattcatctgtttatcgattcgctgctgaacgaagaaaatccatcgaaggcatacaggtgtagctccaaggaggcattcgaaaagggactctgcctgtcatgtcgcaagaacagatgtaacaatcttggttacgaaatcaataaggtccgcgcaaaaagaagctcgaagatgtaccttaagactagatcccagatgccgtataaagtgttccactaccaagtgaaaatccacttttcaggaacggagtccgagacgcacaccaaccaggccttcgagatttcgctgtacggaaccgtggccgagtctgagaatatcccgtttaccctgccggaagtgtccactaacaaaacctactcgttcctcatctacacggaagtggacatcggagagctgctcatgctgaaactgaaatggaaatccgatagctactttagttggagcgattggtggtcatccccgggcttcgcaatccagaagatccgggtcaaggccggcgaaactcaaaagaaggtgatcttctgctcccgggagaaggtgagccatctgcagaaggggaaggctccggcggtattcgtgaagtgtcacgataaatcgctcaacaagaaatcagga

SEQ ID NO: 5158 - DNA, 1425 bp, Artificial Sequence
  derived and/or modified sequence
atggaatcgaaggcgcttctcgtgcttacccttgctgtgtggctgcaatcactcacggcatcccgtggtggtgtggccgcagcagatcagcgacgggatttcattgatatcgagtcgaaatttgcactgcgaaccccggaggacactgccgaggacacttgccacctgatacctggagtggccgagagcgtggccacttgccactttaaccattcctcgaaaaccttcatggttattcatggatggacggtgactggaatgtacgaatcctgggtgcctaaacttgtggcggcactttacaagcgtgaacccgactcaaacgtgattgtggtcgattggttgtcccgtgcgcaagaacattacccagtctccgccggctacaccaagctggttggccaagatgtcgctagattcataaactggatggaggaagagtttaactacccgctcgacaatgtgcatctgcttggctactcactcggcgcacacgcagctgggatcgcaggctcgctgactaacaagaaagttaaccgaataaccggtctggacccagcaggcccaaactttgaatacgcagaagcgccgtcacgactgtccccagatgatgctgatttcgtggatgtgctgcatacttttactcgcggtagccctggacgatcgatcgggatccaaaagcctgtgggacatgtggatatctacccaaatggtggaactttccaaccaggatgtaacattggggaggcaatccgtgtgatagcggaaagaggcctcggagatgtggatcaactggtgaagtgcagccacgagcgctcaattcacctgttcatcgactcccttcttaacgaagaaaatccgtcaaaggcatacagatgttcatccaaggaggcatttgaaaagggcctttgcctcagctgtcgaaaaaacagatgtaacaatctgggttacgagattaacaaagtccgggcaaaaagaagttcaaagatgtacctcaagacccgctcacaaatgccttacaaggtgttccattatcaggtgaaaatccatttctcgggcactgagtcagaaacccataccaaccaggcgtttgaaatctctctctatgggaccgtggccgaatcggagaatatcccttttactcttccagaagtctcgaccaataagacctacagcttcctgatctacaccgaagtagacatcggggaactgctgatgctgaagttgaagtggaagtcggatagctacttttcgtggtcagactggtggtcctcgccaggatttgccattcagaaaatacgggtgaaagccggcgaaacccagaagaaggtgatcttttgctcgagagaaaaagtctcgcatctgcagaaaggtaaggccccagcagtgtttgtcaagtgtcacgataaaagcctcaataagaaatctggt

SEQ ID NO: 5159 - DNA, 1425 bp, Artificial Sequence
  derived and/or modified sequence
atggagtcaaaggcactcctggtcctgaccctggcggtgtggctccagtccctgaccgcgagccgcggcggagtggcagcggccgatcaacgccgggatttcattgacatcgaatcgaagtttgctctgcgaactccagaggacactgctgaagatacttgtcacctcatcccaggcgtggcagagtccgtggccacttgtcatttcaaccactcgagcaagactttcatggtgattcacgggtggaccgtgactggcatgtacgaatcctgggtgcctaagctggtggcagcgttgtacaagagagaaccggacagcaacgtcattgtggtggactggctgtcacgcgcgcaggagcactacccagtctctgcgggttacacgaagctggtggggcaggacgtggcaagatttatcaattggatggaagaagagttcaattacccgctggataatgtgcacctgctgggctactcgctgggagctcacgccgcggggattgccggatcactcactaataagaaggtcaatcggatcactggactcgacccggcaggcccaaacttcgagtacgcggaagcgccaagccggctgtccccggatgatgccgacttcgtggacgtcctgcacacgttcaccaggggatctccaggcaggtcgatcggtatccagaagccagtgggacatgtggatatctacccaaatgggggaacctttcaaccaggctgcaacatcggcgaagctataagagtaatcgccgaacggggcctgggagacgtggatcagctggtgaagtgttcccatgagcgcagcatccatctgtttatcgacagcctcctcaacgaagagaacccatccaaggcgtaccggtgctcaagcaaagaggccttcgagaagggactctgcttgtcctgccgcaagaaccgctgcaacaatttgggttacgagattaacaaggtgcgcgctaagcggagctcaaagatgtacctcaagaccaggtcgcagatgccatacaaagtgttccactaccaggttaagattcacttttccgggaccgagtcggagactcataccaaccaggcattcgagatctccctgtacggaactgtggcggagagcgaaaacattccattcaccctgccggaagtgtcgaccaacaaaacgtacagctttttgatctacaccgaagtggacatcggtgagctgctgatgcttaaactgaagtggaagtccgactcgtacttctcatggtcggattggtggtccagccctggatttgccatccagaagatccgcgtcaaggccggggaaacccagaagaaggtgattttctgcagccgggagaaagtgtcgcacctgcaaaaaggaaaagccccggccgtctttgtcaagtgtcacgacaagtccctgaacaagaaatccggc

SEQ ID NO: 5160 - DNA, 1425 bp, Artificial Sequence
  derived and/or modified sequence
atggagtcaaaggcgctcttagtgttgacgctggcggtgtggctgcagtccctgacggcttcccggggcggcgtggctgcggctgaccagcgccgggattttattgacattgagagtaaatttgctctgcggaccccggaggacacggcggaagacacctgccacttgattccaggagtggctgagtcagtggccacttgccattttaaccactctagcaagacatttatggtgattcacggctggactgtgaccggaatgtacgagtcctgggtgcccaagttagttgctgccctatataaaagggagcctgacagtaatgttatagtggttgattggctgtctcgggcccaggagcattaccccgtctccgcgggttataccaaacttgtagggcaggacgtagccagatttatcaactggatggaggaggagttcaactacccgttggataatgttcatctactgggctattccctgggcgcccacgcagcgggtatcgcgggcagtttaaccaacaaaaaagtgaaccgcattacgggtcttgaccccgccggcccgaacttcgagtacgcagaagccccctctcgattgagtcccgacgacgccgatttcgtggatgtcctgcacacctttacaagaggaagtcctggcaggagcataggtatacagaagcccgtgggccacgtggacatctatcccaatggcggtaccttccagccaggatgcaacataggagaggcgatacgcgtgattgcagagaggggactaggcgatgtggatcagttagtgaagtgctctcacgagcgttctattcatctgtttatcgattccctcctcaacgaggaaaatccgagcaaagcctatagatgcagctcaaaagaagcgttcgaaaaggggctctgtctaagttgcagaaagaatcgctgtaataacctagggtacgagatcaacaaagtcagagctaagagatcgagtaagatgtacctgaagactaggtctcagatgccatacaaagtatttcattatcaggtgaagattcacttctccggaaccgagtccgaaactcacactaatcaggcattcgaaatttcactttacgggaccgttgctgagagtgagaacatcccgtttacattaccagaagtgtccacaaacaagacatactcattccttatctatacagaagttgacataggagagctcctgatgttaaaactgaagtggaagagcgacagctacttttcttggtccgattggtggtcttctcctggcttcgccattcagaaaatcagagtgaaggctggggagacgcagaagaaagtcatcttctgttcgcgggaaaaggtgtcacacctccagaagggaaaagcaccagccgtatttgttaaatgccacgacaagtccctgaacaagaagagcggc

SEQ ID NO: 5161 - DNA, 1425 bp, Artificial Sequence
  derived and/or modified sequence
atggagtcaaaagccctgctggtgctgactctggcggtgtggctgcaatcgctgaccgcctcgaggggcggagtggccgcggcggaccagaggagggatttcatcgacatcgaaagcaagttcgctctccgcacgccggaggacactgcggaagatacctgtcatctcatcccaggcgtggcggagtcggtcgctacctgccacttcaaccatagctccaaaactttcatggtgatccacggatggacggtgaccggaatgtacgagtcgtgggtaccaaaactcgtcgcggccctgtacaaacgcgagccggattctaatgtgattgttgtggattggctgagccgcgcccaggaacattacccggtgtcagctggttacaccaaactggtgggtcaagatgtggcgcggttcattaactggatggaagaggaattcaattacccgctggacaacgtgcacctcctgggttattcgctcggagcccacgccgccggaatcgcgggtagcctgaccaataagaaggtcaatcgcatcaccggactcgatcctgcaggacccaactttgaatacgccgaggcaccgtcacgcctctcaccggatgacgctgactttgtggatgtacttcacaccttcactaggggctcccctggtagatcaatcggaattcagaagccagtcgggcacgtcgatatctatcctaatggtgggactttccagccggggtgtaacatcggggaagcaatcagagtgatagcggagaggggactcggagacgtggatcaactggtgaaatgctcccacgaacgaagcatccatctgtttatcgactcgttgcttaacgaagaaaacccatcgaaggcataccgctgctcctcaaaggaggcattcgaaaagggcctttgtctgtcatgccgcaaaaaccggtgcaataacctgggatatgagatcaataaagtccgcgccaagcgctcctctaagatgtacctcaagacgagatcacagatgccgtacaaagtgtttcattaccaagtgaaaatccatttcagcggtactgagtccgaaactcacaccaaccaggctttcgaaattagcctttatggaaccgtggccgaatcggagaatatccctttcactctgcccgaagtcagcactaacaagacctactccttcctcatatacactgaagtggacatcggagagctgctgatgctcaaactgaaatggaagtccgacagctacttctcgtggtcggattggtggagcagcccgggctttgcgatccagaagattcgagttaaagctggcgaaactcaaaagaaggtgatcttctgctcgcgcgagaaggtgagccacctgcagaaaggaaaggccccagcagtgttcgtgaaatgccacgacaagagcttgaacaaaaagtcggga

SEQ ID NO: 5162 - DNA, 1425 bp, Artificial Sequence
  derived and/or modified sequence
atggagtctaaagcactcttggtgcttaccctggctgtatggctccagagtctgaccgcatccaggggtggggtggccgctgccgatcagcgccgcgacttcattgacattgagagcaaattcgccctgaggacgcccgaagacactgctgaggacacgtgtcacctcattccaggggtggctgaatccgtcgccacttgtcatttcaaccattcatcaaagacttttatggtgattcacgggtggaccgttactggaatgtacgaatcttgggtgcctaaactggtggccgctttgtataagagagaacccgatagtaatgtcatcgtcgtagattggctcagtagggctcaagaacactatcccgtgagcgccggatacacgaagctggttgggcaggacgtggcacgatttattaattggatggaggaagaattcaattatcccctggacaacgtgcacttgcttggatatagtcttggcgctcatgctgccgggatcgccgggtcactgactaacaaaaaagtaaatcggatcaccgggcttgatcccgcaggacccaacttcgaatatgcggaggcaccctcaagactgagcccggatgatgctgattttgtggacgtgctgcatactttcacccggggttcaccgggacggtctatcggcatccagaaaccagttggacatgtggacatctaccctaacggcgggacctttcagccgggctgcaacataggcgaggctatcagagtgatcgccgagcgaggactgggagatgtggatcaactcgtgaagtgtagccatgagcggagcattcacttgttcatcgactccctcctgaacgaagagaatccaagcaaagcctatcggtgctccagtaaagaagcttttgagaagggcctctgcctctcttgtagaaagaacagatgtaataaccttgggtacgagattaataaggtgagagccaagaggagcagtaagatgtacctcaagacacggagccagatgccctacaaagtgtttcattaccaggtcaaaatacactttagcggcacggagagcgaaactcatacgaaccaggcattcgagatatctctctatgggactgtggctgaaagtgagaatatcccgttcaccttgccagaggtgtcaactaataagacctattcctttctgatctacaccgaggttgatataggcgaattgctcatgttgaaactgaaatggaagtctgattcatacttttcttggagtgactggtggtctagcccggggttcgccatccagaagatccgcgtcaaagctggggaaacccagaagaaagttattttctgttcccgggaaaaggtgtcacacctgcagaaaggaaaagcacccgcagtgtttgtgaagtgtcacgataaaagcctgaacaagaagtccggt

SEQ ID NO: 5163 - DNA, 1425 bp, Artificial Sequence
  derived and/or modified sequence
atggagtcgaaggcccttctggtgctcacgctggccgtctggctccagtctctgaccgcatcccgcggcggggtggccgcagccgaccagcggcgagattttatcgacatcgagtctaagtttgccctccggactccagaagataccgcagaggacacctgccaccttatccccggagtggccgaaagcgtggccacctgccactttaatcactcatctaaaacttttatggttattcacggctggacagtgacagggatgtacgaatcctgggtccctaaactggtggccgccctctacaagcgcgagcctgacagcaatgttatcgtggtcgattggttgtcgcgggcccaggaacactaccctgtgtctgcagggtatacgaaactggtgggacaggacgtagcccgcttcattaactggatggaggaggagtttaattaccccttagacaacgtacacctccttggttattcattgggcgcacacgccgccgggattgccggaagcctgacaaacaagaaggtgaatcggattacggggctggaccccgctgggcctaattttgagtacgcagaggccccctctcgcctctctcctgatgacgcagattttgttgatgttttacacactttcactagagggtccccagggaggtctatcgggatccaaaaacccgttggtcacgtagacatttatcccaacggggggactttccagcccggatgcaacattggtgaggccatccgggtgatcgcggagaggggtctcggagatgttgaccagctcgtgaagtgctcccacgagaggtctatccacctgtttatcgacagtctgctaaatgaggaaaacccaagcaaagcttaccggtgtagttccaaggaagcctttgagaaaggattgtgtctgagctgtcgtaagaatagatgcaataatttaggctatgagattaataaagtgagagcgaagcggagcagcaaaatgtacctgaagacccggtctcaaatgccctacaaggtctttcattatcaggtgaaaatccacttctccggcaccgaatcggagacgcatacgaatcaagcctttgagatttccctatatgggacagtagccgaatccgaaaatataccattcacactgccggaggtgtcaactaataaaacctattcatttttgatctacaccgaggttgatattggcgagcttctgatgcttaaactaaaatggaaaagtgactcctacttttcttggtcagactggtggagttctccgggcttcgccatccagaagatccgggtaaaggctggcgagactcagaaaaaggtgatcttttgctcccgcgagaaagtgagtcatctgcaaaaggggaaggcccccgcggtgttcgtgaaatgccacgataagagcttgaataagaagtctggc

SEQ ID NO: 5164 - DNA, 1425 bp, Artificial Sequence
  derived and/or modified sequence
atggaatcgaaggcactgttggtgctgaccctggcagtgtggcttcagtcactcacggcctccagaggtggtgtggcagcagccgatcaacggagggatttcatagacatcgaatcgaaattcgccctgagaacccccgaggacaccgcagaagatacgtgtcatcttatacctggtgtggcagaaagcgtcgccacctgtcactttaaccattcgtcgaaaacttttatggtgattcatggctggaccgtgaccgggatgtacgaatcatgggtgcccaaacttgtggctgctctttacaagcgggaacctgattccaacgttatcgtggtcgactggctctcacgcgctcaggaacattaccctgtgtcagcagggtacaccaaacttgtcgggcaggatgtggcacgctttatcaactggatggaagaggagttcaactacccattggataacgttcatctgcttggatacagcttgggtgcacacgcagcgggaattgctgggagtcttactaacaagaaggtcaacagaattaccgggctcgatcccgcaggccctaatttcgaatacgcagaggcaccttcacgactgagtccagatgatgcagactttgtggacgtcctgcacacttttactcgggggtcacctggtagatccatcggcatccaaaagccagtggggcacgtagacatataccccaatggcggaaccttccagcccggctgtaatatcggtgaggcaataagagtgatcgcagagcgtggactgggtgacgtcgaccagctcgtgaaatgcagccatgaaagatccattcatctctttattgattcccttctgaatgaagaaaacccgtccaaagcatatcgatgttcaagcaaagaggcgtttgaaaagggcctctgtctgtcctgccggaagaatagatgtaacaatcttgggtacgagattaacaaggtgagagcaaagagaagctcgaagatgtacctcaagactcgctcccagatgccttacaaggtttttcactaccaagtgaaaatccacttctcaggaaccgagtccgagactcataccaaccaagcctttgagattagcctgtacggaacggtggccgaatccgaaaacattcctttcaccctccccgaggtgtcaactaacaagacgtactccttccttatctacacggaagtggatattggcgaactcctgatgctgaaacttaaatggaagtccgactcgtactttagctggtcggattggtggagctcaccagggtttgccattcaaaagatccgggttaaggcgggagagactcaaaagaaggtcatcttttgctcacgcgaaaaagtgagccatcttcaaaagggaaaagcaccagcagtgttcgtgaagtgtcatgacaagtcacttaacaaaaagtccggg

SEQ ID NO: 5165 - DNA, 1425 bp, Artificial Sequence
  derived and/or modified sequence
atggaaagcaaggcgttgctggtccttacccttgcagtgtggctccaaagtctgaccgcatcgcgtggaggagtggccgctgccgatcaacgccgtgatttcatagacattgaaagcaaattcgcgcttcgcacgcctgaagataccgccgaggatacttgtcatcttattccaggagtcgcagaaagtgtggccacctgtcactttaaccactcatcgaaaactttcatggtgatacacggatggactgtgaccggtatgtacgaatcatgggtccctaaacttgttgccgctctctataagcgggagcctgactcgaacgtgattgtcgtcgactggctgagtcgcgcacaggaacattaccccgtgtctgcggggtatactaagttggtgggacaagatgtggcacggtttatcaattggatggaggaagagttcaattacccactggataacgtgcatctcctgggatattcgttgggggcacatgccgcaggcattgctggatccttgactaacaagaaggtgaatagaattaccggtcttgacccagcaggtcccaactttgaatacgctgaggcaccgtccaggttgtcaccggacgatgctgatttcgttgatgtcttgcacaccttcacccgtggctcgcccggacggagcatcggtatacagaagccagtggggcatgtggatatctaccctaatggtggcacttttcaacctggatgcaatatcggggaagctattcgtgtgatcgcagagcgaggacttggggatgttgatcaacttgtgaagtgtagccatgagcgctcgatacacttgtttatcgattcacttctgaacgaagagaacccttccaaggcctacaggtgctcctcaaaggaagcatttgagaagggcctctgtctgtcctgtcgtaagaataggtgtaacaacctgggttacgagatcaataaagttagagcaaaacggtcctcgaagatgtacctgaaaactagatctcagatgccttacaaggtctttcattaccaagttaagattcattttagcggaaccgaatccgaaactcataccaaccaggcatttgaaatttccctttacggtaccgtggcggagagcgaaaacataccatttactcttcccgaagtgtccaccaataagacttacagctttctgatttacactgaagtcgacatcggagaacttctgatgctcaaactcaagtggaagtccgactcgtacttttcgtggtctgattggtggtcgtcgccaggattcgcgatacagaagattagagtgaaagcaggggaaacgcaaaagaaggtaatcttttgctcgagagagaaggtgtcacatctgcagaagggaaaggcgccagccgtgttcgtgaaatgccacgacaagtcgctgaacaaaaagtcaggc

SEQ ID NO: 5166 - DNA, 1425 bp, Artificial Sequence
  derived and/or modified sequence
atggaaagtaaagctcttcttgtgctgactctggcagtctggttgcaatctctaacagcttcccgaggaggagttgcggctgctgatcaacggcgggatttcattgacatcgagtcgaaattcgctttacggacgccagaagacaccgctgaagatacttgccaccttataccaggtgttgcagaatcggttgccacctgtcacttcaatcattcctctaagacttttatggtaatacatggatggacagttactgggatgtatgagagctgggtgccgaaattagtcgctgccctatacaaacgtgaaccggactcgaacgttattgttgtggactggctgtcacgagctcaggaacactacccggtttctgcgggatatacaaagttggttggacaggacgtggcacgattcattaattggatggaagaagaattcaattatccgttggataatgtccacctcttgggatattctttgggagcccatgccgctggtatcgcgggatctctcacaaacaaaaaggttaaccgaataactggtctggacccagcaggtccgaactttgaatatgcggaggctccgagtcggttatctccagatgatgccgatttcgtcgatgtgcttcatacttttacccgaggatcaccaggccgaagtatcggaattcagaaacccgtcggacacgtagatatctatccaaacggagggacttttcaaccgggatgtaatattggggaagcgatccgagttattgccgaaaggggactcggcgatgtcgatcaattagtcaagtgttctcatgagcggagcatccatcttttcatcgattctttattgaacgaagagaacccgtcgaaagcttaccgttgttcatccaaagaagctttcgaaaaaggactttgcctttcatgccgcaagaaccgctgcaataatttgggttacgaaatcaacaaagttcgagcaaaacgatcctctaagatgtatcttaagacaagatctcaaatgccatacaaagtgtttcactatcaagtgaaaattcactttagtggtactgaatctgagacccatacaaaccaagcctttgagatttctctgtatggtacagttgcagaatctgagaatattccattcacattgcctgaggtatcgactaataaaacatactcattcctgatatataccgaggtggatataggagaactgctaatgttgaaattgaagtggaagtcagactcgtatttttcatggtcagattggtggtctagtccaggcttcgccatccaaaaaattagagttaaagcgggcgagacacagaaaaaagtcattttctgttctagggaaaaagtctcacacctccaaaaagggaaggctccagctgtgtttgtgaaatgccatgacaaatcactgaataagaaatcgggt

SEQ ID NO: 5167 - DNA, 1425 bp, Artificial Sequence
  derived and/or modified sequence
atggagagcaaggctctgctcgtgctcactctggccgtgtggctgcagtcactgaccgcctcgcgtggaggagtggcagctgcggaccaacggcgggacttcattgatatcgagtctaagttcgctctgcgcaccccggaggacactgccgaggacacctgtcacctcatcccgggagtcgcagagtccgtggctacctgccatttcaaccactcatccaagacttttatggtcatccacggctggaccgtgactggaatgtacgaatcctgggtaccaaaactggtggcagccttgtataaacgcgaacctgactccaacgtcatcgtcgtcgactggctttcaagagcacaggagcactacccggtcagtgcgggatacactaaactcgttggacaggacgtcgcccggtttatcaattggatggaggaggagttcaattacccactggataacgtccatctgctcgggtatagcctgggggcccatgcggccggcatcgcgggaagcctgaccaacaagaaggtgaaccgcatcactggactggacccagcaggtccgaactttgagtacgccgaggcgccctctcggctttcgcccgacgacgcagattttgtcgatgtgctgcataccttcaccagaggttcacctggaagatcgatcggaatccaaaaacccgtgggacacgtggacatctacccaaacggtggaactttccagccgggatgcaacattggcgaggcaatccgggtgatcgcggaaagagggctgggagacgtggaccaactggtgaaatgttcacacgaaaggtcaatccatctgttcattgatagcctcctcaatgaagaaaatccgtccaaagcctacagatgctcgtcgaaggaggcctttgagaagggactgtgcctgtcttgccggaaaaaccgatgcaacaatctcgggtacgagattaacaaggtgcgggccaagcggtcgtcaaagatgtacctcaagacgagatcccaaatgccgtacaaggtctttcactaccaggtcaagattcatttcagtggcaccgaaagcgaaacgcacaccaaccaggcgtttgagatctcactgtacgggactgtggccgagtcagaaaacatcccgtttactttgccggaagtctccaccaacaaaacctactccttcctcatttacactgaggtcgacatcggggaactcctcatgctcaagctcaagtggaagtcggattcctacttcagctggagcgactggtggtcctcacctggattcgctatccagaagatccgagtgaaagccggtgaaacccagaagaaggtgatcttctgcagccgcgaaaaggtgtcccatctccaaaagggaaaggccccagctgtgtttgtgaagtgtcacgacaagtcgctgaacaagaaaagtggc

SEQ ID NO: 5168 - DNA, 1425 bp, Artificial Sequence
  derived and/or modified sequence
atggaatctaaagcacttttggttcttactcttgctgtttggttacaaagtttaacagcatctagaggaggtgtagcagcagctgatcaaagaagagatttcattgatattgaatctaaatttgctttaagaacaccagaagatactgctgaggatacttgccatttgattccaggagttgctgaaagtgtagcaacttgtcattttaatcattcatctaaaacttttatggttattcatggttggactgtaactggaatgtatgaatcatgggtacctaaattagtagcagctttatataaacgagaacctgattctaacgttattgttgtagattggttatcaagagctcaagaacattatccagtttctgcaggatatacaaaattagttggacaagatgtagcaagatttattaattggatggaagaagaatttaattatccacttgataatgttcatttattaggatattcattgggagctcacgctgctgggattgctggatctcttacgaataaaaaagttaatcgtattactggattagatccagcaggacctaattttgaatatgcagaagctccatcaagactttctccagatgatgctgatttcgttgatgttcttcatactttcactagaggatctccaggacgatctattggaatccaaaagccagttggacatgtagatatttatccaaatggaggaacatttcagccaggttgtaatattggagaagcaattagagtcatagcagaaagaggtttaggtgatgtcgatcaacttgttaaatgttcccatgaaagaagtattcatttattcattgattcacttttaaatgaagaaaatccatcaaaagcatatagatgttcttcaaaagaagctttcgaaaaagggctttgtttatcatgtagaaaaaatagatgtaataatttaggttatgagataaataaagttagagctaaaaggagttcaaaaatgtatttaaagacaagatcacaaatgccatataaagtttttcattatcaagtaaaaattcacttttcaggaacagaatcagaaactcatactaatcaagctttcgaaatttcattgtacggaacagttgcagaatcagaaaatattccttttaccttaccagaagttagtactaacaagacatattcatttttaatttatactgaagttgacattggagaattattgatgttaaaattaaaatggaaatctgattcttacttttcatggtcagattggtggtctagtccaggatttgcaattcaaaaaattagagtgaaggcaggtgagactcaaaaaaaggttattttttgttctagagaaaaggtttcacatcttcaaaaaggaaaagcaccagctgtttttgtaaagtgtcatgataaaagtcttaataaaaaatcagga

SEQ ID NO: 5169 - DNA, 1425 bp, Artificial Sequence
  derived and/or modified sequence
atggagagcaaagctctcctcgtcttgacacttgctgtgtggttacagtccctcactgcaagcagaggaggcgtggcagcagctgatcagagacgggatttcattgacattgaaagcaagttcgcactaaggacgcccgaagacactgcagaggatacctgccacctgatcccaggcgtggcagagtccgtggcaacctgccacttcaaccacagtagcaaaaccttcatggtgatccacggttggacagtaacagggatgtatgaatcctgggttcccaagctcgtcgctgccctttataaaagagagccagactctaatgttatcgttgttgactggctttcgcgcgcgcaggagcattaccccgtttcagccgggtatactaagctcgtgggccaagatgtggctcgatttataaactggatggaggaagagttcaattatcccctggacaacgtgcatctactgggctactcactcggggcgcatgctgcagggatcgccggcagtctgacgaataagaaggtcaaccgcattaccggcctcgatccagcaggtcctaattttgaatatgcagaggccccctctcgattgtccccagatgacgctgacttcgtagatgtcctgcatacattcaccagaggttcacctggaagatctattggcattcagaagcctgtaggccacgtggatatataccctaatggcggaacattccagcccgggtgtaacatcggcgaggccatccgcgtgatcgccgaaagggggttaggggacgttgaccaactggttaagtgttcccacgaacggtcaatccacctgtttatcgattcgctgttgaacgaagaaaatccttctaaggcatacagatgctcaagcaaggaagcattcgaaaagggtctatgcctgtcttgccgcaagaatcggtgtaataatctaggatacgagatcaacaaggttcgtgcaaagagaagctcaaagatgtacctgaagacaaggagtcagatgccatacaaggtctttcactatcaggtgaagattcacttctcgggcaccgagtccgagactcataccaaccaagccttcgagataagcttatatgggacagtagctgaaagcgaaaacatcccattcactttgcctgaagtgtctaccaacaagacttattcttttctgatctataccgaggtcgatattggggagctgttgatgctgaagttgaagtggaaatcagactcctacttcagctggtccgactggtggagctcgccagggtttgcaattcaaaagatccgcgttaaggcaggagaaacccaaaagaaggtaatcttttgttctagggaaaaagtttctcatctgcagaaggggaaggcccccgccgtgtttgtgaagtgccatgacaaatcactgaacaagaaaagtggc

SEQ ID NO: 5170 - DNA, 1425 bp, Artificial Sequence
  derived and/or modified sequence
atggagagcaaggctttactggttttgacgctggccgtctggttgcagtccctcacagctagccgcggtggcgtcgctgccgccgatcagaggcgcgatttcatagatatcgaatcgaagtttgcattacgaacgccagaagataccgcggaggatacatgtcatctgatcccaggggtggcggagtccgtggccacatgccactttaaccattctagcaaaaccttcatggttatccacggctggacggttaccggaatgtacgagtcatgggtgccgaaattggtggccgctttatacaagcgcgaaccggactcgaatgtgattgtggtggactggttgtcgagagctcaggaacactacccagtttcagcaggctacaccaagttggtgggacaggatgtggcccgctttatcaactggatggaggaagagttcaactatccactggataacgtacacctgctgggttacagcttgggcgcccacgccgccggaattgcgggtagcctgaccaacaagaaagtaaataggattacaggcttggaccccgctggaccgaacttcgagtacgccgaagccccaagcagactttcgcccgacgacgctgattttgtggacgttttgcacactttcactcgcggatcaccgggaaggagcatcggaatacagaagcctgttggccatgtggatatttaccccaacggaggcacctttcaaccaggctgcaatatcggtgaggcaattcgcgtaatagcggaacgaggactgggcgatgtggatcagttggtgaagtgttctcatgagcgtagcatacacctgttcatcgacagccttttgaatgaagagaacccgtcgaaggcctatcgatgctcctcgaaggaggcatttgagaagggactctgcctgagttgccgcaagaacagatgcaataacttaggctacgaaattaacaaggtacgggcgaaacgtagcagcaagatgtaccttaagacgcgcagccagatgccctataaggtgttccattaccaggtgaagatacactttagcggaaccgagtctgagactcatacgaaccaagcctttgagatttccctgtacggaacagtagctgagtccgaaaacatccccttcaccctgccagaggtctcaacgaataaaacatacagttttctgatttatacggaggtggatatcggagagctcttgatgctgaagttgaagtggaagtcagactcctatttctcgtggtccgactggtggagttcaccgggctttgccatccagaagatccgtgtgaaggccggcgagacgcagaagaaggttattttctgcagtcgcgagaaggtatctcacctacagaaaggaaaagccccagcagttttcgttaaatgccatgataagtcccttaacaagaaatccggc

SEQ ID NO: 5171 - DNA, 1425 bp, Artificial Sequence
  derived and/or modified sequence
atggaatctaaagccttgctcgtccttaccctagcagtgtggctccagtccctcacggcctctcgcggaggggtggctgcagccgaccagaggcgcgacttcattgacattgaatccaagtttgcgctgaggacaccggaggacacggccgaggacacctgtcacctcattcccggcgtcgctgagagcgtcgccacttgccatttcaaccactcctctaagacattcatggtgattcacgggtggaccgtgaccggcatgtacgagtcttgggtgcccaaactggtggctgccctatacaaacgcgagcccgattccaacgttatcgttgttgactggttatctagagcacaagagcactacccagtatcggcaggttacactaaactggtcggacaggatgtagctagattcatcaattggatggaggaggaattcaattatcccctggataacgtacacctgctgggttatagccttggagctcacgccgctgggatagcaggctctctgacgaataaaaaagtgaatcggattactggtctagatccggcaggacccaatttcgagtacgcagaggctccctctcgcctttctccagacgacgccgactttgtcgacgttctccatacatttacaagggggtcccccgggagaagcataggcatacagaaacccgttgggcatgtcgacatttatcccaacggtggcactttccagcctggctgcaacattggcgaagcaatcagggtcattgccgaaagggggttgggggacgtcgaccagctagtgaaatgcagccatgagaggagcatccacctcttcattgattcactgctgaacgaagagaatccgtcaaaggcttatcgttgttcatcaaaagaagcatttgagaagggcttgtgcttgagctgtcggaagaacagatgcaataacctgggatatgaaattaacaaggtcagggctaaaagaagctccaaaatgtacctcaagaccaggagccagatgccttataaagtatttcactaccaggttaaaattcacttctcaggcactgagagtgagacccacactaatcaggcctttgaaatatccctgtatggaaccgttgctgaatctgagaacatccccttcacactgccagaggtatccacaaataaaacgtatagctttctcatttataccgaagtcgacattggcgaactcctgatgttgaagctgaaatggaaaagcgattcgtacttcagctggtccgactggtggagctcaccaggatttgccattcagaaaatccgtgtgaaggcaggggagacacagaagaaggtaattttctgctcacgggaaaaagtctctcacctccagaaaggtaaggctcctgccgtgttcgtgaaatgccatgataaatcactcaataagaagagcggg

SEQ ID NO: 5172 - DNA, 1425 bp, Artificial Sequence
  derived and/or modified sequence
atggaatccaaggccctcctagtgctgacactggcagtgtggctacagtcactgacggcgagcagagggggtgtggccgccgcagatcagcggagagactttatcgacatcgaatctaaattcgctctgcggacacctgaagataccgccgaagacacatgccacttgatacctggggtagctgaatctgtggcaacctgccattttaatcactcctcaaagacgttcatggtcatccacggatggacagtaactggtatgtacgagagctgggtgcctaaactcgtggcagccctgtacaaaagagagccggactccaacgtcatcgtagtagattggctctctagagcccaggagcactacccagtaagcgccggatataccaagctggttgggcaggatgtcgcaagattcattaactggatggaggaggaatttaattacccactcgataatgtgcatctgctagggtatagtctgggggcccatgccgccggtatcgctggctccttgactaacaagaaggtgaataggatcactggcttggatcctgccggacccaatttcgaatacgcggaggcaccaagtcggctatcccccgacgatgcggactttgtggacgtgctccacacctttaccagaggatcccctggcagatccataggcattcaaaaacccgtgggacacgtagatatatatccaaacgggggcactttccagcctggttgcaatattggggaagccatccgcgtcatcgccgagcgcggtttaggagacgtggatcagctggtgaagtgcagccacgaacgctcgatccatctattcatcgatagtctgctgaatgaggagaacccctctaaggcctataggtgctcttccaaggaagcctttgagaaaggcctgtgtctttcctgtagaaagaaccggtgcaataatctgggttatgaaataaacaaggtgagagccaagagatccagcaaaatgtatctcaagactcggagccagatgccatacaaggttttccattatcaggtcaagattcacttttcagggaccgagtccgagacgcatacgaatcaagcttttgagataagtctgtatgggaccgttgccgagtccgaaaacattccttttaccctacccgaagtgtccacgaacaaaacgtactccttcctcatctatacagaagtagacataggggagctgctaatgctgaagctgaagtggaaatccgacagttacttctcatggtccgattggtggtcctctcctgggtttgcgatacaaaaaataagggttaaggccggcgaaactcagaagaaagttatattttgttcgcgcgagaaagtgtcacacttgcagaaagggaaggcaccagcggtttttgttaaatgccatgataaaagcctcaacaaaaagtccggc

SEQ ID NO: 5173 - DNA, 1425 bp, Artificial Sequence
  derived and/or modified sequence
atggagagcaaggcgctcctcgtcctgactcttgcggtgtggctgcagagcctgaccgctagcaggggcggtgtggccgcagcggatcaaagaagagactttatcgacattgagtcgaagttcgcgctgcgtaccccggaggacacggccgaggacacttgccatctgatcccaggagttgccgaatcagtcgccacttgccacttcaaccattcgagcaagaccttcatggtcattcacggatggactgtcaccggaatgtacgagtcgtgggtgccaaaacttgtggcagcactgtacaaacgggagccagattcaaacgtgatcgtggtggactggctgtcgagggcccaagaacactacccagtgtccgcgggatacacgaagctggtggggcaagatgtggccaggttcatcaattggatggaggaggaattcaactacccgctcgacaacgtgcatcttttgggatactcgctgggagctcatgcagctggaattgcgggttcgctgaccaacaagaaagtcaacaggatcaccgggctggatccggccggacccaatttcgaatatgcagaagcaccatctcggctctccccagacgatgccgactttgtggacgtgctgcacacgtttactcggggaagtccgggtcggagcatcggaatccagaagccggtgggacatgttgacatctaccctaacggcggaactttccagccgggttgcaatattggagaggcgatcagagtgatcgccgaaagaggactcggagacgtggaccagcttgtgaaatgtagccacgaaaggtccatccacctgttcatcgactcactgctgaatgaggaaaaccctagcaaggcataccgctgctccagcaaggaggccttcgagaagggcctgtgcctgagctgccggaaaaatcgttgtaacaatctgggatacgaaatcaacaaggtccgagctaagagatcgtcaaaaatgtacctcaaaacccggtcgcagatgccttacaaggtctttcactaccaggtcaaaatacatttctcaggtaccgagtcagaaacccacactaaccaggcttttgaaatctccctgtacggtacggtggcggagtcggagaacatccctttcaccctgcccgaagttagcactaacaaaacttattctttcctgatctacactgaggtggacatcggagagctcttgatgctgaaattgaaatggaagagcgactcgtacttttcctggagtgattggtggagctcaccgggattcgcaatccaaaagatcagggtcaaggcaggcgaaacccagaaaaaggtgatcttttgctcccgggaaaaggtgtcgcacctccaaaaggggaaggctcctgcggtgtttgtgaagtgtcatgacaaatccctcaacaagaagagcgga

SEQ ID NO: 5174 - DNA, 1425 bp, Artificial Sequence
  derived and/or modified sequence
atggagtcgaaggcgcttctggtgctgactctggcagtgtggctgcagtcactgaccgcatcacgcggcggagtcgccgcagcggaccagcggcgcgacttcattgacatcgagtcgaagtttgccttgaggactccagaggacactgcagaggatacttgtcacctgatcccgggagtggcggagtccgtggccacgtgccactttaaccattcgtccaagacctttatggtgatccacggatggactgtgaccggaatgtacgagagctgggtgccgaagttggtcgcggcgctgtacaagagggaaccagatagcaacgtgatcgtggtggattggctgtcgcgggcccaagagcactacccggtgtcggcggggtacactaaactggtgggacaggacgtcgcaaggttcatcaattggatggaggaagaattcaattaccctctggacaatgttcacctcctgggctactcgcttggagcgcacgcagcgggtatcgccggatcactcactaacaagaaggtcaaccgcatcactggactggatcctgccgggccgaatttcgagtacgccgaagcaccaagcaggctgtcgccagatgacgctgacttcgtggacgtgctgcataccttcacccgcggatcaccggggcggtcgatcgggatccaaaaacctgtcggccacgtggatatctatcctaacggagggacctttcagccaggctgtaatatcggggaggccatccgggtgatcgcggaacgcggactcggagatgtcgaccaactggtgaagtgctcacacgagaggagcatccacctgttcattgacagccttctgaacgaggaaaatccgtcgaaggcgtatcgctgttcttcaaaggaggcgttcgagaaaggactctgcctgtcctgccgcaagaacaggtgcaataacctgggttacgagatcaataaagtcagagccaaacggtcaagcaagatgtacctcaagacccgctcccagatgccttataaggtgttccactatcaggtgaagatccatttctcgggaaccgagtcagaaacgcataccaatcaggcgtttgaaatctcgctgtacggcacggtggctgaatcggagaatatcccattcactctgccggaagtgtcgactaacaaaacctactccttcctgatctacaccgaagtcgatataggagaactgctcatgcttaaactcaaatggaagtccgacagctatttctcctggtcggactggtggtcctccccgggcttcgcaatccaaaagatccgagtgaaggccggagaaacccaaaagaaagtgatcttttgctcccgtgaaaaggtcagccatctccagaaaggcaaagcccccgccgtgtttgtgaagtgccatgataagtccttgaataagaaaagcggt

SEQ ID NO: 5175 - DNA, 1425 bp, Artificial Sequence
  derived and/or modified sequence
atggaatctaaggcactgctcgtgctgacgcttgcagtgtggctccagtcactcacggcctcgaggggcggcgttgccgctgcagaccagcggcgcgattttattgatatcgaaagtaaatttgccctgcgaacacccgaggacaccgcagaagacacgtgtcacctgattccgggtgtcgctgaaagtgtagccacctgccacttcaaccattccagcaaaaccttcatggttatccacggttggaccgtgacaggtatgtacgaatcttgggtgcccaaactggtggcggccttgtataagagggagcctgattctaatgtgatcgtggtggattggctttcacgggcacaggagcactaccccgtgagtgccggctacaccaaactggtgggtcaagatgtggcccggttcatcaactggatggaggaggaattcaattaccccctggataatgttcatctgctgggttattccctcggcgcccacgccgccggcatcgccggctccctgaccaacaagaaagttaacaggatcaccggtctggaccctgcaggacctaactttgagtacgctgaagcaccgtcccgattgagtcctgacgacgccgatttcgttgatgtgctgcatacctttacaaggggatccccaggaagaagtattggcatccagaagccagtggggcatgtcgacatttacccaaacggaggcacttttcagcccgggtgcaacataggagaggctatcagagtgattgcagagagaggactcggtgacgttgaccaactcgtcaagtgctctcacgagcgcagcatccacctgttcatcgacagcttgctgaacgaggaaaacccttccaaagcctatcgctgcagcagcaaggaggcgttcgaaaagggattgtgcctctcatgtcggaagaaccgctgtaacaaccttggctacgagatcaacaaggtgcgggcaaaaagatcttccaaaatgtaccttaagacccggagccaaatgccttacaaggtttttcattaccaggtgaaaattcatttcagcggcaccgagtccgagacacacaccaatcaggcgtttgagatcagcctgtatggaaccgtggcagagtctgaaaatatcccctttaccctgcccgaagtgtcaaccaataagacctacagttttctgatttacacggaagtggacatcggggagctgttaatgcttaagctgaagtggaaatccgactcttacttcagttggtccgactggtggagctcacccggcttcgcaatacagaaaattcgggttaaggccggggagacacagaaaaaggtgatcttctgtagccgggaaaaggtgtctcacctccagaagggcaaggctcccgccgtgtttgtgaaatgtcacgataagagcctgaacaagaaatctgga

SEQ ID NO: 5176 - DNA, 1425 bp, Artificial Sequence
  derived and/or modified sequence
atggagtctaaggcactgcttgtgcttactctggcagtgtggcttcagtcccttactgcgtccagaggaggggtggcagcagccgaccaaaggagggacttcatcgatatagaaagcaagtttgcccttcggacccccgaagatactgcggaggatacttgccaccttattccaggagtcgcagaatcagtcgcaacttgtcacttcaaccattccagtaagacgtttatggtgatccacgggtggaccgtgaccggaatgtacgaaagctgggtgcctaagctcgtcgcagcactgtacaagcgcgaaccagactcgaacgtcatcgtcgtcgactggctttccagagcacaagagcattaccctgtgtcagcaggttacaccaagctggtcggacaagacgtggcacgtttcattaactggatggaggaagaattcaactacccactggacaacgtccatcttctggggtactcgttgggtgcgcatgcagcaggcattgccgggtcactgaccaacaaaaaggtcaatagaattaccgggttggatccagccggaccgaactttgagtacgcagaggcaccttcaagactctcaccggacgacgctgactttgtggacgtccttcacacctttactaggggctcgcctggtcgctcgatcgggattcaaaagccggtgggacatgtggatatctatcctaatggcggcaccttccaaccaggctgtaatatcggggaagcaattcgagtgatagccgaacggggcctgggggacgtggatcaacttgtgaagtgtagccacgagcgcagcatacatctcttcattgattccctgctcaacgaagagaatccttcaaaggcctaccggtgctcgagcaaggaagcattcgaaaagggactgtgtctctcatgccgcaaaaacaggtgtaataacctgggatacgagatcaataaggtccgtgcgaagagatcgagtaagatgtatcttaaaactagaagccaaatgccatacaaagtgttccattaccaagtgaaaattcatttctcagggaccgagtcagaaacccacacgaatcaagcatttgaaatatcactgtacggcacggtggccgagtcggaaaacattccctttaccctccctgaagtgagcacgaacaagacttattcgtttctcatttacactgaagtggatatcggagagctgctgatgttgaaactcaaatggaagagcgattcgtacttctcatggtcagattggtggtctagccccggcttcgcaatacagaagattcgggtgaaggcaggtgaaacccaaaagaaggtgatcttttgcagccgcgagaaggtgagccatctccaaaagggaaaggctcccgcagtgttcgtgaagtgtcatgataagtccctgaacaagaagtcggga

SEQ ID NO: 5177 - DNA, 1425 bp, Artificial Sequence
  derived and/or modified sequence
atggaatccaaggccctgttggttctcacacttgcagtgtggctccagagcctaactgcatccaggggaggcgtggctgcagccgatcagcgacgcgattttatagatatcgagtcaaaattcgccctgcgcactcctgaagacactgctgaggatacatgccacctcatacctggcgtcgccgaatccgtggccacatgccatttcaaccacagttccaaaacctttatggtcatccatggttggaccgtgaccggcatgtacgagtcttgggtgccgaaactggttgccgccttgtataagagagagcccgactccaacgtgatcgtagttgattggcttagtagagcccaggaacactatcctgttagcgccggctacaccaagttggtcggccaggatgttgccagatttatcaactggatggaggaagagttcaactaccctttggacaacgtgcacctcctgggctacagtcttggagcgcacgcggctggaattgccggaagcttgacaaataagaaagttaaccggatcaccgggcttgaccctgccgggcctaacttcgagtacgctgaagctccttccaggctcagtccggacgacgcagacttcgtcgatgtgctccatacttttacgaggggcagcccagggaggtccatcggtatccagaagcctgtgggtcacgtcgacatctaccctaatggagggacatttcaacctggctgcaacatcggcgaagcgatccgggtaatcgctgagcgtggattaggcgacgtagatcagctagttaagtgtagccatgaaaggtcaatccacctatttatagatagtctcctgaacgaggagaacccatcgaaagcctatcggtgtagcagcaaagaggcatttgagaaaggactctgcctttcctgcaggaagaatcgatgtaacaacctcggatatgaaatcaacaaggtgcgcgctaagagaagttcgaaaatgtaccttaagacccgctcacagatgccttacaaggtgtttcactaccaggtgaagattcatttttctgggaccgagagcgaaacacacacgaatcaggcatttgagattagcctgtatgggaccgtggctgagtccgagaacatcccattcacgttgcccgaggtgagtactaacaagacatattcgtttctcatctacaccgaggtcgatatcggagaactgctcatgctaaagctcaagtggaaatctgatagctacttcagctggagtgactggtggagttctccggggtttgccattcaaaaaattcgcgtgaaggcgggtgagacgcagaagaaggtaatcttttgttctcgtgagaaggtgagtcacctccagaagggcaaagcccctgcagtgttcgtgaagtgccatgataaaagtttgaataaaaaatccggc

SEQ ID NO: 5178 - DNA, 1425 bp, Artificial Sequence
  derived and/or modified sequence
atggaatctaaggctctgttagtgctgaccttggctgtctggcttcagagcctcacggcgtcccgaggtggcgttgcagctgcagaccaaagacgagatttcattgacattgagtcaaagttcgcactacgtacccctgaggatactgccgaggatacctgtcacctgatccccggggtggccgagtccgtggctacgtgtcactttaatcactctagtaaaacgttcatggtgattcatggctggaccgtcactgggatgtacgaatcatgggtgccaaagttagttgccgcattgtacaagagggagcctgactccaacgttatcgttgtcgattggctcagccgagctcaggaacactatcctgtgagtgctggatacactaaactggttgggcaagatgtggcccgctttatcaactggatggaggaggagttcaattaccctctcgataacgtacacttgcttggatactccctgggcgcccacgctgctggaattgcaggatccttgacaaacaaaaaagtgaataggataactggactggatcccgccgggcccaacttcgaatacgctgaggcaccttctaggctgtctcccgacgatgcagatttcgtggacgttctacacacctttacgcgcgggtccccgggcaggagcattggcatccagaagccggtcgggcatgtcgacatttatcctaatgggggcacattccagcccggctgcaatattggtgaggcgataagggtgatcgctgagcggggcctgggtgatgtggatcagctagtgaaatgctcccatgagagatccattcacctctttatcgattccttgctcaacgaggagaatccttcaaaagcttatcgatgcagctctaaggaagctttcgagaaaggcctctgtctgtcctgtaggaagaacaggtgtaataatctgggttacgaaatcaataaggtacgggcgaagcggagctccaagatgtaccttaagacgcgttcacagatgccttacaaggtgttccactaccaagtcaagatccacttttctggcaccgaaagcgaaactcacaccaaccaagcgtttgaaatttccctctacggcacagttgccgagtctgaaaatattccctttacgctgcccgaagtctccaccaataaaacatacagcttcctgatctataccgaggtggacattggcgaactcctgatgctgaaactgaaatggaagtctgactcctattttagctggtccgattggtggtcctcacccggctttgcgattcaaaaaatcagagtaaaagccggggagacccaaaaaaaagtcatattctgcagtagagagaaggtgagtcatttgcaaaagggcaaggccccggccgtgtttgtcaaatgtcacgacaaaagcctgaataagaagtcgggt

SEQ ID NO: 5179 - DNA, 1425 bp, Artificial Sequence
  derived and/or modified sequence
atggaaagtaaagcccttttagtgcttaccttggcggtatggctgcagagccttacagcgtctaggggtggggtcgctgcagctgatcagagaagggactttattgacatagagtccaagtttgcgctgcggacgcctgaggacaccgccgaggatacttgtcacctcatccctggcgtagccgagagcgtcgccacctgccactttaaccactcgtccaagactttcatggtgatccatggctggaccgtcacaggcatgtatgaaagctgggtccctaaactggtcgcggctttgtacaaacgggaaccagactccaacgtaattgtggtagattggctctcccgggcccaagaacattacccagtctcggccggttacaccaagctggtcggccaggatgttgctcgtttcataaattggatggaagaagagtttaactacccgctggataacgtgcacctgttaggttatagcctcggggctcatgccgcgggaatcgccggctctctaaccaataaaaaggtgaaccgcatcactggcctggatccagccgggcccaacttcgagtatgctgaggcacccagtaggctgtctccagatgatgccgactttgtggatgtgctccacacttttactcgtgggagtccagggcggtcaattgggatccagaagccagtggggcacgtagacatttatccaaatggcgggacatttcagcctggatgtaatattggcgaagctatcagagttattgccgagcgggggttgggggacgtggaccaacttgtgaagtgtagtcacgaaagatccatacacctgttcatcgactccttgctaaacgaggaaaacccgtccaaggcctacagatgcagttctaaggaggctttcgagaagggcctgtgtttatcatgcagaaagaaccggtgtaataacctgggatatgaaattaataaagtgcgagccaagagatcaagtaagatgtacttgaaaactcgctctcaaatgccttataaagtcttccactaccaggtcaagatacatttcagtggaactgaaagtgagactcataccaatcaggccttcgagatttctctgtacggaacagtggcagagtctgaaaatattcctttcacccttcccgaagtgagcacaaataagacctatagtttcctgatctacactgaggtcgacatcggcgagctactgatgctaaagctgaagtggaaatcagatagctacttctcttggtctgactggtggtcgagcccggggtttgcgatccaaaagatccgagtgaaggctggagaaactcagaaaaaggttatcttttgttccagggagaaggtgagtcatctgcagaaaggcaaagcccctgccgtgttcgtgaagtgtcatgataaaagcctcaacaaaaagagcggg

SEQ ID NO: 5180 - DNA, 1425 bp, Artificial Sequence
  derived and/or modified sequence
atggaatccaaggcgctcctggtgctcactctggctgtttggttgcaaagcctgaccgcaagccgcggcggggtggcggccgccgaccagcgccgcgactttatcgatatcgaatcgaagttcgcactccggaccccggaggacaccgcggaggacacttgccatctgatcccgggagttgcagagtcggtggccacctgccacttcaaccattcctcaaaaactttcatggtcattcatggctggaccgtcaccggaatgtacgaatcatgggtcccgaagctcgtggccgcgctttacaagagagaacctgacagcaacgtgatcgtcgtggactggctgagccgagcccaagaacattacccggtgtcggccggatacaccaagctggtgggccaagacgtggcgcgattcattaactggatggaggaagagttcaactacccccttgacaacgtccacttgctgggatactcgctcggagctcacgcagctggtattgccggatcactgactaacaaaaaggtgaaccggatcactggattggatccggccggcccaaacttcgaatacgccgaagccccgagcagattgtccccagatgacgccgatttcgtggacgtgctgcacacctttaccaggggatccccgggccgctcgatcggaatccagaagcccgtcggacacgtggacatctatcctaatggaggtactttccagccgggatgcaacatcggtgaagcgattagggtgatcgccgagagaggcctcggcgacgtggatcaattggtgaaatgttcccacgaaagaagcatccatctcttcattgactcactgctgaacgaggagaaccccagcaaggcctaccggtgctcatcaaaagaagcattcgaaaagggactctgtctgtcctgccggaaaaatcgctgcaacaacctcggctacgaaatcaacaaggtgcgcgctaagagaagctcaaagatgtaccttaagacccgcagccagatgccgtacaaggtctttcactaccaggtgaagatccacttctcggggaccgagtcagaaacgcatacgaaccaggccttcgagatttcgctgtacggaaccgtcgcagaatccgaaaacatcccgtttactctgcctgaagtttccaccaataagacctactcttttttgatctacactgaggtcgacatcggagagttgcttatgctcaagctcaaatggaagtcggactcatacttctcgtggtccgactggtggtcctcgccagggttcgctatccagaagatccgcgtgaaggcaggggagactcaaaagaaggtcattttctgctcccgcgagaaggtgtcacatctgcagaagggaaaggcgccggcggtgtttgtgaaatgccatgacaagtccttgaacaagaagagcgga

SEQ ID NO: 5181 - DNA, 1425 bp, Artificial Sequence
  derived and/or modified sequence
atggagagtaaggcgctgctggtgttgacactggctgtttggcttcagtccctcaccgccagtaggggcggagttgcagccgccgaccagcgcagggacttcatcgatatcgaaagcaagttcgcgctccgcaccccagaggatacggcagaagacacctgtcatctcatccccggtgttgccgagagtgtggccacttgtcatttcaaccactcatctaaaaccttcatggtgatccacggttggacagtcaccggcatgtacgaaagctgggtgcctaagttggtcgcagccctgtataagcgcgaaccagattctaacgtgatcgtcgtggattggctgtctagagcgcaggaacactacccagtgtcagccggctataccaagctcgttggccaggatgttgccaggttcattaattggatggaggaggaatttaactatccacttgataatgtccatctcctcggatactccctgggagctcacgccgccggcatcgccggatctcttactaataaaaaggtgaatagaatcactggacttgaccccgccggccccaacttcgagtatgctgaagcgccatcccgcctctcacctgatgacgctgactttgtggatgtgctgcacaccttcacgagaggcagcccaggtcgctccatcggtatccagaagcccgtaggacacgtcgacatttaccccaacggtggcaccttccaaccaggctgtaacatcggcgaggccatacgcgttatcgccgagaggggtttgggtgatgttgatcaactggttaagtgttctcatgaacgcagtattcatcttttcatcgattccctgctcaacgaagagaacccctcaaaagcgtaccgctgcagcagtaaagaggcgtttgagaagggcctgtgtctctcatgtaggaagaatcgctgcaataacttgggatacgagattaacaaggttagggctaagaggagctctaagatgtatcttaaaacgaggtctcaaatgccgtacaaggttttccactatcaggtcaaaatccatttttctggcacagagagcgagacgcacacaaaccaggcatttgagatcagtctgtacggcactgtcgcagaatccgaaaacatcccgtttacacttccagaggtgtcaaccaataagacatactcatttctgatctatactgaggtggatatcggtgaattgctgatgctcaaattgaagtggaaatccgattcatatttctcctggagcgactggtggtcttcccctggatttgcaatccaaaagatcagggtgaaggccggagagacacagaagaaagttatcttctgtagtagagagaaggtatctcacctgcagaaaggaaaggcccctgcggtgttcgtaaagtgtcacgataagagcctcaacaagaaaagcggt

SEQ ID NO: 5182 - DNA, 1425 bp, Artificial Sequence
  derived and/or modified sequence
atggagagtaaggctctactggtgcttacactagctgtctggctccagagcctgaccgcgtccagggggggagtggccgcagctgaccagagaagggattttatcgacatcgaaagcaagtttgcactgcggacccccgaagatactgccgaggatacctgtcacctgattcccggggtggcagaatctgtggcgacctgtcacttcaaccacagctctaaaacctttatggtcatccacggctggacagtgactgggatgtatgagtcctgggtgcccaaactcgtggcggcactttacaagagggaacccgacagcaatgtgatagtggtggattggctgagcagggcacaggaacactatcctgtgagtgctgggtataccaagctcgtgggccaagatgtggccaggttcatcaactggatggaggaggaatttaactatccactggataacgtgcaccttttgggatacagccttggggcgcacgcggccggcattgcgggatctcttacaaataagaaagtgaaccgaattacggggctggacccagctgggcctaacttcgagtatgccgaggcaccctctcggctgtcacctgacgatgcggacttcgttgacgtgctgcacaccttcacccggggctccccaggtcgttccatcggaattcagaaacccgtggggcacgtggatatctaccccaacggaggaaccttccaacccggctgcaacattggggaagcaattcgggtcattgctgagagaggactgggagacgtggatcaattggttaagtgctcccacgaaagatcgatacatctgttcatcgactctttattaaacgaggagaacccctctaaagcgtatcgatgctcttccaaagaggcctttgaaaaggggctatgcctgagctgccgaaagaaccgctgcaacaaccttggatacgaaattaataaagtgagggcaaagcgctccagcaagatgtacctgaagactcgctctcagatgccgtacaaggtgtttcactaccaggtgaagatccacttttccggtaccgagtccgaaacacacaccaaccaagcttttgagatctctctttacgggactgtggccgagtccgagaatattccgttcacgctgcctgaggtttcgacaaataaaacctactcatttctgatttacacggaggtcgatataggtgagctgctgatgctgaagttgaagtggaagagcgactcctacttttcatggtcagattggtggagctcccccggctttgcaatacagaaaatcagagttaaagctggagagactcagaagaaagtgattttctgcagccgagagaaagtgagccacctccagaagggcaaagctcctgctgtgttcgtaaagtgccatgataagagcttaaataagaaatctggc

SEQ ID NO: 5183 - DNA, 1425 bp, Artificial Sequence
  derived and/or modified sequence
atggagtcaaaggctctgctagtgctcaccctcgctgtgtggctgcagtcgctaacggcctcacggggcggggtggccgctgcggatcagcggcgggatttcatcgacattgagagtaaatttgccctgagaactcccgaggatactgcagaagacacctgccacctgatccccggagtggccgagagcgttgcgacctgtcattttaatcacagctcaaaaaccttcatggttattcacgggtggaccgttaccgggatgtacgagtcctgggtgcccaaattggttgcagccctgtacaaacgagaacccgacagtaacgttattgtggttgactggctctcacgggctcaggaacactatcccgtgagcgctggctataccaaactcgtgggacaggacgtcgctaggttcattaactggatggaagaagaattcaattaccccctggataacgtacatctgcttggatattcactaggcgcgcatgccgcagggatcgctgggtctctgacaaataaaaaagtcaataggattaccggcctggacccagccggacctaatttcgaatacgccgaagcaccatctcgcctgtcccctgacgacgctgattttgtggatgtcctgcatacattcactcgggggtcaccaggaagaagcataggaatccagaagccagtgggacacgtcgacatctacccgaacggtggcacatttcagcccgggtgcaacataggggaagccatcagggtgatcgcagaacgtggactgggcgatgtggatcagctggttaagtgttctcacgaaagaagcatccatctcttcattgactctctgctcaacgaggagaatcccagtaaagcatacaggtgctcgagcaaggaggcattcgaaaagggcctctgcctcagttgccgaaaaaaccgctgtaacaacctgggctacgaaattaacaaggttcgcgccaaacgatcatctaagatgtacttaaaaacacggagtcagatgccatacaaagtgtttcactaccaggttaaaatccatttctccggcacggagtcagaaacccacactaatcaggcttttgaaattagcctctatggcacagttgccgaaagcgaaaatatcccttttacgttgcccgaggtgagcacgaataaaacctatagtttcttgatttatactgaagttgacataggggagctgcttatgcttaaactgaaatggaagtccgactcctacttcagctggagcgactggtggtccagtccaggatttgctatacagaagattcgggtgaaggctggggaaacccagaagaaggtgattttctgctccagagagaaggtgtcccacctacagaaaggcaaggcccctgccgtgttcgtgaagtgccatgataagtctctgaacaaaaaatccggc

SEQ ID NO: 5184 - DNA, 1425 bp, Artificial Sequence
  derived and/or modified sequence
atggaatccaaggctctcttggtgctcaccctggctgtgtggctgcagagcctgaccgcgtcgcgcggtggtgtggccgcggctgaccagcggagagacttcatcgatattgaaagcaagtttgcgctgcggacccccgaggacactgccgaggatacctgtcatttgatccctggagtggctgaaagcgttgccacgtgccacttcaaccattcctctaagactttcatggtgattcacgggtggaccgtgactggtatgtacgaatcgtgggttcctaagctggtcgcggcactctacaagcgcgaaccggattcgaacgtgatcgtcgtggactggctttcgagagcacaggagcattacccagtgtccgcgggatacactaaactggtcggccaggacgtcgcgcgctttatcaattggatggaagaggaattcaactatccgctggataacgtccatctgcttggatactcgctcggagcccacgcggcaggcatcgcaggaagcctgaccaacaagaaagtgaaccgcatcactggcctggacccggcgggacctaatttcgagtacgccgaagcgccgtcacgactgtccccagatgatgcggacttcgtggacgttctgcacactttcactcggggttcaccgggaagatcgatcgggatccagaagccagtcgggcacgtcgacatctacccaaatggaggcaccttccaaccgggttgcaacatcggtgaagctatccgagtcatcgctgagcgtggtcttggcgacgtggaccagctggtgaagtgcagccacgagcggtcgatccacctctttatcgactccctgctcaacgaagaaaatccgtcgaaggcctaccggtgctcatccaaggaggcgtttgagaaagggctctgcctgtcatgtcgcaagaatcggtgtaacaacctgggctacgagatcaacaaagtgcgcgcaaagcggtcgtccaagatgtatctgaaaaccagatcacaaatgccgtacaaagtgttccattaccaggtgaagatccacttctccggaacggagtcggaaacccataccaaccaagcatttgaaatctcgctgtatggaactgttgccgagagcgagaacatccctttcactctccccgaagtctcaaccaataagacctactcgttcctcatctataccgaggtcgatattggggaactgcttatgctcaaactgaaatggaaatcggacagctacttctcatggtcagactggtggtctagccctggcttcgccatccagaaaattcgggtgaaggccggtgaaacgcagaagaaagttatcttctgttcgcgcgaaaaggtcagccatctgcaaaaggggaaggccccagccgtgttcgtgaagtgtcacgacaagtcactgaataagaagtcagga

SEQ ID NO: 5185 - DNA, 1425 bp, Artificial Sequence
  derived and/or modified sequence
atggaaagtaaggctctgctcgtgctcactctggctgtttggctgcagtccctgaccgcttcacggggcggggtggccgccgccgaccaaagacgggacttcatcgatatcgagtccaaattcgcgctgcgaactcccgaagataccgcggaggatacctgtcacttgatcccgggcgtcgccgaaagcgtcgcaacgtgtcactttaaccatagctcaaaaactttcatggtcatccacggttggaccgtgactggaatgtacgaatcatgggtcccgaagttggtcgctgcattgtacaagagggaaccggattctaacgtgatcgtggtggactggctgtcgcgcgcccaagagcactatccggtcagcgccggatacaccaagctcgtcggacaggatgtggcccgcttcattaactggatggaggaagagtttaactaccccctggacaatgtccacctgctcggatattcgctgggagcccacgcagctggaatagcaggatccctgactaacaagaaagtgaatcgcattactgggctcgaccctgcaggccctaacttcgagtacgctgaggcaccgtcgcgcctgagcccggacgacgcggacttcgttgatgtcctgcatactttcacgcggggatcccctggccggtcaatcggtatacaaaagcctgtgggccacgtcgacatctacccgaacgggggaactttccagccagggtgtaatatcggagaggcaatccgcgtgatagcggagcggggactgggagatgtggaccagttggtgaagtgctcacatgaacggtcaatccaccttttcatcgattcactgctcaatgaggaaaatccttcaaaggcatacaggtgctcgtcaaaggaggctttcgagaagggtctgtgcctgtcgtgtcgaaaaaaccgctgcaacaacctgggctacgaaatcaataaagtgagagccaagagatcttcaaagatgtacctcaaaaccagatcccagatgccgtacaaggtctttcattaccaggtgaaaatccacttctcgggcacggagagcgagactcataccaaccaggcattcgaaatttcgttgtacgggacggtggcggaatcggagaacatcccttttacgcttccggaggtgtcgaccaataagacttatagctttctgatctacaccgaagtggacatcggagagcttctcatgctgaagctgaagtggaagtcagattcgtacttctcctggagcgactggtggtcctcgccaggctttgccatccaaaagatccgagtgaaggccggagaaactcagaagaaggtgatcttctgctcccgcgagaaagtctcacatctgcaaaaaggaaaagccccggccgtgttcgtgaagtgccacgataagagcttgaacaagaagagcggg

SEQ ID NO: 5186 - DNA, 1425 bp, Artificial Sequence
  derived and/or modified sequence
atggaatccaaagctcttctcgtactgactctcgcagtgtggctgcagtccctcaccgcctccaggggtggggtcgctgccgccgaccagaggcgggacttcattgacattgagtcaaaatttgctctgcgtacaccagaagacacagccgaagacacatgtcacctcatacctggagtcgccgagtctgtggctacatgccatttcaaccacagctccaaaacctttatggttatccatggttggacagtgacaggcatgtacgaatcatgggtgcccaaattggttgctgccttatataaacgggagcccgattccaatgtgatcgtcgtcgactggctgtcccgggcccaggagcactatccggttagtgcagggtatactaaactggtgggccaggatgttgccagattcataaactggatggaggaggagttcaattatccactggataacgttcacctgttgggctactcgctgggcgctcatgctgcggggatagccgggagcctcaccaacaagaaggtaaaccgaattaccggactggatcctgcaggacctaactttgaatacgctgaggccccgtcccgcctgtctccggatgacgccgatttcgttgatgtcctgcacacttttacccgcgggagtccgggccgctcgattggtattcagaaacccgtgggccatgtggacatttaccccaacggagggacattccagcccggctgcaacattggagaagccataagagtaatcgccgagagaggcctgggcgatgtcgaccagcttgtgaaatgctctcatgagagatccatccatctattcatcgacagtctgctgaacgaagaaaatccctcaaaggcctatagatgttcgtctaaggaggctttcgagaagggattgtgcctgtcttgcagaaagaacaggtgcaacaatctcggttatgaaattaacaaagtgcgagccaagagatctagcaagatgtatcttaagaccaggtcacagatgccttacaaggtatttcattatcaagtcaaaatccacttctctggcactgaatccgaaacacacaccaatcaggcattcgagatttcactgtatggtaccgttgctgagtctgaaaacatcccatttaccttgccagaggtctcgaccaataaaacatattcattcctcatttacactgaggtagacatcggagaacttctgatgctgaagttgaaatggaagtcagattcgtactttagttggagcgactggtggagcagccccggatttgcgatacaaaagattcgcgttaaagccggagagacgcagaagaaggtgattttctgttctagagaaaaagtgtctcatttacagaaggggaaagcccctgcggtgtttgttaagtgccacgataaatcgctgaataaaaagtccggg

SEQ ID NO: 5187 - DNA, 1425 bp, Artificial Sequence
  derived and/or modified sequence
atggagagcaaggcactcctggtgcttaccctggccgtgtggctccaatcccttactgcatcgagagggggcgttgcagcagccgatcagagaagagactttattgacatagagtcaaagtttgcactgcgaaccccagaagataccgcggaagatacttgccatttgatcccgggcgtcgcggagtccgtggccacctgtcacttcaaccattccagtaagacctttatggtgattcatggatggaccgtcaccggtatgtacgaatcatgggtgcccaaactggtggcggccctgtacaaacgagaacctgattctaacgttattgttgtcgattggctctcaagggcacaggaacattaccctgtatccgccggctacaccaaacttgtgggacaggacgtggccagattcataaactggatggaggaggagtttaactaccccctggataatgtgcacctgctgggttactcacttggcgcacatgccgcgggaatcgctggttcgctgactaataagaaagtgaatcgcattacgggattggatcctgcaggtccaaatttcgagtacgccgaggcgccttcacgcctgtcccctgacgatgccgactttgtggacgtgcttcacacctttacgagaggatcacctggacgcagtattgggatacaaaagccagtgggccacgtcgacatttatccaaatggagggacgtttcagccagggtgcaacattggtgaagcaattcgcgtgatcgccgaacgcggtttgggcgatgtggaccagcttgtcaaatgttcgcatgaacggtcgatccacttgttcattgattccctgctgaacgaagaaaatccgtcgaaagcataccggtgctcgagcaaggaagcattcgagaaaggactctgccttagttgtaggaagaacagatgtaataacttgggttacgagatcaacaaagtgcgtgctaagcggtcatcaaagatgtaccttaagacccggtcgcagatgccctacaaggtgtttcactaccaagtgaaaatccattttagcggaactgaatctgaaactcatactaaccaagcatttgagatcagtctttatggaacggtcgcagaaagcgaaaacattcctttcactcttcccgaagtgtccaccaacaagacctactcgtttcttatctacactgaagtcgatattggagaacttttgatgctgaagctgaaatggaagtcggattcatactttagctggtcggattggtggagttccccaggatttgcaatccaaaagataagggtcaaggcgggggaaactcagaagaaggtcattttctgtagcagagaaaaggtgtcgcatctgcaaaaagggaaggccccagcagttttcgtcaagtgtcatgacaaatcccttaacaagaagtccgga

SEQ ID NO: 5188 - DNA, 1425 bp, Artificial Sequence
  derived and/or modified sequence
atggaatcaaaggctttgctcgtgctcaccctcgctgtgtggctccagtcgttgactgcctcccgcggaggagtggctgctgcagaccagcgccgcgactttattgatatcgaaagcaagttcgcactgcggacgccggaggacactgccgaggacacctgtcacctgattccaggcgttgcggaatcggttgccacctgccatttcaaccactcgagcaaaactttcatggtgattcatggttggaccgtgactgggatgtacgaatcatgggtgccaaagctggtggcggccctgtacaagcgggagcccgatagcaacgtgatcgtggtggactggcttagccgggcccaggagcattacccggtgtctgcgggatacaccaagctcgtcggacaagatgtggcgcggttcatcaactggatggaggaagaattcaattacccactggataatgtgcatctgcttggatattcactgggagcccacgcagcgggcatcgcaggatccctgaccaataagaaggtgaacaggatcaccggcctggatccagcgggtcctaacttcgaatacgcagaagctccttcgcggctctccccggacgacgctgacttcgtcgatgtgcttcacacgttcactaggggatcgcctggacgctcgatcggcattcagaagccggtgggccatgtggatatctacccaaatggaggaacttttcagccgggatgtaacatcggggaagcaatccgcgtcatcgccgagagaggccttggggacgtggatcagttggtgaagtgctcacatgagcgttcgatccaccttttcatcgatagcctgctgaatgaggaaaacccttcaaaggcctaccgctgctccagcaaggaagccttcgagaaggggctgtgcctctcgtgccgcaagaaccgctgtaacaaccttggatacgagatcaacaaggtgcgcgcaaagcgttcctctaaaatgtacttgaaaacgcggagccaaatgccatacaaggtgttccactaccaggtgaaaatccatttctctggaaccgaatcggaaacccacactaatcaggcattcgaaatctccctctacggaaccgtggctgaatctgagaatatcccctttactttgccggaagtgtccaccaacaaaacttattccttccttatctacaccgaggtggacatcggtgagctgcttatgctcaaactgaagtggaagtcggactcctacttcagttggagcgactggtggagctctcccggctttgctatccagaagatcagagtaaaagctggagaaactcagaaaaaggtgatcttttgcagccgggaaaaggtcagtcacctgcaaaaaggtaaggcgccggctgtgttcgtcaagtgccacgataagtcactgaacaaaaagtccggc

SEQ ID NO: 5189 - DNA, 1425 bp, Artificial Sequence
  derived and/or modified sequence
atggagtctaaagcgctgctggtgctcacgcttgcggtctggctccagtcactgaccgcaagccggggaggggtggccgcagccgatcagcgccgggatttcatcgatatcgagagcaaattcgccctccgcaccccggaggacaccgctgaggacacttgccacctgatcccaggagtggcagagtcggtggctacttgtcatttcaatcactcctcgaaaaccttcatggtgatccacggatggaccgtgaccggcatgtacgagtcgtgggtccctaagctggtcgcagcattgtacaagcgagaaccggattcaaatgtgatcgtggtggactggctctcccgcgcacaggaacattacccggtgagcgcaggatacactaagctggtgggacaggatgtcgctcgcttcatcaactggatggaagaggaattcaattaccccctcgacaacgtccatctgctgggatactccctcggcgcacacgccgctgggatcgctggctcactgaccaacaaaaaggtgaacagaattactgggctggacccggctggaccgaacttcgagtacgcggaggccccgtcacggttgtcgcctgatgacgcggatttcgtcgatgtgctgcacaccttcaccagaggatcacccggtcgctcgatcggcatccagaagcccgtcggccatgtcgacatctatccgaacggaggaactttccaaccgggctgcaatattggagaagccattcgggtgattgcagaacgtggcttgggcgacgtagatcagctggtgaagtgctcgcatgagcgatccatccatctgttcatcgacagcctgctcaacgaagagaatccgtccaaggcctaccggtgttcctctaaggaggccttcgaaaaaggactgtgcctgagctgcagaaagaatagatgcaacaatcttggttacgagataaacaaggtccgggccaaaagatcatctaagatgtacctcaagactagatcacagatgccttacaaagtctttcattaccaggtgaagatccacttttctggaactgagtcggaaacccatacgaatcaagcgttcgaaatctctctgtacggcactgtggcggagagcgagaacatcccttttactctgccagaagtctcgacgaacaagacctactccttcttgatctacaccgaagtcgatatcggtgagctcctgatgctgaaacttaagtggaagtcggactcctacttcagctggtcagattggtggagctccccggggtttgccatccagaaaatccgcgtgaaggctggggaaactcagaagaaggtgatcttctgctcacgcgaaaaggtgtcccacttgcagaaaggaaaggctccggcggttttcgtgaagtgtcacgataaatccctgaacaaaaagagcgga

SEQ ID NO: 5190 - DNA, 1425 bp, Artificial Sequence
  derived and/or modified sequence
atggagtccaaggccctcctcgtgctcaccctggccgtgtggctgcagagtctgacagcctcacgcggcggggttgcagcagctgatcagcgtcgcgacttcatcgatattgagtctaagttcgccctccgcacaccggaggacaccgccgaagatacgtgtcatctgatccctggagttgccgagtccgtcgcgacatgccactttaaccactcctcgaagaccttcatggtcatccacgggtggaccgtcactggaatgtacgagtcttgggtgccaaagctggtagcggccctgtacaagagggaaccggattcgaatgtcatcgtggtggattggttgtcccgcgctcaggagcactaccccgtttctgcgggctatactaagctggtgggtcaagacgtcgcccgtttcatcaactggatggaagaagagttcaattaccccctcgacaacgtccacctgctaggctactcactcggggcccatgctgcgggcattgctggaagcctgacgaacaaaaaggtcaatcgaatcaccggcttggacccagctgggcccaacttcgagtacgctgaagcccctagcaggctcagtccggatgacgctgattttgtcgatgttctccacaccttcactagaggctccccgggccgctccatcggcattcaaaaaccggtgggacacgtcgatatctaccccaacggaggcacttttcagcccgggtgcaacatcggggaggcaatccgggtgatcgctgagcgcggccttggtgacgtcgatcagctagttaagtgctcccacgaacgcagtatccacctgttcattgactccctgcttaacgaagagaaccccagcaaagcgtatcggtgttcctcgaaggaggctttcgagaagggcctctgcctgtcttgcaggaagaaccgctgtaataacctgggatacgagatcaacaaagttcgtgccaaacgatccagtaagatgtacctgaaaactcgcagccaaatgccttataaggttttccactatcaggttaagatccacttctcgggaaccgagtctgagactcacacaaatcaggccttcgagatctccttgtatggaaccgtggcagagtctgagaacatcccatttactctgcctgaggtatcgaccaataagacatattccttcctgatctacacagaggtagatatcggtgagctgctaatgctgaagctgaagtggaagtcggattcctacttctcctggagtgactggtggtcttctccgggtttcgcgatccaaaagatccgcgttaaagccggcgagacccagaagaaggtcattttttgctctcgcgagaaagtgtcccacttgcagaaagggaaagcccccgcggtgtttgtcaagtgccacgacaagtcgttgaacaagaagtccggc

SEQ ID NO: 5191 - DNA, 1425 bp, Artificial Sequence
  derived and/or modified sequence
atggagtcgaaagctctcctggtcttgaccctcgctgtttggctgcagagtctcacagccagtcgaggcggagtggcagccgccgaccaaagacgggattttattgacatcgaatccaagttcgccttacgcactcccgaggacactgccgaggacacttgccacctgatcccgggcgtcgctgagtcagtggctacatgtcattttaatcattccagtaagacattcatggtgatccacggatggacagtgacaggtatgtatgagagctgggtccctaaactagtagccgccctttacaagcgcgaacctgacagtaacgtgattgtcgttgactggctctcaagggcacaggagcactacccagtgtcggcaggctacaccaaactcgtgggccaggacgtcgctcggttcatcaattggatggaggaggagttcaattacccactggataatgtgcacctcctgggatacagcctgggcgcccacgctgctggaattgctgggagcctgacaaataagaaggtgaatcgtataaccgggttggatcccgccggccccaatttcgaatacgcagaagcaccctcacgtttgagtccagatgacgcagactttgtggatgttcttcacacatttactagaggtagccccggcagaagcataggcattcaaaaaccagtcgggcatgtggacatttaccctaacggcggaaccttccagcccggatgcaacataggtgaggcaatcagagtgatcgcagagcgcgggctgggagatgtcgaccagctggtaaagtgttcgcacgaacgctccatccacctctttatagacagcctgctaaatgaggagaatccgtctaaagcgtatagatgctcttcgaaggaagcgttcgagaagggtctttgcctgagctgccgcaagaatagatgcaataatctcggatatgaaatcaataaagtcagggcaaaacggagctctaaaatgtatcttaaaacacgtagccagatgccttacaaggttttccattatcaggtgaagattcacttttcaggcaccgagtccgaaacccacacaaaccaagcctttgaaatctcactctacgggaccgtcgcagaatccgagaatataccgtttactcttccagaagttagcaccaacaagacctatagtttcctgatttacacagaagtagacatcggggagctgctaatgctgaagctgaaatggaaatcagatagttatttttcatggagcgactggtggagtagccccgggtttgctatccagaagattagggtaaaagctggggagacgcagaagaaagtgattttttgctctcgcgaaaaagtgtcacacctgcagaaaggcaaggcaccagccgtgtttgtcaaatgccatgataaatccctgaacaaaaagtctggg

SEQ ID NO: 5192 - DNA, 1425 bp, Artificial Sequence
  derived and/or modified sequence
atggagagtaaggctcttctagtgctcactctagctgtctggctccaaagtttgacagcatcaagagggggagtagcggctgctgaccaaagaagagattttatagatatagaatcaaagtttgcattgagaactccagaggataccgcagaggacacatgtcatttgattccaggagttgcagagtctgtcgctacttgccattttaatcactcttctaaaacttttatggttattcatggctggaccgtgaccggaatgtatgaaagttgggtcccaaaactagtggcagcactgtataagcgcgagccagactctaatgttattgtggtcgattggctatccagggcacaggagcactatcctgtgagcgccggatacaccaagttagtgggacaagatgttgctagatttattaattggatggaagaagaattcaactatcccctggataatgtgcaccttttggggtacagcttgggggcccatgctgccggaatcgccggtagtttgaccaataaaaaggttaatcgtatcaccggtttggatcccgcaggaccaaacttcgaatatgcagaggccccttcgcgtttgtcgcctgacgatgctgattttgtcgatgtcttgcacacctttactagagggagccctggcaggtctatcggaattcagaagccagttggccatgtggacatatacccaaatggaggaacttttcaacctggttgtaatattggtgaggctatcagagtcattgccgaaaggggcctaggagacgtggatcaactggtaaaatgctctcatgaaagatctattcacctatttattgactctttattaaacgaggagaacccaagcaaggcctatcgttgttcctccaaggaagcttttgaaaaaggtctctgccttagctgtagaaaaaatcgttgcaacaatcttgggtatgaaattaacaaagttagagcgaagagatctagcaaaatgtacttgaaaactaggagccaaatgccctataaggtcttccattatcaagtgaaaatccatttcagtggcacagagagtgagactcatactaaccaggcttttgaaatttcgttatatggaacagtggcagagagcgaaaatattccgtttacccttccagaagtgtcaactaacaagacatatagctttttaatttatacagaggttgatatcggtgaacttttaatgctgaagttgaagtggaaatcagatagttacttctcctggtccgactggtggtcgtcaccaggatttgctatacaaaaaattcgagtcaaggcaggagaaactcagaaaaaggttatattttgttcaagagagaaggtttcccacttgcagaaggggaaggcgcccgccgtgtttgtgaagtgtcacgataaatcacttaacaagaaaagcggt

SEQ ID NO: 5193 - DNA, 1425 bp, Artificial Sequence
  derived and/or modified sequence
atggaatccaaggctctgctggtgctgactctcgcagtgtggctgcaaagcttgacggccagccgtggcggtgtggctgctgctgatcagcgtcgcgactttattgatatcgagagcaaattcgcactgcgcactccagaggataccgctgaggatacgtgccatctgattccgggggtcgcagagtcagtcgcgacctgccactttaatcactcgtccaagaccttcatggtgatccacggttggacggtgacgggcatgtacgagtcttgggtgccaaagcttgttgccgctctgtataagcgtgaacctgactccaatgtaattgtggtggattggctgagccgtgcgcaggagcactacccagtgtctgcgggctatactaaattggttggtcaggacgtagcacgctttatcaactggatggaggaggagtttaactaccctctcgataacgtccatctgctgggctacagtttgggtgcccatgccgcggggattgcgggatcactaaccaacaagaaggtgaaccgcataactggtctcgatccggcgggtcctaacttcgagtacgcagaagccccatctaggctctctcctgacgacgccgactttgtggacgtgctgcacacctttacgaggggtagccctggtcgcagcattggtatccagaaacccgtcgggcacgttgacatctatcccaatggaggcacattccaaccgggctgtaatatcggtgaggcgattcgagtcatcgcggagcgcggtctgggcgatgtagatcagcttgtgaagtgcagccacgagcgcagcattcatttattcattgatagcctgttgaatgaggaaaatcctagtaaggcctaccgctgctcttccaaggaagctttcgaaaagggtctgtgcttgagctgccgcaaaaatcgctgcaacaatctggggtatgaaattaataaagtgagggctaaacgttccagcaagatgtatctcaagacgcgcagccagatgccttacaaagttttccactatcaggttaagatccatttctccggtacagagtctgagacccacaccaaccaggcgttcgagattagcctttatggtaccgttgccgagagcgagaacattccgttcaccctgcctgaggtctcgactaataagacctatagcttcttgatctacacggaggttgatatcggggaactgctgatgttgaagctgaagtggaaatctgactcctatttcagctggagcgactggtggagcagccctggtttcgccatccagaagatacgcgttaaggctggcgaaacccagaaaaaagttatcttctgtagccgtgagaaggtttcacatctgcagaagggcaaagcgccggccgttttcgtgaagtgccacgacaagtctttgaataagaagtccgga

SEQ ID NO: 5194 - DNA, 1425 bp, Artificial Sequence
  derived and/or modified sequence
atggagtctaaggcccttctggtgctgaccctagccgtgtggctgcagtctctaacagcgagtagagggggtgtggctgccgctgaccagcgcagggattttattgatatcgaaagtaagtttgcccttcgaacacccgaagataccgctgaagatacctgccacctgatccccggcgtagctgaaagtgtggcaacctgccactttaaccacagttccaagacattcatggtcatccacggatggactgtcacagggatgtacgagagttgggtgcccaagctggtggcagctctatataagcgcgagccagacagcaacgtgatcgttgtggactggctcagccgagcgcaggaacactaccccgtgtccgctggttatactaagttagtcggccaagatgttgctagattcatcaactggatggaggaggagttcaactacccccttgataatgtgcatctccttgggtactccctaggagctcatgctgccggtattgccggcagtctgaccaataaaaaagttaatcgcatcacggggctagacccggccggaccgaattttgagtacgccgaagcaccttcgcggcttagccccgacgacgctgactttgtggatgtgctccacactttcacccgaggttctccaggtaggtcaatcgggatccagaagcccgtaggtcacgtcgacatttatcctaacggtggtacctttcagcctggctgtaacatcggagaggcaatcagagtcatagctgagcggggactgggtgatgtggaccagctcgtgaagtgctcacacgagaggtccattcacctgtttatcgacagtttgctgaacgaggaaaaccctagtaaggcctatcgatgtagcagcaaagaagccttcgagaaaggcctctgcctgagctgtcgaaagaataggtgtaataatcttgggtacgagatcaataaagtgagagccaaaagatcctctaaaatgtacctgaagacaagatctcaaatgccatataaggtcttccactaccaagttaagatccacttttcaggaacagaatccgagacgcacacaaaccaagctttcgaaatctccctgtacggaaccgtcgctgagagtgagaatatccccttcaccctgccagaggttagtaccaataagacttattctttcctgatttacacagaggtcgacatcggcgagctgttgatgcttaaattgaagtggaagtcggactcctatttctcatggtcagattggtggtccagccccggcttcgcgatccagaaaattcgagtcaaagcaggagaaacccagaaaaaggtgatattctgtagccgcgaaaaagtcagccaccttcaaaaggggaaggcaccagcggtctttgtcaagtgtcacgataaaagcttaaataaaaaatctggc

SEQ ID NO: 5195 - DNA, 1425 bp, Artificial Sequence
  derived and/or modified sequence
atggagtctaaggcacttctcgtgctgaccctcgctgtctggctgcagagtctgaccgcgtcacgcggcggggtggcggcagcagatcaacgacgagactttattgacattgagtcaaaatttgccctgagaactccagaggacaccgccgaagacacgtgtcatctaatccccggcgtggccgagtcagttgccacctgtcacttcaaccactccagcaaaacattcatggtaattcatggatggaccgtgacaggaatgtacgaaagttgggttcctaagttagtcgctgccctatataagcgggagcccgacagtaacgttatcgtggtcgattggctgagcagggcgcaggagcattatcctgtgagtgctggatataccaagttagttgggcaagacgtggcccgcttcataaattggatggaggaggaatttaattaccctctggacaacgtgcaccttttgggttactccttgggtgcacacgctgctggtatagcagggtccctcaccaataagaaggttaatcgaatcaccggactagaccctgctggaccaaacttcgaatatgctgaggcaccgtcccgcctgtcccccgatgatgccgatttcgttgacgtgctgcacacctttaccaggggaagtccgggaagaagcattggcatccaaaaaccggtcggtcacgtggacatctatcccaatggaggcaccttccagcccggatgtaacatcggggaggcaattcgcgttatcgccgagagaggcctcggcgacgtcgaccagctggtcaagtgtagtcatgagcgctccattcacctgttcattgactccctcctcaatgaggagaatccgagtaaagcttacagatgttcatcgaaggaggcattcgagaagggcctttgcctgtcctgtcggaagaataggtgtaataatcttggttacgagataaataaggtccgggccaagcgctcttccaagatgtacctcaaaactcggtcccagatgccatataaagtgtttcactatcaagtgaaaattcatttctccggtactgaatctgagactcacaccaaccaggccttcgagatcagcctgtatggcactgttgcagaaagtgaaaacattcccttcacactccccgaggtgtctaccaacaagacctacagttttctaatctacacggaggtggatattggcgaactgttgatgcttaagctgaagtggaaaagcgacagctattttagttggagcgactggtggagttccccggggtttgccattcagaaaattagagtcaaggcgggggaaactcagaagaaggtgatcttctgcagtagggaaaaggtgagccatctgcagaaggggaaggcccctgcagtattcgtaaagtgccacgacaaaagtttgaacaaaaagtcaggt

SEQ ID NO: 5196 - DNA, 1428 bp, Artificial Sequence
  derived and/or modified sequence
atggagagcaaggccctgctggtgctgaccctggccgtgtggctgcagagcctgaccgccagcagaggcggcgtggccgccgccgaccagagaagagacttcatcgacatcgagagcaagttcgccctgagaacccccgaggacaccgccgaggacacctgccacctgatccccggcgtggccgagagcgtggccacctgccacttcaaccacagcagcaagaccttcatggtgatccacggctggaccgtgaccggcatgtacgagagctgggtgcccaagctggtggccgccctgtacaagagagagcccgacagcaacgtgatcgtggtggactggctgagcagagcccaggagcactaccccgtgagcgccggctacaccaagctggtgggccaggacgtggccagattcatcaactggatggaggaggagttcaactaccccctggacaacgtgcacctgctgggctacagcctgggcgcccacgccgccggcatcgccggcagcctgaccaacaagaaggtgaacagaatcaccggcctggaccccgccggccccaacttcgagtacgccgaggcccccagcagactgagccccgacgacgccgacttcgtggacgtgctgcacaccttcaccagaggcagccccggcagaagcatcggcatccagaagcccgtgggccacgtggacatctaccccaacggcggcaccttccagcccggctgcaacatcggcgaggccatcagagtgatcgccgagagaggcctgggcgacgtggaccagctggtgaagtgcagccacgagagaagcatccacctgttcatcgacagcctgctgaacgaggagaaccccagcaaggcctacagatgcagcagcaaggaggccttcgagaagggcctgtgcctgagctgcagaaagaacagatgcaacaacctgggctacgagatcaacaaggtgagagccaagagaagcagcaagatgtacctgaagaccagaagccagatgccctacaaggtgttccactaccaggtgaagatccacttcagcggcaccgagagcgagacccacaccaaccaggccttcgagatcagcctgtacggcaccgtggccgagagcgagaacatccccttcaccctgcccgaggtgagcaccaacaagacctacagcttcctgatctacaccgaggtggacatcggcgagctgctgatgctgaagctgaagtggaagagcgacagctacttcagctggagcgactggtggagcagccccggcttcgccatccagaagatcagagtgaaggccggcgagacccagaagaaggtgatcttctgcagcagagagaaggtgagccacctgcagaagggcaaggcccccgccgtgttcgtgaagtgccacgacaagagcctgaacaagaagagcggctag

SEQ ID NO: 5197 - DNA, 348 bp, Artificial Sequence
  derived and/or modified sequence
atggtgatccacggctggaccgtgaccggcatgtacgagagctgggtgcccaagctggtggccgccctgtacaagagagagcccgacagcaacgtgatcgtggtggactggctgagcagagcccaggagcactaccccgtgagcgccggctacaccaagctggtgggccaggacgtggccagattcatcaactggatggaggaggagttcaactaccccctggacaacgtgcacctgctgggctacagcctgggcgcccacgccgccggcatcgccggcagcctgaccaacaagaaggtgaacagaatcaccggcctggaccccgccggccccaacttcgagtactag

SEQ ID NO: 5198 - DNA, 321 bp, Artificial Sequence
  derived and/or modified sequence
atggagagcaaggccctgctggtgctgaccctggccgtgtggctgcagagcctgaccgccagcagaggcggcgtggccgccgccgaccagagaagagacttcatcgacatcgagagcaagttcgccctgagaacccccgaggacaccgccgaggacacctgccacctgatccccggcgtggccgagagcgtggccacctgccacttcaaccacagcagcaagaccttcatggtgatccacggctggaccgtgaccggcatgtacgagagctgggtgcccaagctggtggccgccctgtacaagagagagcccgacagctag

SEQ ID NO: 5199 - DNA, 393 bp, Artificial Sequence
  derived and/or modified sequence
atggagagcaaggccctgctggtgctgaccctggccgtgtggctgcagagcctgaccgccagcagaggcggcgtggccgccgccgaccagagaagagacttcatcgacatcgagagcaagttcgccctgagaacccccgaggacaccgccgaggacacctgccacctgatccccggcgtggccgagagcgtggccacctgccacttcaaccacagcagcaagaccttcatggtgatccacggctggaccgtgaccggcatgtacgagagctgggtgcccaagctggtggccgccctgtacaagagagagcccgacagcaacgtgatcgtggtggactggctgagcagagcccaggagcactaccccgtgagcgccggctacaccaagctgtag

SEQ ID NO: 5200 - DNA, 1386 bp, Artificial Sequence
  derived and/or modified sequence
atggagagcaaggccctgctggtgctgaccctggccgccgccgaccagagaagagacttcatcgacatcgagagcaagttcgccctgagaacccccgaggacaccgccgaggacacctgccacctgatccccggcgtggccgagagcgtggccacctgccacttcaaccacagcagcaagaccttcatggtgatccacggctggaccgtgaccggcatgtacgagagctgggtgcccaagctggtggccgccctgtacaagagagagcccgacagcaacgtgatcgtggtggactggctgagcagagcccaggagcactaccccgtgagcgccggctacaccaagctggtgggccaggacgtggccagattcatcaactggatggaggaggagttcaactaccccctggacaacgtgcacctgctgggctacagcctgggcgcccacgccgccggcatcgccggcagcctgaccaacaagaaggtgaacagaatcaccggcctggaccccgccggccccaacttcgagtacgccgaggcccccagcagactgagccccgacgacgccgacttcgtggacgtgctgcacaccttcaccagaggcagccccggcagaagcatcggcatccagaagcccgtgggccacgtggacatctaccccaacggcggcaccttccagcccggctgcaacatcggcgaggccatcagagtgatcgccgagagaggcctgggcgacgtggaccagctggtgaagtgcagccacgagagaagcatccacctgttcatcgacagcctgctgaacgaggagaaccccagcaaggcctacagatgcagcagcaaggaggccttcgagaagggcctgtgcctgagctgcagaaagaacagatgcaacaacctgggctacgagatcaacaaggtgagagccaagagaagcagcaagatgtacctgaagaccagaagccagatgccctacaaggtgttccactaccaggtgaagatccacttcagcggcaccgagagcgagacccacaccaaccaggccttcgagatcagcctgtacggcaccgtggccgagagcgagaacatccccttcaccctgcccgaggtgagcaccaacaagacctacagcttcctgatctacaccgaggtggacatcggcgagctgctgatgctgaagctgaagtggaagagcgacagctacttcagctggagcgactggtggagcagccccggcttcgccatccagaagatcagagtgaaggccggcgagacccagaagaaggtgatcttctgcagcagagagaaggtgagccacctgcagaagggcaaggcccccgccgtgttcgtgaagtgccacgacaagagcctgaacaagaagagcggctag

SEQ ID NO: 5201 - DNA, 828 bp, Artificial Sequence
  derived and/or modified sequence
atggtgatccacggctggaccgtgaccggcatgtacgagagctgggtgcccaagctggtggccgccctgtacaagagagagcccgacagcaacgtgatcgtggtggactggctgagcagagcccaggagcactaccccgtgagcgccggctacaccaagctggtgggccaggacgtggccagattcatcaactggatggaggaggagttcaactaccccctggacaacgtgcacctgctgggctacagcctgggcgcccacgccgccggcatcgccggcagcctgaccaacaagaaggtgaacagaatcaccggcctggaccccgccggccccaacttcgagtacgccgaggcccccagcagactgagccccgacgacgccgacttcgtggacgtgctgcacaccttcaccagaggcagccccggcagaagcatcggcatccagaagcccgtgggccacgtggacatctaccccaacggcggcaccttccagcccggctgcaacatcggcgaggccatcagagtgatcgccgagagaggcctgggcgacgtggaccagctggtgaagtgcagccacgagagaagcatccacctgttcatcgacagcctgctgaacgaggagaaccccagcaaggcctacagatgcagcagcaaggaggccttcgagaagggcctgtgcctgagctgcagaaagaacagatgcaacaacctgggctacgagatcaacaaggtgagagccaagagaagcagcaagatgtacgaggacagcttcagcgacgccctgcagagcctgcccctgcccagcaaggacagcttcttctgggactag

SEQ ID NO: 5202 - DNA, 1428 bp, Artificial Sequence
  derived and/or modified sequence
atggagtccaaagcactgctcgttctcaccctagcagtgtggctgcagagcctgactgcctcgcggggaggagttgctgcggccgaccagcgccgggactttatcgacatcgagtctaaattcgccctgcgcaccccagaggatactgccgaagacacctgtcatctaatcccaggggttgccgagagcgtagccacatgccatttcaaccactcttccaaaacattcatggtcatccacggttggacagtgactggtatgtacgagagctgggtgccaaagctcgtggcagctctgtacaagagagaaccggattctaacgtgatcgtcgtggattggctgagcagagcccaggaacactatccagtgtctgccgggtatacaaaactcgtcggccaggatgtggccaggttcattaactggatggaggaagaattcaattaccctttggacaacgttcatctgcttgggtactcactgggtgcacatgccgccggtatcgccggttctttgactaacaaaaaggtgaacaggatcactgggttagacccggcaggccctaactttgagtacgccgaagcaccaagccggctctccccagatgatgctgatttcgttgatgtcctacacactttcacacgcgggtcccccggccgttctatcggaattcagaagccagttggccatgttgatatctaccctaatgggggtacttttcagccaggctgtaacatcggggaggccattagagttatagcagagaggggcctcggagacgtcgaccagttggtgaagtgcagtcatgaacgctcgatccatctgttcatcgattccctgctgaatgaggagaacccgagcaaggcatatagatgttcctccaaagaggcctttgagaaggggctctgcttgtcctgtaggaagaaccgatgcaacaacttgggttacgagataaacaaggtacgtgctaagaggtcttctaaaatgtatctgaagacgcggagtcagatgccctacaaggtctttcattaccaagtcaaaatacatttctctgggactgaatcagagacgcatacgaaccaagcctttgaaatcagcttgtatggtactgtggctgagagtgagaatatcccgtttacccttccagaagtttcaaccaataaaacttatagctttctgatctacactgaggtagacattggagaactgctgatgttgaaattgaagtggaaaagcgacagctacttctcctggagcgactggtggtcctcgcccggcttcgccattcagaagatcagggttaaggccggggagacgcagaagaaagttattttctgttctagggagaaggtttctcaccttcaaaagggaaaagcccccgcagttttcgtgaaatgccatgataaaagcttgaacaaaaagtccggatag

SEQ ID NO: 5203 - DNA, 348 bp, Artificial Sequence
  derived and/or modified sequence
atggtcattcatgggtggactgtgacaggtatgtatgaatcttgggtccccaaattagtcgcggctctttataagcgggagcctgatagcaacgtgatagttgtcgactggttgagtcgagcccaggagcactatcctgtgagcgcaggatataccaaattggtcggccaagacgtcgcgagatttatcaactggatggaagaggaatttaactatccccttgataacgtgcacctcctggggtactccttgggcgctcatgctgccggcatcgctggcagcttaaccaataagaaggtcaaccggattactggcctggatcccgccggcccaaacttcgagtactag

SEQ ID NO: 5204 - DNA, 321 bp, Artificial Sequence
  derived and/or modified sequence
atggaatctaaggcactactggtgctaactctcgcagtgtggctgcagagtctgaccgcctcacgagggggagttgccgccgctgaccagcggagggacttcattgacatcgaatctaaatttgcattgagaactccggaagatacagctgaggatacatgccacttaattccgggtgttgccgagtccgtcgccacttgccacttcaaccattcctccaaaaccttcatggtgatccatggatggacagttacggggatgtacgagtcttgggtgcctaaactggtcgctgccttgtacaagagagagcccgacagctag

SEQ ID NO: 5205 - DNA, 393 bp, Artificial Sequence
  derived and/or modified sequence
atggagagcaaagccttgttagtgctcacactggcggtttggctccagagcctgacggcctcaagagggggcgttgcagccgccgatcagaggcgcgatttcatcgacattgaatctaaatttgcactccgaacgcccgaggatacggccgaggacacatgtcacttgattcccggcgtcgctgagagcgtggctacttgtcactttaatcatagcagtaaaactttcatggtgattcatgggtggaccgtgaccggcatgtatgagtcatgggtacctaaactggtggcggcactgtacaaacgggagccagattctaacgtcatcgtcgtcgattggttgtcccgtgcacaggaacactacccagtgagtgcaggatacaccaagctgtag

SEQ ID NO: 5206 - DNA, 1386 bp, Artificial Sequence
  derived and/or modified sequence
atggagtcaaaagctctgcttgtgctgactctggctgcagcagatcagcgcagagactttattgatattgagtccaagttcgctcttcgtactcccgaagacactgccgaagacacctgccacctgatcccgggcgtcgccgagtctgtggccacctgccatttcaatcactcatcaaaaaccttcatggtaatccacggctggacggtcaccgggatgtatgagtcctgggtgcccaaactggtggccgcattgtataagagagagccagatagcaatgtcatagtggtggactggctttcgcgtgctcaggagcactatccggtttccgctgggtacacaaaactcgtcggccaggatgtcgcacggtttatcaattggatggaagaagaatttaattacccactggacaatgtccatctcctagggtattcgctcggagcccacgctgcaggtatcgctggctcactgacgaacaaaaaggtgaaccgcatcaccgggctcgacccggcgggtccaaactttgaatatgccgaggctcccagtaggcttagtccagacgacgccgatttcgtggacgtcctgcataccttcacaaggggcagtccggggaggtcgattggcattcagaagcccgtgggccacgtggacatatatccaaatggtgggacctttcagcccggatgcaatatcggagaggcgattagggtcatcgccgaacggggtcttggcgacgttgatcagctagttaaatgcagtcacgagcgcagtattcatttatttatagattctctcctcaacgaagagaatccctcgaaggcctatcggtgtagctctaaggaagcttttgagaagggactgtgccttagttgcaggaagaaccgatgcaataatctgggctatgaaatcaataaggtgcgagcaaagagaagctcaaaaatgtacctgaagacccgcagccagatgccatacaaagttttccactaccaagtgaagattcatttctctggcacggagagcgagacacacactaaccaggccttcgagatatcgttatatggcacagtcgcagaatctgagaatatcccatttacgcttcccgaagtatctacaaacaagacatactcattcctgatatacaccgaagtggacattggagagctactgatgttgaaattgaagtggaagagtgactcctatttctcttggagcgattggtggtcgtctcccggcttcgctatccagaaaatacgcgtaaaggcaggtgaaacccagaaaaaggtcattttctgctcaagagaaaaggtcagccacctacagaagggcaaggcccctgcagttttcgtgaagtgtcatgataagtctcttaacaagaagtcggggtag

SEQ ID NO: 5207 - DNA, 828 bp, Artificial Sequence
  derived and/or modified sequence
atggtgatccacgggtggactgtcacaggcatgtacgaaagctgggtgccgaagctggttgctgcattgtataaaagagagcccgattctaatgtgatcgtggttgattggctcagtagagcccaggaacactatcctgtatccgctggatacacgaagctggtcgggcaagatgtagcacgatttatcaactggatggaagaggaattcaattatccacttgataatgttcacttactgggatactctctgggcgcacacgcagcaggtatcgctggtagcctcaccaataagaaagttaaccgaattacaggattggatcctgcagggcccaattttgagtacgccgaggctcctagcaggctctctccagatgacgctgactttgtcgatgttctgcacactttcacccgcggttcgcccggcagatccataggcatccaaaagccagtgggtcacgttgacatttaccctaacggcgggacatttcaacctgggtgcaacataggcgaggcgatcagagtcattgctgagaggggactgggtgacgtcgatcagctcgttaagtgctcacacgagaggtccatccatctgtttatcgattcgcttctcaacgaagagaatcccagcaaggcgtacagatgcagctcaaaagaggcatttgaaaaagggctatgcctgagctgtcgaaagaaccggtgtaataatttgggctacgaaatcaataaagtgagggctaagaggagctccaagatgtatgaggacagtttttccgatgccctacagtccctgccgcttcccagcaaagacagcttcttctgggattag

SEQ ID NO: 5208 - DNA, 1428 bp, Artificial Sequence
  derived and/or modified sequence
atggagagcaaggccctgctggtgctgaccctggccgtgtggctgcagagcctgacagccagcagaggaggagtggccgctgctgaccagaggcgggacttcattgatattgagagcaagtttgccctgcggaccccagaggacacagctgaggacacctgccacctgatccctggggtggccgagagcgtggccacctgccacttcaaccacagcagcaagaccttcatggtgatccacggctggacagtgacaggcatgtatgagagctgggtgcccaagctggtggccgccctgtacaagcgggagccagacagcaatgtgattgtggtggactggctgagccgggcccaggagcactaccctgtgtctgctggctacaccaagctggtgggccaggatgtggcccgcttcatcaactggatggaggaggagttcaactaccccctggacaacgtgcacctgctgggctacagcctgggcgcccacgccgccggcattgctggcagcctgaccaacaagaaggtgaaccgcatcaccggcctggaccctgctggccccaactttgaatatgcagaggcccccagccggctgagcccagatgatgctgactttgtggatgtgctgcacaccttcacccggggcagccctggccgcagcatcggcatccagaagcctgtgggccacgtggacatctacccaaatggaggcaccttccagcccggctgcaacattggagaggccatccgggtgattgctgagcggggcctgggagatgtggaccagctggtgaagtgcagccatgagaggagcatccacctgttcatcgacagcctgctgaatgaggagaaccccagcaaggcctaccgctgcagcagcaaggaggcctttgagaagggcctgtgcctgagctgcaggaagaaccgctgcaacaacctgggctatgagatcaacaaggtgcgggccaagaggagcagcaagatgtacctgaagaccaggagccagatgccctacaaggtgttccactaccaggtgaagatccacttcagcggcacagagagcgagacccacaccaaccaggcctttgagatcagcctgtatggaacagtggccgagagcgagaacatccccttcaccctgcctgaggtgtccaccaacaagacctacagcttcctgatctacacagaggtggacattggagagctgctgatgctgaagctgaagtggaagagtgacagctacttctcctggagcgactggtggagcagccctggctttgccatccagaagatccgggtgaaggccggggagacccagaagaaggtgatcttctgcagccgggagaaggtgagccacctgcagaagggcaaggccccagctgtgtttgtgaagtgccacgacaagagcctgaacaagaagagcggctag

SEQ ID NO: 5209 - DNA, 348 bp, Artificial Sequence
  derived and/or modified sequence
atggtgatccacggctggacagtgacaggcatgtatgagagctgggtgcccaagctggtggccgccctgtacaagcgggagccagacagcaatgtgattgtggtggactggctgagccgggcccaggagcactaccctgtgtctgctggctacaccaagctggtgggccaggatgtggcccgcttcatcaactggatggaggaggagttcaactaccccctggacaacgtgcacctgctgggctacagcctgggcgcccacgccgccggcattgctggcagcctgaccaacaagaaggtgaaccgcatcaccggcctggaccctgctggccccaactttgagtactag

SEQ ID NO: 5210 - DNA, 321 bp, Artificial Sequence
  derived and/or modified sequence
atggagagcaaggccctgctggtgctgaccctggccgtgtggctgcagagcctgacagccagcagaggaggagtggccgctgctgaccagaggcgggacttcattgatattgagagcaagtttgccctgcggaccccagaggacacagctgaggacacctgccacctgatccctggggtggccgagagcgtggccacctgccacttcaaccacagcagcaagaccttcatggtgatccacggctggacagtgacaggcatgtatgagagctgggtgcccaagctggtggccgccctgtacaagcgggagccagacagctag

SEQ ID NO: 5211 - DNA, 393 bp, Artificial Sequence
  derived and/or modified sequence
atggagagcaaggccctgctggtgctgaccctggccgtgtggctgcagagcctgacagccagcagaggaggagtggccgctgctgaccagaggcgggacttcattgatattgagagcaagtttgccctgcggaccccagaggacacagctgaggacacctgccacctgatccctggggtggccgagagcgtggccacctgccacttcaaccacagcagcaagaccttcatggtgatccacggctggacagtgacaggcatgtatgagagctgggtgcccaagctggtggccgccctgtacaagcgggagccagacagcaatgtgattgtggtggactggctgagccgggcccaggagcactaccctgtgtctgctggctacaccaagctgtag

SEQ ID NO: 5212 - DNA, 1386 bp, Artificial Sequence
  derived and/or modified sequence
atggagagcaaggccctgctggtgctgaccctggccgctgctgaccagaggcgggacttcattgatattgagagcaagtttgccctgcggaccccagaggacacagctgaggacacctgccacctgatccctggggtggccgagagcgtggccacctgccacttcaaccacagcagcaagaccttcatggtgatccacggctggacagtgacaggcatgtatgagagctgggtgcccaagctggtggccgccctgtacaagcgggagccagacagcaatgtgattgtggtggactggctgagccgggcccaggagcactaccctgtgtctgctggctacaccaagctggtgggccaggatgtggcccgcttcatcaactggatggaggaggagttcaactaccccctggacaacgtgcacctgctgggctacagcctgggcgcccacgccgccggcattgctggcagcctgaccaacaagaaggtgaaccgcatcaccggcctggaccctgctggccccaactttgaatatgcagaggcccccagccggctgagcccagatgatgctgactttgtggatgtgctgcacaccttcacccggggcagccctggccgcagcatcggcatccagaagcctgtgggccacgtggacatctacccaaatggaggcaccttccagcccggctgcaacattggagaggccatccgggtgattgctgagcggggcctgggagatgtggaccagctggtgaagtgcagccatgagaggagcatccacctgttcatcgacagcctgctgaatgaggagaaccccagcaaggcctaccgctgcagcagcaaggaggcctttgagaagggcctgtgcctgagctgcaggaagaaccgctgcaacaacctgggctatgagatcaacaaggtgcgggccaagaggagcagcaagatgtacctgaagaccaggagccagatgccctacaaggtgttccactaccaggtgaagatccacttcagcggcacagagagcgagacccacaccaaccaggcctttgagatcagcctgtatggaacagtggccgagagcgagaacatccccttcaccctgcctgaggtgtccaccaacaagacctacagcttcctgatctacacagaggtggacattggagagctgctgatgctgaagctgaagtggaagagtgacagctacttctcctggagcgactggtggagcagccctggctttgccatccagaagatccgggtgaaggccggggagacccagaagaaggtgatcttctgcagccgggagaaggtgagccacctgcagaagggcaaggccccagctgtgtttgtgaagtgccacgacaagagcctgaacaagaagagcggctag

SEQ ID NO: 5213 - DNA, 828 bp, Artificial Sequence
  derived and/or modified sequence
atggtgatccacggctggacagtgacaggcatgtatgagagctgggtgcccaagctggtggccgccctgtacaagcgggagccagacagcaatgtgattgtggtggactggctgagccgggcccaggagcactaccctgtgtctgctggctacaccaagctggtgggccaggatgtggcccgcttcatcaactggatggaggaggagttcaactaccccctggacaacgtgcacctgctgggctacagcctgggcgcccacgccgccggcattgctggcagcctgaccaacaagaaggtgaaccgcatcaccggcctggaccctgctggccccaactttgaatatgcagaggcccccagccggctgagcccagatgatgctgactttgtggatgtgctgcacaccttcacccggggcagccctggccgcagcatcggcatccagaagcctgtgggccacgtggacatctacccaaatggaggcaccttccagcccggctgcaacattggagaggccatccgggtgattgctgagcggggcctgggagatgtggaccagctggtgaagtgcagccatgagaggagcatccacctgttcatcgacagcctgctgaatgaggagaaccccagcaaggcctaccgctgcagcagcaaggaggcctttgagaagggcctgtgcctgagctgcaggaagaaccgctgcaacaacctgggctatgagatcaacaaggtgcgggccaagaggagcagcaagatgtatgaggacagcttcagtgatgccctgcagagcctgcccctgcccagcaaggacagcttcttctgggactag

SEQ ID NO: 5214 - DNA, 1428 bp, Artificial Sequence
  derived and/or modified sequence
atggagagcaaggccctgctggtgctgaccctggccgtgtggctgcagtcactgactgcttctagaggaggagtggcggcagccgaccagcgccgggacttcattgacattgaatcaaagtttgctctccgcactccagaggacacagcagaagatacctgccatctgattccaggggtcgccgagtcagttgctacatgccatttcaatcatagctccaagacattcatggtgatccacgggtggacagtgacaggcatgtatgaaagctgggttcctaaattggtcgccgcgctatataaacgagagccagatagcaacgtgattgtagtggattggttgtcacgggctcaggaacattaccccgtatctgccggctacaccaagctcgtgggacaagatgtggcaagattcatcaactggatggaggaggaattcaattaccccttggacaatgttcatctgctgggatattcactgggagcgcatgctgccgggatcgctggaagcctgacaaacaagaaagtgaatagaattaccggcctggaccctgcggggccaaactttgaatatgcagaagctcctagcagactgagtccggacgacgcagattttgtagacgtccttcatactttcactaggggctctcccggcagatccattggcatccagaagcccgttggacatgtggatatctatcccaacggagggacatttcagcccggttgtaacatcggggaagccatcagggtaattgccgaacgcggtctcggcgatgtggatcagcttgtgaagtgctctcacgaacgctccatacatctatttatcgatagccttctaaatgaggagaacccttcaaaagcataccgttgcagttccaaggaggcatttgagaagggtctgtgtctgtcttgccgaaagaatcggtgtaataacctcggatacgagattaataaggttcgggccaagaggtcctctaagatgtatttaaagaccagatcacagatgccatacaaagtcttccattatcaggtgaaaattcacttcagtggaaccgaatcagagacacatactaaccaggcctttgaaattagcctttatggtaccgtcgcggagtcagagaacattcctttcacgttacccgaggtgtccaccaacaagacatactcctttctcatctacacagaggtagatatcggagagttgctgatgctgaagctgaaatggaaaagcgattcctatttttcttggtcggattggtggagcagccccgggtttgcaatccagaagattcgggtgaaggctggcgagacccagaagaaggtcattttttgctctcgtgaaaaagtctcgcaccttcaaaaaggcaaggctcccgcagtatttgtgaagtgccatgacaaaagtcttaataaaaaatccggatag

SEQ ID NO: 5215 - DNA, 348 bp, Artificial Sequence
  derived and/or modified sequence
atggtgatccacggctggaccgtgaccggcatgtacgagagctgggtacctaagctggtggctgccctctataaacgcgaacctgatagcaatgtcatcgtggtggattggttgtccagagcacaggaacattacccagtttccgcaggatacaccaagctcgtcggacaggacgtggcccgctttatcaattggatggaagaagagtttaactaccctctcgataacgtgcaccttctgggctacagcctcggcgcccacgctgcaggaatagcaggaagcctgactaataaaaaggtgaaccgcatcactggcctcgacccagcaggccccaattttgagtactag

SEQ ID NO: 5216 - DNA, 321 bp, Artificial Sequence
  derived and/or modified sequence
atggagagcaaggccctgctggtgctgaccctggccgtgtggctgcagtctctgaccgcaagtcgcggtggtgttgccgctgcagaccagcgaagggactttatagatatcgaatctaaattcgctcttcgaacccccgaagataccgcagaggacacttgtcacctcattcccggcgttgccgaatctgtggctacttgtcatttcaatcattcctcaaaaactttcatggtgattcatggttggaccgttacagggatgtatgaaagttgggtcccaaagcttgttgctgccctgtataagagagagcccgactcctag

SEQ ID NO: 5217 - DNA, 393 bp, Artificial Sequence
  derived and/or modified sequence
atggagagcaaggccctgctggtgctgaccctggccgtgtggctgcaatctcttaccgcctctaggggaggcgtggccgcagccgaccaaaggcgcgattttatcgacatagagtcgaagttcgctctgaggacccccgaggacacagctgaggatacatgtcacctcattccgggagtggcggaatccgtcgccacttgccactttaaccattcatccaaaactttcatggtaattcatggatggaccgtcactggaatgtatgaaagctgggtgcctaagctggtcgccgccctttacaagagagaaccagacagcaacgtgattgttgttgattggttgtccagagcccaagaacactacccagtgtccgccgggtataccaagctttag

SEQ ID NO: 5218 - DNA, 1386 bp, Artificial Sequence
  derived and/or modified sequence
atggagagcaaggccctgctggtgctgaccctggccgccgccgaccagagaagagactttatagacattgaatcaaaattcgcactccgtaccccagaggataccgcagaggatacttgtcacctgattcctggagttgctgaaagtgtcgcaacctgtcactttaaccactcttccaagactttcatggtgatccatggctggacagtgacaggcatgtacgagtcctgggtgcccaaactagtggccgccctgtataaacgcgagcctgattcgaatgtgatagtggttgattggctcagcagagctcaggagcattacccagtgtccgcagggtataccaagctggtgggccaggatgtggccagatttattaattggatggaggaagaattcaattatcctctggacaatgtccacttacttggttacagcttaggcgcacacgcagctggcatcgcaggctccttgacaaataagaaagtaaatcgtattaccggactggatccggctggcccaaacttcgaatacgcagaggcgccatcaagattgagccctgatgatgctgactttgttgacgttttgcacacctttacgagaggttctccaggaagatctatcgggatccagaaacctgttggacacgtggacatttaccctaatggcggtacctttcagcccgggtgtaatatcggcgaagcaatccgggtaatagcagagcgggggctgggcgatgtagaccagttagtgaaatgctctcacgagcggtctattcacctgtttatcgactccctcctgaatgaggaaaatcccagcaaggcgtaccggtgttcctcgaaggaggcctttgagaaaggcctgtgcctgtcctgccgaaaaaaccggtgcaataatttaggatatgagattaataaagtgcgtgccaaacgcagcagcaaaatgtacctgaagacccgcagtcagatgccatataaagtattccactatcaagtgaaaatccactttagcgggaccgaaagcgagacccacaccaaccaggcttttgaaatctcactgtatggaaccgtagctgaaagtgaaaacatcccctttactctgccagaggtctctactaataagacctactcgttcctcatatataccgaggtggatataggcgagcttctgatgttgaaacttaagtggaagtccgacagttatttctcttggagcgactggtggtctagtccaggcttcgccattcagaaaatccgggtcaaggctggcgagacgcaaaaaaaggtgatcttttgctcgagggagaaggtgtcccacctacaaaagggcaaagcgcccgctgtctttgtgaagtgtcacgacaagagcctaaacaagaaatctggctag

SEQ ID NO: 5219 - DNA, 828 bp, Artificial Sequence
  derived and/or modified sequence
atggtgatccacggctggaccgtgaccggcatgtacgagagctgggttccgaagctagtagctgccctgtacaagagagaacccgactccaacgtgatcgttgtggactggctttctagagcgcaggagcattatccagtctctgcggggtacacaaaactggtgggccaggacgtcgccaggttcattaactggatggaggaggaatttaactacccgctggacaacgtgcatctcctggggtacagcctcggggcccacgctgcgggaattgccggctcgcttactaacaagaaggtgaaccggatcactggcttagaccccgccggtcccaactttgagtacgccgaagcacccagtcggctctccccagatgatgcggactttgtggatgttctgcacacctttactagaggctcccccgggcgctcaatcggcattcagaagcctgtcggccatgtggacatctatccgaatgggggaacttttcagccaggctgcaatataggtgaggccattcgggtgatcgcagaacggggattgggggacgtagatcagttagtgaagtgttcacatgagagatccatccatctgtttatagactccttgctgaacgaagagaacccttcaaaagcttatcgctgtagttctaaggaagccttcgagaaagggttgtgcctctcgtgtcgaaagaaccggtgtaacaacctagggtacgagattaacaaggtgagagccaaacggagctccaagatgtatgaggacagcttcagcgatgcactgcagagcttgccattaccgtctaaggattcttttttctgggattag

SEQ ID NO: 5220 - DNA, 1428 bp, Artificial Sequence
  derived and/or modified sequence
atggagtctaaggccctccttgtacttacactggctgtgtggcttcagtccctgacagcttccaggggtggcgttgctgcagcagatcagcgacgggattttattgacattgagagtaaatttgccctgcgtactcccgaggatacagccgaagatacctgtcatttgatccctggagtcgccgagagcgtggctacctgtcatttcaaccattctagcaaaacatttatggtgatacacgggtggacagtcacaggaatgtatgagagctgggtgcccaaattagtggctgctctgtacaagagggaacctgactctaacgtcattgtcgtagattggctgtcccgggctcaagagcattaccccgtgtctgccggttataccaagctggtcggccaggatgttgctcgcttcataaattggatggaggaagagttcaattaccctctggataacgttcacctgctagggtactcactaggggctcacgctgctggaatcgcgggatcgttgaccaacaaaaaagtcaaccgaatcaccggcctcgaccctgcaggcccaaattttgagtatgccgaagccccaagcagactgtcccccgacgatgcggacttcgtggatgtgctgcacacgtttacaagaggaagcccagggagaagcatcggcatccagaagccagtgggacatgtggacatttacccaaacggcggtactttccagccagggtgtaatataggggaggccatacgggtgatcgccgaacgcggtctgggggatgtggaccagttagtgaaatgttcccatgaacgtagcatccatttatttatcgattccctcctgaacgaggagaaccccagcaaggcataccggtgctccagtaaggaggcgtttgaaaaggggctttgtctgagctgtcgaaagaataggtgcaacaatttgggatacgagatcaataaagtcagggcaaagcgttctagcaagatgtaccttaaaactagaagccagatgccttataaggtgtttcattatcaagttaagatccacttctctggaacagaatcggagacacacaccaatcaagcttttgaaatttctctttatggtacagtcgctgaaagcgaaaatattcctttcaccctgcccgaggtcagtaccaataaaacctattcctttctgatctatacagaagtcgacattggagagctgctgatgctgaagctcaagtggaaatcagacagctacttctcctggagcgattggtggagcagccccggattcgccattcagaagatcagagtcaaggccggtgaaacccagaaaaaagtgatcttttgttccagagagaaagtcagtcacttgcagaagggaaaagcccctgcggtcttcgtaaaatgtcacgataagagcctgaacaaaaaaagtgggtag

SEQ ID NO: 5221 - DNA, 348 bp, Artificial Sequence
  derived and/or modified sequence
atggttattcacggatggactgtgactggtatgtacgagtcatgggttcccaaactcgtcgcggcactgtacaagcgagagccagattcaaacgtgatcgttgtggattggctgagcagggctcaagagcattaccccgtttctgctggctacaccaaacttgtcggccaagatgtagcgaggtttatcaactggatggaggaggaatttaactaccctttggacaatgtccaccttctgggctactctttaggcgcacatgcagccggaattgccggaagcctcaccaataagaaggttaacaggatcaccggcttggaccccgctgggccaaattttgaatactag

SEQ ID NO: 5222 - DNA, 321 bp, Artificial Sequence
  derived and/or modified sequence
atggagagcaaggcactcctcgtcttgactctggccgtgtggctgcagtccctcaccgccagtcggggtggggttgcagccgctgaccagcgtcgcgactttattgacatcgaatcaaagttcgcccttcgcacccccgaagacacagctgaggacacctgccatctgatacccggagtagctgagagtgtcgccacttgtcacttcaatcactccagcaagactttcatggtgatccacggatggacggtaaccggaatgtatgagagctgggtgcccaagttagtagccgcactgtacaagagagagccggattcctag

SEQ ID NO: 5223 - DNA, 393 bp, Artificial Sequence
  derived and/or modified sequence
atggaaagcaaagccctgcttgtgctgactctggccgtgtggttgcagagtctgaccgcctccaggggcggtgttgcagcggcagaccaaaggagagactttattgatatcgaatcaaaatttgctctgagaactccagaggataccgccgaggacacctgccaccttattccgggtgtcgccgaatccgtggccacttgccacttcaaccatagttcaaagactttcatggtgatacacggctggactgtcacaggcatgtacgagagttgggtgccaaagctggtcgctgcactgtataagagggagcccgactccaacgtcattgtggtggactggctgtctcgggcacaggagcattatcccgtttctgctgggtacaccaaactctag

SEQ ID NO: 5224 - DNA, 1386 bp, Artificial Sequence
  derived and/or modified sequence
atggaatccaaagcactgctggtgctgacgctggccgctgcagatcagcgccgtgactttatcgatatagagtccaaatttgctctgcgcacccctgaggatactgcggaggacacctgccatctgataccaggagtggccgagagcgtggctacctgccactttaaccatagctctaagacttttatggtcatccacggatggacagtgaccggcatgtatgaaagttgggttccaaaattggttgccgctttgtacaaacgggaacccgattctaacgtgatcgttgttgactggctctcaagggctcaggaacactaccccgtgtccgcagggtatacgaagttggtgggacaagatgttgctagatttataaactggatggaggaggagtttaattaccccctggataacgtccatttattggggtattctttaggggcacacgctgcgggtatcgctgggtccttaaccaataagaaggtgaaccggatcaccggattggatccagccggaccgaacttcgagtacgcggaagctccatccaggctgtcacctgacgatgctgactttgtggacgttctccataccttcacacgcggaagcccgggtcggtcaatcggaattcagaagcctgtcggccacgtggatatctatccaaacgggggaacctttcagcccggatgtaacatcggggaggccatcagagttatcgccgaacgcggactgggggatgtggatcagctggtgaagtgtagccatgagcggagtatacatctgtttattgactctctgctaaatgaagagaatccatccaaagcatatcggtgtagcagtaaggaagcctttgagaagggcctgtgtttgagctgtcgcaaaaaccgttgcaacaacctcggatatgagattaacaaagtccgcgctaaaaggtctagtaagatgtatctcaaaacgagaagtcagatgccttacaaggtgttccattaccaagtgaaaatacacttcagcggaactgagtctgagacccacacaaaccaggcgttcgaaatcagcctctacggcacggtcgctgaatctgagaacatccccttcactctgcctgaagtctcaacaaacaagacatactccttcctcatttacacggaggtggacattggagaactgctgatgctgaagctgaaatggaaatcagacagctatttcagctggtctgattggtggtcttcaccaggctttgccattcagaaaattagggttaaggccggtgagacacagaagaaagtcattttttgctcgcgcgagaaagtttctcacctccaaaaaggcaaggctcctgctgtgtttgtcaaatgccacgacaagagcttaaataagaaatctggctag

SEQ ID NO: 5225 - DNA, 828 bp, Artificial Sequence
  derived and/or modified sequence
atggttattcatgggtggaccgtcactgggatgtatgaaagctgggtgccgaaacttgtcgcagccttatacaagagagaaccggattccaacgttatagtggtcgactggctatctcgtgcccaggaacattaccctgtgtccgcaggttatactaagctggttggacaggacgtggcccgattcatcaactggatggaggaggaattcaactatccactggacaacgtgcacctactgggatactccctgggtgcccacgccgctggaattgcaggatctctgacaaataagaaagttaacagaattaccggcctggatccagcaggacccaacttcgagtacgcggaagcaccatctcggctgagccccgatgacgcagatttcgtggacgttctgcatacctttacaaggggaagtccagggcgttctattggcattcagaaaccggtcggtcatgtggacatttatccaaacggcggtacgtttcagccaggctgtaacatcggcgaggctatccgagtgattgcagaaagaggcttgggagatgtggatcagttggtaaagtgctcccacgagcgctctatccacctttttatcgactctctgctcaacgaggaaaaccccagcaaagcttatcgctgctcttctaaggaagcgttcgaaaaggggctctgcttgagttgccgcaagaatcggtgtaataatttgggttatgaaatcaacaaagtgcgagccaagaggtctagcaaaatgtatgaggattcattttcagatgcactgcaaagcctgcctctgccttctaaggactccttcttctgggactag

SEQ ID NO: 5226 - DNA, 1428 bp, Artificial Sequence
  derived and/or modified sequence
atggagtccaaggcactgctagtgctgacactagccgtctggttgcagagcctaaccgcaagcagaggaggggtcgcagctgcagaccaacgacgggattttattgatatcgaatccaaattcgcccttaggacaccagaagatacagccgaggacacatgtcacttgatccctggggttgccgagtccgttgccacttgccacttcaatcacagtagcaaaacctttatggtcatacacggctggacagttactggaatgtacgaaagttgggttccaaagctggttgcggccttatataaaagagaaccagattcaaacgtcatcgtcgttgactggctgtcaagagctcaggagcattatcccgtttccgcagggtacactaagttagtgggtcaggatgtggctcgcttcatcaactggatggaagaagagtttaattacccattagataacgtgcaccttttgggctattccctgggtgcccacgctgctggcattgctggctccctcacaaacaagaaagtgaatagaatcaccggcctggacccagcagggccgaactttgaatatgccgaagcgcccagtagactctctccggacgatgcggatttcgtcgacgtcctgcatacctttacacgaggatcccctggtcgatcgataggcatacagaagccggttggtcacgtggacatctatcccaatggggggacgttccagcccgggtgtaacattggagaagccatcagagttatcgccgagcggggccttggggacgtggatcagctcgtgaaatgcagtcacgaacgttccatacacctgtttatcgatagtctactgaacgaagaaaatcccagcaaggcctaccggtgcagcagtaaagaagcttttgaaaaaggcttatgtctgagctgccgaaaaaatcggtgcaataatttggggtacgaaataaacaaagttcgcgctaagagaagctccaagatgtacctgaagactagatcccagatgccttacaaggtattccattaccaagtgaagatccatttttccggaacagaaagcgaaacccacaccaaccaggcctttgagattagcctgtatggcaccgtagctgaatccgagaacatcccctttacgctgcccgaagtaagtactaataaaacctacagctttctgatttatacagaagtggatattggcgaactgctgatgctgaagctgaagtggaagtcagacagctacttttcgtggagcgactggtggtcttcccccggatttgcaatacagaaaatcagggtgaaagccggagagacacagaaaaaggtgatcttctgtagcagagaaaaggtaagtcatctgcagaagggtaaggctccagcggtgtttgtcaagtgccatgacaaatccctgaataaaaagtccggctag

SEQ ID NO: 5227 - DNA, 348 bp, Artificial Sequence
  derived and/or modified sequence
atggttatccatggctggactgtgactggcatgtacgaaagttgggttccaaaactggtggccgccctttacaaacgcgagccggattctaatgtgattgtcgtcgattggctttctcgcgcacaggagcattaccccgtgtcggcaggatatactaaattggttggtcaggatgtggcaagatttattaactggatggaggaggaattcaactacccccttgataacgtgcacctgttagggtatagtctgggtgcccacgccgccggtatcgctggctcactcacaaataagaaggtcaatcgaatcaccggccttgaccctgccgggcccaattttgagtattag

SEQ ID NO: 5228 - DNA, 321 bp, Artificial Sequence
  derived and/or modified sequence
atggaatcgaaagctttactggtcctgacgctggccgtctggcttcaaagtttaaccgcctccaggggaggcgttgccgccgcagatcagaggcgtgattttattgacatcgagtctaaatttgcattacgcacaccagaggatactgccgaagatacctgtcacttaatccccggcgtagccgagagcgtggccacttgccatttcaaccatagttcaaaaacctttatggtcattcacggctggaccgtcaccggtatgtacgaatcttgggtgcctaaactggtcgctgcactgtacaagcgggaaccagattcttag

SEQ ID NO: 5229 - DNA, 393 bp, Artificial Sequence
  derived and/or modified sequence
atggaaagtaaagcactactggtcctcaccttagctgtatggctgcagtctttgacagcgagccgcgggggggtggcagctgcagaccaacgccgggatttcattgacatagaaagcaaatttgccttacgcaccccagaagacacagctgaagatacttgccatctcatccccggcgtagctgaaagcgtggctacctgtcactttaaccacagttccaagaccttcatggtgatccacggctggactgtcacaggaatgtacgagtcatgggtgccgaagctggtggcggccttgtataaacgcgagcctgacagtaatgtcatagtggtggactggctgagccgagcccaagagcactaccccgtgagtgctggatatacaaaactgtag

SEQ ID NO: 5230 - DNA, 1386 bp, Artificial Sequence
  derived and/or modified sequence
atggaaagtaaggcactactcgttttgacactagccgccgctgatcagcgcagagactttatcgatatcgaatctaaattcgctttgcgcacccccgaagacactgctgaagatacatgccaccttatccctggggtggctgaatccgtcgccacttgccatttcaaccattcaagcaagactttcatggtgatccacggatggacggtcacaggcatgtacgaatcctgggtgcccaagctcgtcgctgccctgtacaagagagaaccagactccaatgtcattgttgtcgactggctgagcagggctcaggaacattatcccgtgtctgctggatacacaaagctggtcgggcaagacgtagccagatttatcaactggatggaggaggaatttaactacccgctggacaacgtacatctgcttggttattccttaggggcccacgccgccgggattgcagggtctctgacgaacaaaaaggtcaatcggattaccgggctcgatccagccggtccaaatttcgaatacgctgaagcgccttcaagactgtccccagatgatgcagatttcgtggatgtcctacacacgtttactagaggatcaccaggacgcagtatcggaatccaaaaacccgtcggacacgtggatatctatcccaatggaggaactttccaaccgggatgtaatattggtgaggccatcagggtgattgccgaacgtggtttgggagacgttgatcaactggtgaagtgtagccacgaaaggagtattcatctgtttattgactcacttctgaatgaggagaacccctcaaaagcttacaggtgttcatcaaaggaggcatttgagaaaggcctttgtctgtcgtgcaggaagaatcgatgtaataatctcggatacgaaattaacaaggttagggcgaagcggagtagtaagatgtatttaaagacccgtagtcagatgccctacaaggtcttccactatcaagtgaaaatccacttttcgggcaccgaatccgaaacacacaccaaccaggccttcgagatttctttatatgggaccgtggccgaaagtgagaatatacctttcacattacccgaggtgtctacaaacaagacgtattccttcttaatttacacagaagttgacataggcgagctgctaatgctgaagctaaagtggaagagcgattcgtatttcagttggtcagactggtggtccagcccaggatttgcaatccagaaaattcgcgtcaaagccggtgagacacaaaaaaaagttatattctgttctagggaaaaagtgagccatcttcagaaaggtaaggccccagccgtctttgttaagtgccacgacaagtccctaaataaaaagtcaggctag

SEQ ID NO: 5231 - DNA, 828 bp, Artificial Sequence
  derived and/or modified sequence
atggtgatccacgggtggactgtcactggaatgtacgagtcctgggtgccaaagttagttgcagcgctttataagagagaacctgatagcaacgttattgtggtcgactggctgtcccgcgcccaagagcactacccagtgtctgcgggttatactaagctggtagggcaggatgtggcacggtttataaattggatggaggaagagtttaattatcccctcgacaatgtgcatctgctcggctatagcttgggagcgcacgcagcagggatcgcgggaagtctaaccaataagaaggtgaatcgcattacagggcttgatcctgccggcccaaactttgaatatgctgaagccccctcacggctgagccctgacgacgcagattttgtcgatgtcctgcacactttcacacgcggctctcctggcagatctatcggcattcaaaaacccgtgggccatgtagatatttatcccaatggaggcacatttcaacctggatgcaacataggagaggcaataagggtaattgccgaaaggggcctgggcgacgttgatcagcttgtgaaatgctcacacgagcgtagcatccacttgttcatcgacagcctgttgaatgaggagaaccccagcaaagcctacaggtgctcaagtaaggaggcttttgaaaaaggtctttgtcttagctgccgaaaaaaccgatgcaacaatctgggctatgaaatcaataaagtaagggccaagcggtcctcaaaaatgtacgaagactctttttcggatgcactgcagagcctgccgttgccatcaaaagacagttttttctgggactag

SEQ ID NO: 5232 - DNA, 3846 bp, Artificial Sequence
  derived and/or modified sequence
tttaacgtgaatcgatgtaaacctgtgtttggtgcttagacagggggcccccgggtagagtggaaccccttaagctaagcgaacaggagcctaacaaagcaaatttttccgtctgccctttccccctcttctcgttggcagggttgatcctcattactgtttgctcaaacgtttagaagtgaatttaggtccctccccccaacttatgattttatagccaataggtgatgaggtttatttgcatatttccagtcacataagcagccttggcgtgaaaacagtgtcagactcgattccccctcttcctcctcctcaagggaaagctgcccacttctagctgccctgccatcccctttaaagggcgacttgctcagcgccaaaccgcggctccagccctctccagcctccggctcagccggctcatcagtcggtccgcgccttgcagctcctccagagggacgcgccccgagatggagagcaaagccctgctcgtgctgactctggccgtgtggctccagagtctgaccgcctcccgcggaggggtggccgccgccgaccaaagaagagattttatcgacatcgaaagtaaatttgccctaaggacccctgaagacacagctgaggacacttgccacctcattcccggagtagcagagtccgtggctacctgtcatttcaatcacagcagcaaaaccttcatggtgatccatggctggacggtaacaggaatgtatgagagttgggtgccaaaacttgtggccgccctgtacaagagagaaccagactccaatgtcattgtggtggactggctgtcacgggctcaggagcattacccagtgtccgcgggctacaccaaactggtgggacaggatgtggcccggtttatcaactggatggaggaggagtttaactaccctctggacaatgtccatctcttgggatacagccttggagcccatgctgctggcattgcaggaagtctgaccaataagaaagtcaacagaattactggcctcgatccagctggacctaactttgagtatgcagaagccccgagtcgtctttctcctgatgatgcagattttgtagacgtcttacacacattcaccagagggtcccctggtcgaagcattggaatccagaaaccagttgggcatgttgacatttacccgaatggaggtacttttcagccaggatgtaacattggagaagctatccgcgtgattgcagagagaggacttggagatgtggaccagctagtgaagtgctcccacgagcgctccattcatctcttcatcgactctctgttgaatgaagaaaatccaagtaaggcctacaggtgcagttccaaggaagcctttgagaaagggctctgcttgagttgtagaaagaaccgctgcaacaatctgggctatgagatcaataaagtcagagccaaaagaagcagcaaaatgtacctgaagactcgttctcagatgccctacaaagtcttccattaccaagtaaagattcatttttctgggactgagagtgaaacccataccaatcaggcctttgagatttctctgtatggcaccgtggccgagagtgagaacatcccattcactctgcctgaagtttccacaaataagacctactccttcctaatttacacagaggtagatattggagaactactcatgttgaagctcaaatggaagagtgattcatactttagctggtcagactggtggagcagtcccggcttcgccattcagaagatcagagtaaaagcaggagagactcagaaaaaggtgatcttctgttctagggagaaagtgtctcatttgcagaaaggaaaggcacctgcggtatttgtgaaatgccatgacaagtctctgaataagaagtcaggctgaaactgggcgaatctacagaacaaagaacggcatgtgaattctgtgaagaatgaagtggaggaagtaacttttacaaaacatacccagtgtttggggtgtttcaaaagtggattttcctgaatattaatcccagccctacccttgttagttattttaggagacagtctcaagcactaaaaagtggctaattcaatttatggggtatagtggccaaatagcacatcctccaacgttaaaagacagtggatcatgaaaagtgctgttttgtcctttgagaaagaaataattgtttgagcgcagagtaaaataaggctccttcatgtggcgtattgggccatagcctataattggttagaacctcctattttaattggaattctggatctttcggactgaggccttctcaaactttactctaagtctccaagaatacagaaaatgcttttccgcggcacgaatcagactcatctacacagcagtatgaatgatgttttagaatgattccctcttgctattggaatgtggtccagacgtcaaccaggaacatgtaacttggagagggacgaagaaagggtctgataaacacagaggttttaaacagtccctaccattggcctgcatcatgacaaagttacaaattcaaggagatataaaatctagatcaattaattcttaataggctttatcgtttattgcttaatccctctctcccccttcttttttgtctcaagattatattataataatgttctctgggtaggtgttgaaaatgagcctgtaatcctcagctgacacataatttgaatggtgcagaaaaaaaaaaagaaaccgtaattttattattagattctccaaatgattttcatcaatttaaaatcattcaatatctgacagttactcttcagttttaggcttaccttggtcatgcttcagttgtacttccagtgcgtctcttttgttcctggctttgacatgaaaagataggtttgagttcaaattttgcattgtgtgagcttctacagattttagacaaggaccgtttttactaagtaaaagggtggagaggttcctggggtggattcctaagcagtgcttgtaaaccatcgcgtgcaatgagccagatggagtaccatgagggttgctatttgttgtttttaacaactaatcaagagtgagtgaacaactatttataaactagatctcctatttttcagaatgctcttctacgtataaatatgaaatgataaagatgtcaaatatctcagaggctatagctgggaacccgactgtgaaagtatgtgatatctgaacacatactagaaagctctgcatgtgtgttgtccttcagcataattcggaagggaaaacagtcgatcaagggatgtattggaacatgtcggagtagaaattgttcctgatgtgccagaacttcgaccctttctctgagagagatgatcgtgcctataaatagtaggaccaatgttgtgattaacatcatcaggcttggaatgaattctctctaaaaataaaatgatgtatgatttgttgttggcatcccctttattaattcattaaatttctggatttgggttgtgacccagggtgcattaacttaaaagattcactaaagcagcacatagcactgggaactctggctccgaaaaactttgttatatatatcaaggatgttctggctttacattttatttattagctgtaaatacatgtgtggatgtgtaaatggagcttgtacatattggaaaggtcattgtggctatctgcatttataaatgtgtggtgctaactgtatgtgtctttatcagtgatggtctcacagagccaactcactcttatgaaatgggctttaacaaaacaagaaagaaacgtacttaactgtgtgaagaaatggaatcagcttttaataaaattgacaacattttattaccac

SEQ ID NO: 5233 - DNA, 560 bp, Artificial Sequence
  derived and/or modified sequence
aacagtttgtatgctggaagagttctgaaaagatctctgagggctggaagtgctaaggacaatttcataaagaagaaagaagagattttatcgacatcgaaagtaaatttgccctaaggacccctgaagacacagctgaggacacttgccacctcattcccggagtagcagagtccgtggctacctgtcatttcaatcacagcagcaaaaccttcatggtgatccatggctggacggtaacaggaatgtatgagagttgggtgccaaaacttgtggccgccctgtacaagagagaaccagactccaatgtcattgtggtggactggctgtcacgggctcaggagcattacccagtgtccgcgggctacaccaaactggtgggacaggatgtggcccggtttatcaactggatggaggaggagtttaactaccctctggacaatgtccatctcttgggatacagccttggagcccatgctgctggcattgcaggaagtctgaccaataagaaagtcaacagaattactggcctcgatccagctggacctaactttgagtat

SEQ ID NO: 5234 - DNA, 559 bp, Artificial Sequence
  derived and/or modified sequence
aaactttccctccttggaaaacagtcacataagcagccttggcgtgaaaacagtgtcagactcgattccccctcttcctcctcctcaagggaaagctgcccacttctagctgccctgccatcccctttaaagggcgacttgctcagcgccaaaccgcggctccagccctctccagcctccggctcagccggctcatcagtcggtccgcgccttgcagctcctccagagggacgcgccccgagatggagagcaaagccctgctcgtgctgactctggccgtgtggctccagagtctgaccgcctcccgcggaggggtggccgccgccgaccaaagaagagattttatcgacatcgaaagtaaatttgccctaaggacccctgaagacacagctgaggacacttgccacctcattcccggagtagcagagtccgtggctacctgtcatttcaatcacagcagcaaaaccttcatggtgatccatggctggacggtaacaggaatgtatgagagttgggtgccaaaacttgtggccgccctgtacaagagagaaccagactc

SEQ ID NO: 5235 - DNA, 629 bp, Artificial Sequence
  derived and/or modified sequence
gacaaacaggattcgtcaaaagagaggtgtattaaagtgccgatcaaatgtaatttaacagctaaactttccctccttggaaaacagggaaagctgcccacttctagctgccctgccatcccctttaaagggcgacttgctcagcgccaaaccgcggctccagccctctccagcctccggctcagccggctcatcagtcggtccgcgccttgcagctcctccagagggacgcgccccgagatggagagcaaagccctgctcgtgctgactctggccgtgtggctccagagtctgaccgcctcccgcggaggggtggccgccgccgaccaaagaagagattttatcgacatcgaaagtaaatttgccctaaggacccctgaagacacagctgaggacacttgccacctcattcccggagtagcagagtccgtggctacctgtcatttcaatcacagcagcaaaaccttcatggtgatccatggctggacggtaacaggaatgtatgagagttgggtgccaaaacttgtggccgccctgtacaagagagaaccagactccaatgtcattgtggtggactggctgtcacgggctcaggagcattacccagtgtccgcgggctacaccaaact

SEQ ID NO: 5236 - DNA, 3335 bp, Artificial Sequence
  derived and/or modified sequence
atggagagcaaagccctgctcgtgctgactctggccgccgccgaccaaagaagagattttatcgacatcgaaagtaaatttgccctaaggacccctgaagacacagctgaggacacttgccacctcattcccggagtagcagagtccgtggctacctgtcatttcaatcacagcagcaaaaccttcatggtgatccatggctggacggtaacaggaatgtatgagagttgggtgccaaaacttgtggccgccctgtacaagagagaaccagactccaatgtcattgtggtggactggctgtcacgggctcaggagcattacccagtgtccgcgggctacaccaaactggtgggacaggatgtggcccggtttatcaactggatggaggaggagtttaactaccctctggacaatgtccatctcttgggatacagccttggagcccatgctgctggcattgcaggaagtctgaccaataagaaagtcaacagaattactggcctcgatccagctggacctaactttgagtatgcagaagccccgagtcgtctttctcctgatgatgcagattttgtagacgtcttacacacattcaccagagggtcccctggtcgaagcattggaatccagaaaccagttgggcatgttgacatttacccgaatggaggtacttttcagccaggatgtaacattggagaagctatccgcgtgattgcagagagaggacttggagatgtggaccagctagtgaagtgctcccacgagcgctccattcatctcttcatcgactctctgttgaatgaagaaaatccaagtaaggcctacaggtgcagttccaaggaagcctttgagaaagggctctgcttgagttgtagaaagaaccgctgcaacaatctgggctatgagatcaataaagtcagagccaaaagaagcagcaaaatgtacctgaagactcgttctcagatgccctacaaagtcttccattaccaagtaaagattcatttttctgggactgagagtgaaacccataccaatcaggcctttgagatttctctgtatggcaccgtggccgagagtgagaacatcccattcactctgcctgaagtttccacaaataagacctactccttcctaatttacacagaggtagatattggagaactactcatgttgaagctcaaatggaagagtgattcatactttagctggtcagactggtggagcagtcccggcttcgccattcagaagatcagagtaaaagcaggagagactcagaaaaaggtgatcttctgttctagggagaaagtgtctcatttgcagaaaggaaaggcacctgcggtatttgtgaaatgccatgacaagtctctgaataagaagtcaggctgaaactgggcgaatctacagaacaaagaacggcatgtgaattctgtgaagaatgaagtggaggaagtaacttttacaaaacatacccagtgtttggggtgtttcaaaagtggattttcctgaatattaatcccagccctacccttgttagttattttaggagacagtctcaagcactaaaaagtggctaattcaatttatggggtatagtggccaaatagcacatcctccaacgttaaaagacagtggatcatgaaaagtgctgttttgtcctttgagaaagaaataattgtttgagcgcagagtaaaataaggctccttcatgtggcgtattgggccatagcctataattggttagaacctcctattttaattggaattctggatctttcggactgaggccttctcaaactttactctaagtctccaagaatacagaaaatgcttttccgcggcacgaatcagactcatctacacagcagtatgaatgatgttttagaatgattccctcttgctattggaatgtggtccagacgtcaaccaggaacatgtaacttggagagggacgaagaaagggtctgataaacacagaggttttaaacagtccctaccattggcctgcatcatgacaaagttacaaattcaaggagatataaaatctagatcaattaattcttaataggctttatcgtttattgcttaatccctctctcccccttcttttttgtctcaagattatattataataatgttctctgggtaggtgttgaaaatgagcctgtaatcctcagctgacacataatttgaatggtgcagaaaaaaaaaaagaaaccgtaattttattattagattctccaaatgattttcatcaatttaaaatcattcaatatctgacagttactcttcagttttaggcttaccttggtcatgcttcagttgtacttccagtgcgtctcttttgttcctggctttgacatgaaaagataggtttgagttcaaattttgcattgtgtgagcttctacagattttagacaaggaccgtttttactaagtaaaagggtggagaggttcctggggtggattcctaagcagtgcttgtaaaccatcgcgtgcaatgagccagatggagtaccatgagggttgctatttgttgtttttaacaactaatcaagagtgagtgaacaactatttataaactagatctcctatttttcagaatgctcttctacgtataaatatgaaatgataaagatgtcaaatatctcagaggctatagctgggaacccgactgtgaaagtatgtgatatctgaacacatactagaaagctctgcatgtgtgttgtccttcagcataattcggaagggaaaacagtcgatcaagggatgtattggaacatgtcggagtagaaattgttcctgatgtgccagaacttcgaccctttctctgagagagatgatcgtgcctataaatagtaggaccaatgttgtgattaacatcatcaggcttggaatgaattctctctaaaaataaaatgatgtatgatttgttgttggcatcccctttattaattcattaaatttctggatttgggttgtgacccagggtgcattaacttaaaagattcactaaagcagcacatagcactgggaactctggctccgaaaaactttgttatatatatcaaggatgttctggctttacattttatttattagctgtaaatacatgtgtggatgtgtaaatggagcttgtacatattggaaaggtcattgtggctatctgcatttataaatgtgtggtgctaactgtatgtgtctttatcagtgatggtctcacagagccaactcactcttatgaaatgggctttaacaaaacaagaaagaaacgtacttaactgtgtgaagaaatggaatcagcttttaataaaattgacaacattttattaccaca

SEQ ID NO: 5237 - DNA, 3737 bp, Artificial Sequence
  derived and/or modified sequence
ccgtctgccctttccccctcttctcgttggcagggttgatcctcattactgtttgctcaaacgtttagaagtgaatttaggtccctccccccaacttatgattttatagccaataggtgatgaggtttatttgcatatttccagtcacataagcagccttggcgtgaaaacagtgtcagactcgattccccctcttcctcctcctcaagggaaagctgcccacttctagctgccctgccatcccctttaaagggcgacttgctcagcgccaaaccgcggctccagccctctccagcctccggctcagccggctcatcagtcggtccgcgccttgcagctcctccagagggacgcgccccgagatggagagcaaagccctgctcgtgctgactctggccgtgtggctccagagtctgaccgcctcccgcggaggggtggccgccgccgaccaaagaagagattttatcgacatcgaaagtaaatttgccctaaggacccctgaagacacagctgaggacacttgccacctcattcccggagtagcagagtccgtggctacctgtcatttcaatcacagcagcaaaaccttcatggtgatccatggctggacggtaacaggaatgtatgagagttgggtgccaaaacttgtggccgccctgtacaagagagaaccagactccaatgtcattgtggtggactggctgtcacgggctcaggagcattacccagtgtccgcgggctacaccaaactggtgggacaggatgtggcccggtttatcaactggatggaggaggagtttaactaccctctggacaatgtccatctcttgggatacagccttggagcccatgctgctggcattgcaggaagtctgaccaataagaaagtcaacagaattactggcctcgatccagctggacctaactttgagtatgcagaagccccgagtcgtctttctcctgatgatgcagattttgtagacgtcttacacacattcaccagagggtcccctggtcgaagcattggaatccagaaaccagttgggcatgttgacatttacccgaatggaggtacttttcagccaggatgtaacattggagaagctatccgcgtgattgcagagagaggacttggagatgtggaccagctagtgaagtgctcccacgagcgctccattcatctcttcatcgactctctgttgaatgaagaaaatccaagtaaggcctacaggtgcagttccaaggaagcctttgagaaagggctctgcttgagttgtagaaagaaccgctgcaacaatctgggctatgagatcaataaagtcagagccaaaagaagcagcaaaatgtacgaagactcgttctcagatgccctacaaagtcttccattaccaagtaaagattcatttttctgggactgagagtgaaacccataccaatcaggcctttgagatttctctgtatggcaccgtggccgagagtgagaacatcccattcactctgcctgaagtttccacaaataagacctactccttcctaatttacacagaggtagatattggagaactactcatgttgaagctcaaatggaagagtgattcatactttagctggtcagactggtggagcagtcccggcttcgccattcagaagatcagagtaaaagcaggagagactcagaaaaaggtgatcttctgttctagggagaaagtgtctcatttgcagaaaggaaaggcacctgcggtatttgtgaaatgccatgacaagtctctgaataagaagtcaggctgaaactgggcgaatctacagaacaaagaacggcatgtgaattctgtgaagaatgaagtggaggaagtaacttttacaaaacatacccagtgtttggggtgtttcaaaagtggattttcctgaatattaatcccagccctacccttgttagttattttaggagacagtctcaagcactaaaaagtggctaattcaatttatggggtatagtggccaaatagcacatcctccaacgttaaaagacagtggatcatgaaaagtgctgttttgtcctttgagaaagaaataattgtttgagcgcagagtaaaataaggctccttcatgtggcgtattgggccatagcctataattggttagaacctcctattttaattggaattctggatctttcggactgaggccttctcaaactttactctaagtctccaagaatacagaaaatgcttttccgcggcacgaatcagactcatctacacagcagtatgaatgatgttttagaatgattccctcttgctattggaatgtggtccagacgtcaaccaggaacatgtaacttggagagggacgaagaaagggtctgataaacacagaggttttaaacagtccctaccattggcctgcatcatgacaaagttacaaattcaaggagatataaaatctagatcaattaattcttaataggctttatcgtttattgcttaatccctctctcccccttcttttttgtctcaagattatattataataatgttctctgggtaggtgttgaaaatgagcctgtaatcctcagctgacacataatttgaatggtgcagaaaaaaaaaaagaaaccgtaattttattattagattctccaaatgattttcatcaatttaaaatcattcaatatctgacagttactcttcagttttaggcttaccttggtcatgcttcagttgtacttccagtgcgtctcttttgttcctggctttgacatgaaaagataggtttgagttcaaattttgcattgtgtgagcttctacagattttagacaaggaccgtttttactaagtaaaagggtggagaggttcctggggtggattcctaagcagtgcttgtaaaccatcgcgtgcaatgagccagatggagtaccatgagggttgctatttgttgtttttaacaactaatcaagagtgagtgaacaactatttataaactagatctcctatttttcagaatgctcttctacgtataaatatgaaatgataaagatgtcaaatatctcagaggctatagctgggaacccgactgtgaaagtatgtgatatctgaacacatactagaaagctctgcatgtgtgttgtccttcagcataattcggaagggaaaacagtcgatcaagggatgtattggaacatgtcggagtagaaattgttcctgatgtgccagaacttcgaccctttctctgagagagatgatcgtgcctataaatagtaggaccaatgttgtgattaacatcatcaggcttggaatgaattctctctaaaaataaaatgatgtatgatttgttgttggcatcccctttattaattcattaaatttctggatttgggttgtgacccagggtgcattaacttaaaagattcactaaagcagcacatagcactgggaactctggctccgaaaaactttgttatatatatcaaggatgttctggctttacattttatttattagctgtaaatacatgtgtggatgtgtaaatggagcttgtacatattggaaaggtcattgtggctatctgcatttataaatgtgtggtgctaactgtatgtgtctttatcagtgatggtctcacagagccaactcactcttatgaaatgggctttaacaaaacaagaaagaaacgtacttaactgtgtgaagaaatggaatcagcttttaataaaattgacaacattttattaccaca

SEQ ID NO: 5238 - DNA, 1428 bp, Artificial Sequence
  derived and/or modified sequence
atggagtcaaaagctcttcttgtgttgactctcgccgtctggctgcagtccctgaccgcctcgagaggaggagtggcagcagccgaccagagacgcgattttattgatatagaatccaagtttgccctccgtacccccgaagatactgcagaggatacctgtcatcttatcccaggtgttgcagagtccgttgctacctgtcacttcaatcatagttccaaaaccttcatggtgatccacggatggactgtaacaggaatgtacgagtcatgggtcccaaaactggtggccgctctctataaaagagaaccggattctaacgttattgtggttgactggctgtctagggctcaagaacattaccccgtgagtgcaggttataccaagctggttgggcaggacgttgcgagatttattaattggatggaagaagagttcaattacccactggacaatgtgcacctgctcggctactcccttggcgcacacgccgcaggcattgccgggtcactgaccaataaaaaagtaaaccgcatcacaggtctggacccagccggtccgaactttgaatatgccgaggctccctcacgactgtcccccgatgacgcagatttcgtcgatgttctgcacacgtttactagaggaagccctgggcgcagcataggtattcaaaaacccgtaggacatgtggatatctacccaaatggaggcacgttccagcctggatgtaatatcggtgaggctatccgcgtcatagccgaaagaggcctgggggacgtagaccagctagtgaagtgcagccacgagcgcagtatccatttattcatcgattccctgctgaatgaagagaatccatctaaggcttataggtgctcaagcaaagaagccttcgaaaaaggactttgcctttcgtgcagaaaaaatcgttgcaataacctcggttatgagattaataaagtcagagctaagagatcttctaagatgtatctgaagacccgatctcaaatgccttataaagttttccactaccaggtcaagatacacttcagcggcaccgaatcagagactcacactaatcaggcttttgagatctccttgtatggcacagttgccgagtcagaaaatattccctttacactcccagaagtcagcacgaacaaaacctattcctttttaatttataccgaggtcgacatcggtgaactgctcatgctaaaactgaaatggaagtcagattcttacttctcgtggagcgattggtggagcagcccaggatttgctatacagaaaattagagttaaagccggtgaaacccagaagaaagtgatcttttgttcaagagaaaaggtttctcacctgcaaaagggtaaagcccctgccgtgttcgtgaaatgccatgataagtcactgaataaaaagtccggctag

SEQ ID NO: 5239 - DNA, 348 bp, Artificial Sequence
  derived and/or modified sequence
atggttatccatggctggactgtgactggcatgtacgaaagttgggttccaaaactggtggccgccctttacaaacgcgagccggattctaatgtgattgtcgtcgattggctttctcgcgcacaggagcattaccccgtgtcggcaggatatactaaattggttggtcaggatgtggcaagatttattaactggatggaggaggaattcaactacccccttgataacgtgcacctgttagggtatagtctgggtgcccacgccgccggtatcgctggctcactcacaaataagaaggtcaacagaatcaccggcttagatccagcaggcccaaactttgaatactag

SEQ ID NO: 5240 - DNA, 321 bp, Artificial Sequence
  derived and/or modified sequence
atggaatcgaaagctttactggtcctgacgctggccgtctggcttcaaagtttaaccgcctccaggggaggcgttgccgccgcagatcagaggcgtgattttattgacatcgagtctaaatttgcattacgcacaccagaggatactgccgaagatacctgtcacttaatccccggcgtagccgagagcgtggccacttgccatttcaaccatagttcaaaaacctttatggtcattcacggctggaccgtcaccggtatgtacgaatcttgggtgcctaaactggtcgctgcactgtacaaacgcgaaccagattcttag

SEQ ID NO: 5241 - DNA, 393 bp, Artificial Sequence
  derived and/or modified sequence
atggaaagcaaagccctgttagtgctcaccctggccgtatggctgcagtctctgacagctagccgtggtggcgttgccgctgctgaccagcgtagggactttatcgatattgagtccaaatttgccctccgcacacctgaagataccgccgaggacacctgtcatctcatacccggcgtcgctgaaagcgttgctacctgccactttaaccattcgtccaagacctttatggtgatccacgggtggacagttaccggtatgtacgagtcgtgggtccccaaactagtcgctgccctttacaagagagagcctgattctaacgtgatcgtcgttgactggttgagcagagcccaggagcactaccccgtatcggctgggtacacaaagctgtag

SEQ ID NO: 5242 - DNA, 1386 bp, Artificial Sequence
  derived and/or modified sequence
atggaatctaaggcactgcttgtgttgaccttggctgccgctgatcagaggagagacttcatcgatattgaaagcaaattcgcccttcgcactcctgaggatactgctgaggatacatgccatttaatccccggcgtagctgagagcgttgctacgtgtcacttcaaccacagttcaaaaactttcatggtaattcacggctggacagtaaccggcatgtatgagagctgggttccaaagttagtagccgccctttacaaacgtgaacccgactccaatgtgatagttgtagattggctgtcccgtgcccaagaacactaccccgtttcagctggatacacaaaactcgtaggacaggacgtggcccgctttattaactggatggaggaggagttcaattacccactggataatgtacatttgctaggatactcactgggggcccacgcagccggcatcgctggcagtttaacaaacaagaaggtgaatagaattacaggcctggatcccgctggcccgaacttcgagtacgccgaggccccttcacgcctgagccctgatgacgcggacttcgtcgacgtgctgcacaccttcacacgcgggtcaccaggacgttctattggtatccagaaacccgtcgggcacgtcgacatctatccaaatgggggaacctttcaacccggatgcaatattggcgaagcaatcagagtcatagctgagagaggattgggagacgtggaccagctcgtgaaatgttcccacgaacgttcaatacacctatttatcgactccctactgaatgaggagaacccaagcaaggcataccgttgcagctctaaggaggccttcgaaaaaggattgtgcctgtcatgtcgaaaaaaccgctgtaataatctcggctacgaaattaacaaagtacgcgcaaaacggagttctaaaatgtaccttaagacccggagtcagatgccctataaagtttttcattaccaggttaagatccatttttccgggacagagtctgaaactcacaccaaccaagcctttgaaataagcctttacggtacagttgctgagtcggagaacattccctttacccttccagaggttagtactaacaagacatacagcttcctaatatacactgaagtagacattggagaacttctgatgcttaaactcaaatggaagtctgatagttactttagttggtccgactggtggagctccccaggcttcgcaattcaaaaaatccgcgtcaaagcaggcgagacccaaaagaaagttattttctgctcaagggagaaggtcagccatttacagaaaggaaaagcccccgcggtcttcgtcaagtgccatgataaatcactgaacaaaaagtcagggtag

SEQ ID NO: 5243 - DNA, 828 bp, Artificial Sequence
  derived and/or modified sequence
atggtgattcatggatggacggtgacaggtatgtacgagagttgggttccaaaactggtggcggctctgtataaacgagaacctgacagcaatgtgatcgtcgttgattggctgagtagagcacaggagcactaccccgtgtcagctggatacactaaactcgtaggtcaggatgtggcccgttttataaactggatggaagaggagttcaattatccactggataacgtccatttacttggctacagcctgggagcccatgccgcaggcatcgccgggtcattgacaaataagaaagtcaaccgtattacgggcttagatcctgccggcccaaatttcgaatatgccgaagctcctagtcgattgtcaccggatgatgctgacttcgtcgatgtgctgcacactttcaccagaggctcacccggtagatccatcggtatccagaagccagtgggacacgtggacatttatccaaacggagggacatttcagccaggctgtaatattggcgaggctatcagggtgattgcagagcgcggcttaggtgacgtggatcaattggtcaagtgttcgcacgaaagatcaattcaccttttcatcgatagtctgcttaacgaggaaaacccatcaaaggcatatcggtgctccagtaaagaagcatttgaaaagggattgtgcctgtcttgcagaaagaaccgatgcaacaatttggggtatgagattaataaagttagagctaaaaggagcagtaaaatgtacgaagactccttctcggacgctttacaaagcctccctctcccatccaaggattccttcttctgggattag

SEQ ID NO: 5244 - DNA, 1586 bp, Artificial Sequence
  derived and/or modified sequence
gggaaataagagagaaaagaagagtaagaagaaatataagagccaccatggaaagcaaagcgctcctggtgctgaccctggcagtctggcttcaatcattaacagcctcaagaggaggggtggccgctgccgaccaaagaagggacttcatcgatatagagagcaagtttgcgttgagaactccagaagatactgctgaagatacctgtcacctgattcctggtgtggccgaatccgtggcaacttgtcatttcaatcattcctctaagacgttcatggtgatccatggatggacggtgaccggtatgtacgagtcgtgggttcctaagcttgtggccgcactgtacaagagagaacctgactcgaatgtcattgtggtggattggttgtcgcgagcacaagaacattaccctgtgtcggcaggttacaccaagctcgtcggacaagatgtcgcacgttttatcaactggatggaagaggagtttaactacccactcgacaacgtccatcttcttggatacagcctcggagctcatgcagcgggtattgcgggttcgctcaccaacaagaaagtgaacagaattaccggacttgatccggcaggtccaaacttcgaatacgcagaggcaccctctcgcctctcccctgatgatgcagattttgtggacgtgttacatacttttactcggggatcacccggaagaagtataggcattcagaagccagttgggcatgtcgatatatatcctaacggcggaacttttcagccaggctgtaacattggagaagcaattagggtcattgcagaacgcggcttgggagatgtggatcagctggtgaagtgcagccacgagagatcgatccacctgtttatcgattcactgcttaatgaggaaaatccctcgaaagcatatcgctgttccagcaaggaagcatttgaaaaaggtctttgtctgagctgccgcaagaatcggtgcaacaacctcggatatgaaatcaacaaggtgcgagcaaagcgttcgtcaaagatgtaccttaagaccagatcacagatgccttacaaggtgtttcactaccaagtgaagatacacttttccggcacggagagcgagactcataccaaccaagctttcgaaatctccctttacggtactgtcgccgaatccgagaacattccgttcactctgcctgaggtgtcaaccaataagacctacagcttcctgatatacaccgaagtggatatcggggaacttctgatgcttaaactcaaatggaagtccgattcctacttttcgtggagcgactggtggtcgtcgccagggtttgccattcagaagattcgggtcaaagcaggtgaaactcagaaaaaggtcattttctgctcaagggaaaaagtctcccatcttcaaaagggaaaagcacccgcagtgtttgtgaaatgtcatgacaagtccctgaataagaagtcgggatgataataggctggagcctcggtggccatgcttcttgccccttgggcctccccccagcccctcctccccttcctgcacccgtacccccgtggtctttgaataaagtctgagtgg

SEQ ID NO: 5245 - RNA, 1428 nt, Artificial Sequence
  derived and/or modified sequence
auggaguccaaggcacugcuagugcugacacuagccgucugguugcagagccuaaccgcaagcagaggaggggucgcagcugcagaccaacgacgggauuuuauugauaucgaauccaaauucgcccuuaggacaccagaagauacagccgaggacacaugucacuugaucccugggguugccgaguccguugccacuugccacuucaaucacaguagcaaaaccuuuauggucauacacggcuggacaguuacuggaauguacgaaaguuggguuccaaagcugguugcggccuuauauaaaagagaaccagauucaaacgucaucgucguugacuggcugucaagagcucaggagcauuaucccguuuccgcaggguacacuaaguuagugggucaggauguggcucgcuucaucaacuggauggaagaagaguuuaauuacccauuagauaacgugcaccuuuugggcuauucccugggugcccacgcugcuggcauugcuggcucccucacaaacaagaaagugaauagaaucaccggccuggacccagcagggccgaacuuugaauaugccgaagcgcccaguagacucucuccggacgaugcggauuucgucgacguccugcauaccuuuacacgaggauccccuggucgaucgauaggcauacagaagccgguuggucacguggacaucuaucccaauggggggacguuccagcccggguguaacauuggagaagccaucagaguuaucgccgagcggggccuuggggacguggaucagcucgugaaaugcagucacgaacguuccauacaccuguuuaucgauagucuacugaacgaagaaaaucccagcaaggccuaccggugcagcaguaaagaagcuuuugaaaaaggcuuaugucugagcugccgaaaaaaucggugcaauaauuugggguacgaaauaaacaaaguucgcgcuaagagaagcuccaagauguaccugaagacuagaucccagaugccuuacaagguauuccauuaccaagugaagauccauuuuuccggaacagaaagcgaaacccacaccaaccaggccuuugagauuagccuguauggcaccguagcugaauccgagaacauccccuuuacgcugcccgaaguaaguacuaauaaaaccuacagcuuucugauuuauacagaaguggauauuggcgaacugcugaugcugaagcugaaguggaagucagacagcuacuuuucguggagcgacugguggucuucccccggauuugcaauacagaaaaucagggugaaagccggagagacacagaaaaaggugaucuucuguagcagagaaaagguaagucaucugcagaaggguaaggcuccagcgguguuugucaagugccaugacaaaucccugaauaaaaaguccggcuag

SEQ ID NO: 5246 - RNA, 348 nt, Artificial Sequence
  derived and/or modified sequence
augguuauccauggcuggacugugacuggcauguacgaaaguuggguuccaaaacugguggccgcccuuuacaaacgcgagccggauucuaaugugauugucgucgauuggcuuucucgcgcacaggagcauuaccccgugucggcaggauauacuaaauugguuggucaggauguggcaagauuuauuaacuggauggaggaggaauucaacuacccccuugauaacgugcaccuguuaggguauagucugggugcccacgccgccgguaucgcuggcucacucacaaauaagaaggucaaucgaaucaccggccuugacccugccgggcccaauuuugaguauuag

SEQ ID NO: 5247 - RNA, 321 nt, Artificial Sequence
  derived and/or modified sequence
auggaaucgaaagcuuuacugguccugacgcuggccgucuggcuucaaaguuuaaccgccuccaggggaggcguugccgccgcagaucagaggcgugauuuuauugacaucgagucuaaauuugcauuacgcacaccagaggauacugccgaagauaccugucacuuaauccccggcguagccgagagcguggccacuugccauuucaaccauaguucaaaaaccuuuauggucauucacggcuggaccgucaccgguauguacgaaucuugggugccuaaacuggucgcugcacuguacaagcgggaaccagauucuuag

SEQ ID NO: 5248 - RNA, 393 nt, Artificial Sequence
  derived and/or modified sequence
auggaaaguaaagcacuacugguccucaccuuagcuguauggcugcagucuuugacagcgagccgcggggggguggcagcugcagaccaacgccgggauuucauugacauagaaagcaaauuugccuuacgcaccccagaagacacagcugaagauacuugccaucucauccccggcguagcugaaagcguggcuaccugucacuuuaaccacaguuccaagaccuucauggugauccacggcuggacugucacaggaauguacgagucaugggugccgaagcugguggcggccuuguauaaacgcgagccugacaguaaugucauagugguggacuggcugagccgagcccaagagcacuaccccgugagugcuggauauacaaaacuguag

SEQ ID NO: 5249 - RNA, 1386 nt, Artificial Sequence
  derived and/or modified sequence
auggaaaguaaggcacuacucguuuugacacuagccgccgcugaucagcgcagagacuuuaucgauaucgaaucuaaauucgcuuugcgcacccccgaagacacugcugaagauacaugccaccuuaucccugggguggcugaauccgucgccacuugccauuucaaccauucaagcaagacuuucauggugauccacggauggacggucacaggcauguacgaauccugggugcccaagcucgucgcugcccuguacaagagagaaccagacuccaaugucauuguugucgacuggcugagcagggcucaggaacauuaucccgugucugcuggauacacaaagcuggucgggcaagacguagccagauuuaucaacuggauggaggaggaauuuaacuacccgcuggacaacguacaucugcuugguuauuccuuaggggcccacgccgccgggauugcagggucucugacgaacaaaaaggucaaucggauuaccgggcucgauccagccgguccaaauuucgaauacgcugaagcgccuucaagacuguccccagaugaugcagauuucguggauguccuacacacguuuacuagaggaucaccaggacgcaguaucggaauccaaaaacccgucggacacguggauaucuaucccaauggaggaacuuuccaaccgggauguaauauuggugaggccaucagggugauugccgaacgugguuugggagacguugaucaacuggugaaguguagccacgaaaggaguauucaucuguuuauugacucacuucugaaugaggagaaccccucaaaagcuuacagguguucaucaaaggaggcauuugagaaaggccuuugucugucgugcaggaagaaucgauguaauaaucucggauacgaaauuaacaagguuagggcgaagcggaguaguaagauguauuuaaagacccguagucagaugcccuacaaggucuuccacuaucaagugaaaauccacuuuucgggcaccgaauccgaaacacacaccaaccaggccuucgagauuucuuuauaugggaccguggccgaaagugagaauauaccuuucacauuacccgaggugucuacaaacaagacguauuccuucuuaauuuacacagaaguugacauaggcgagcugcuaaugcugaagcuaaaguggaagagcgauucguauuucaguuggucagacuggugguccagcccaggauuugcaauccagaaaauucgcgucaaagccggugagacacaaaaaaaaguuauauucuguucuagggaaaaagugagccaucuucagaaagguaaggccccagccgucuuuguuaagugccacgacaagucccuaaauaaaaagucaggcuag

SEQ ID NO: 5250 - RNA, 828 nt, Artificial Sequence
  derived and/or modified sequence
auggugauccacggguggacugucacuggaauguacgaguccugggugccaaaguuaguugcagcgcuuuauaagagagaaccugauagcaacguuauuguggucgacuggcugucccgcgcccaagagcacuacccagugucugcggguuauacuaagcugguagggcaggauguggcacgguuuauaaauuggauggaggaagaguuuaauuauccccucgacaaugugcaucugcucggcuauagcuugggagcgcacgcagcagggaucgcgggaagucuaaccaauaagaaggugaaucgcauuacagggcuugauccugccggcccaaacuuugaauaugcugaagcccccucacggcugagcccugacgacgcagauuuugucgauguccugcacacuuucacacgcggcucuccuggcagaucuaucggcauucaaaaacccgugggccauguagauauuuaucccaauggaggcacauuucaaccuggaugcaacauaggagaggcaauaaggguaauugccgaaaggggccugggcgacguugaucagcuugugaaaugcucacacgagcguagcauccacuuguucaucgacagccuguugaaugaggagaaccccagcaaagccuacaggugcucaaguaaggaggcuuuugaaaaaggucuuugucuuagcugccgaaaaaaccgaugcaacaaucugggcuaugaaaucaauaaaguaagggccaagcgguccucaaaaauguacgaagacucuuuuucggaugcacugcagagccugccguugccaucaaaagacaguuuuuucugggacuag

SEQ ID NO: 5251 - RNA, 1428 nt, Artificial Sequence
  derived and/or modified sequence
auggagucaaaagcucuucuuguguugacucucgccgucuggcugcagucccugaccgccucgagaggaggaguggcagcagccgaccagagacgcgauuuuauugauauagaauccaaguuugcccuccguacccccgaagauacugcagaggauaccugucaucuuaucccagguguugcagaguccguugcuaccugucacuucaaucauaguuccaaaaccuucauggugauccacggauggacuguaacaggaauguacgagucaugggucccaaaacugguggccgcucucuauaaaagagaaccggauucuaacguuauugugguugacuggcugucuagggcucaagaacauuaccccgugagugcagguuauaccaagcugguugggcaggacguugcgagauuuauuaauuggauggaagaagaguucaauuacccacuggacaaugugcaccugcucggcuacucccuuggcgcacacgccgcaggcauugccgggucacugaccaauaaaaaaguaaaccgcaucacaggucuggacccagccgguccgaacuuugaauaugccgaggcucccucacgacugucccccgaugacgcagauuucgucgauguucugcacacguuuacuagaggaagcccugggcgcagcauagguauucaaaaacccguaggacauguggauaucuacccaaauggaggcacguuccagccuggauguaauaucggugaggcuauccgcgucauagccgaaagaggccugggggacguagaccagcuagugaagugcagccacgagcgcaguauccauuuauucaucgauucccugcugaaugaagagaauccaucuaaggcuuauaggugcucaagcaaagaagccuucgaaaaaggacuuugccuuucgugcagaaaaaaucguugcaauaaccucgguuaugagauuaauaaagucagagcuaagagaucuucuaagauguaucugaagacccgaucucaaaugccuuauaaaguuuuccacuaccaggucaagauacacuucagcggcaccgaaucagagacucacacuaaucaggcuuuugagaucuccuuguauggcacaguugccgagucagaaaauauucccuuuacacucccagaagucagcacgaacaaaaccuauuccuuuuuaauuuauaccgaggucgacaucggugaacugcucaugcuaaaacugaaauggaagucagauucuuacuucucguggagcgauugguggagcagcccaggauuugcuauacagaaaauuagaguuaaagccggugaaacccagaagaaagugaucuuuuguucaagagaaaagguuucucaccugcaaaaggguaaagccccugccguguucgugaaaugccaugauaagucacugaauaaaaaguccggcuag

SEQ ID NO: 5252 - RNA, 348 nt, Artificial Sequence
  derived and/or modified sequence
augguuauccauggcuggacugugacuggcauguacgaaaguuggguuccaaaacugguggccgcccuuuacaaacgcgagccggauucuaaugugauugucgucgauuggcuuucucgcgcacaggagcauuaccccgugucggcaggauauacuaaauugguuggucaggauguggcaagauuuauuaacuggauggaggaggaauucaacuacccccuugauaacgugcaccuguuaggguauagucugggugcccacgccgccgguaucgcuggcucacucacaaauaagaaggucaacagaaucaccggcuuagauccagcaggcccaaacuuugaauacuag

SEQ ID NO: 5253 - RNA, 321 nt, Artificial Sequence
  derived and/or modified sequence
auggaaucgaaagcuuuacugguccugacgcuggccgucuggcuucaaaguuuaaccgccuccaggggaggcguugccgccgcagaucagaggcgugauuuuauugacaucgagucuaaauuugcauuacgcacaccagaggauacugccgaagauaccugucacuuaauccccggcguagccgagagcguggccacuugccauuucaaccauaguucaaaaaccuuuauggucauucacggcuggaccgucaccgguauguacgaaucuugggugccuaaacuggucgcugcacuguacaaacgcgaaccagauucuuag

SEQ ID NO: 5254 - RNA, 393 nt, Artificial Sequence
  derived and/or modified sequence
auggaaagcaaagcccuguuagugcucacccuggccguauggcugcagucucugacagcuagccgugguggcguugccgcugcugaccagcguagggacuuuaucgauauugaguccaaauuugcccuccgcacaccugaagauaccgccgaggacaccugucaucucauacccggcgucgcugaaagcguugcuaccugccacuuuaaccauucguccaagaccuuuauggugauccacggguggacaguuaccgguauguacgagucguggguccccaaacuagucgcugcccuuuacaagagagagccugauucuaacgugaucgucguugacugguugagcagagcccaggagcacuaccccguaucggcuggguacacaaagcuguag

SEQ ID NO: 5255 - RNA, 1386 nt, Artificial Sequence
  derived and/or modified sequence
auggaaucuaaggcacugcuuguguugaccuuggcugccgcugaucagaggagagacuucaucgauauugaaagcaaauucgcccuucgcacuccugaggauacugcugaggauacaugccauuuaauccccggcguagcugagagcguugcuacgugucacuucaaccacaguucaaaaacuuucaugguaauucacggcuggacaguaaccggcauguaugagagcuggguuccaaaguuaguagccgcccuuuacaaacgugaacccgacuccaaugugauaguuguagauuggcugucccgugcccaagaacacuaccccguuucagcuggauacacaaaacucguaggacaggacguggcccgcuuuauuaacuggauggaggaggaguucaauuacccacuggauaauguacauuugcuaggauacucacugggggcccacgcagccggcaucgcuggcaguuuaacaaacaagaaggugaauagaauuacaggccuggaucccgcuggcccgaacuucgaguacgccgaggccccuucacgccugagcccugaugacgcggacuucgucgacgugcugcacaccuucacacgcgggucaccaggacguucuauugguauccagaaacccgucgggcacgucgacaucuauccaaaugggggaaccuuucaacccggaugcaauauuggcgaagcaaucagagucauagcugagagaggauugggagacguggaccagcucgugaaauguucccacgaacguucaauacaccuauuuaucgacucccuacugaaugaggagaacccaagcaaggcauaccguugcagcucuaaggaggccuucgaaaaaggauugugccugucaugucgaaaaaaccgcuguaauaaucucggcuacgaaauuaacaaaguacgcgcaaaacggaguucuaaaauguaccuuaagacccggagucagaugcccuauaaaguuuuucauuaccagguuaagauccauuuuuccgggacagagucugaaacucacaccaaccaagccuuugaaauaagccuuuacgguacaguugcugagucggagaacauucccuuuacccuuccagagguuaguacuaacaagacauacagcuuccuaauauacacugaaguagacauuggagaacuucugaugcuuaaacucaaauggaagucugauaguuacuuuaguugguccgacugguggagcuccccaggcuucgcaauucaaaaaauccgcgucaaagcaggcgagacccaaaagaaaguuauuuucugcucaagggagaaggucagccauuuacagaaaggaaaagcccccgcggucuucgucaagugccaugauaaaucacugaacaaaaagucaggguag

SEQ ID NO: 5256 - RNA, 828 nt, Artificial Sequence
  derived and/or modified sequence
auggugauucauggauggacggugacagguauguacgagaguuggguuccaaaacugguggcggcucuguauaaacgagaaccugacagcaaugugaucgucguugauuggcugaguagagcacaggagcacuaccccgugucagcuggauacacuaaacucguaggucaggauguggcccguuuuauaaacuggauggaagaggaguucaauuauccacuggauaacguccauuuacuuggcuacagccugggagcccaugccgcaggcaucgccgggucauugacaaauaagaaagucaaccguauuacgggcuuagauccugccggcccaaauuucgaauaugccgaagcuccuagucgauugucaccggaugaugcugacuucgucgaugugcugcacacuuucaccagaggcucacccgguagauccaucgguauccagaagccagugggacacguggacauuuauccaaacggagggacauuucagccaggcuguaauauuggcgaggcuaucagggugauugcagagcgcggcuuaggugacguggaucaauuggucaaguguucgcacgaaagaucaauucaccuuuucaucgauagucugcuuaacgaggaaaacccaucaaaggcauaucggugcuccaguaaagaagcauuugaaaagggauugugccugucuugcagaaagaaccgaugcaacaauuugggguaugagauuaauaaaguuagagcuaaaaggagcaguaaaauguacgaagacuccuucucggacgcuuuacaaagccucccucucccauccaaggauuccuucuucugggauuag

SEQ ID NO: 5257 - RNA, 1586 nt, Artificial Sequence
  derived and/or modified sequence
gggaaauaagagagaaaagaagaguaagaagaaauauaagagccaccauggaaagcaaagcgcuccuggugcugacccuggcagucuggcuucaaucauuaacagccucaagaggagggguggccgcugccgaccaaagaagggacuucaucgauauagagagcaaguuugcguugagaacuccagaagauacugcugaagauaccugucaccugauuccugguguggccgaauccguggcaacuugucauuucaaucauuccucuaagacguucauggugauccauggauggacggugaccgguauguacgagucguggguuccuaagcuuguggccgcacuguacaagagagaaccugacucgaaugucauugugguggauugguugucgcgagcacaagaacauuacccugugucggcagguuacaccaagcucgucggacaagaugucgcacguuuuaucaacuggauggaagaggaguuuaacuacccacucgacaacguccaucuucuuggauacagccucggagcucaugcagcggguauugcggguucgcucaccaacaagaaagugaacagaauuaccggacuugauccggcagguccaaacuucgaauacgcagaggcacccucucgccucuccccugaugaugcagauuuuguggacguguuacauacuuuuacucggggaucacccggaagaaguauaggcauucagaagccaguugggcaugucgauauauauccuaacggcggaacuuuucagccaggcuguaacauuggagaagcaauuagggucauugcagaacgcggcuugggagauguggaucagcuggugaagugcagccacgagagaucgauccaccuguuuaucgauucacugcuuaaugaggaaaaucccucgaaagcauaucgcuguuccagcaaggaagcauuugaaaaaggucuuugucugagcugccgcaagaaucggugcaacaaccucggauaugaaaucaacaaggugcgagcaaagcguucgucaaagauguaccuuaagaccagaucacagaugccuuacaagguguuucacuaccaagugaagauacacuuuuccggcacggagagcgagacucauaccaaccaagcuuucgaaaucucccuuuacgguacugucgccgaauccgagaacauuccguucacucugccugaggugucaaccaauaagaccuacagcuuccugauauacaccgaaguggauaucggggaacuucugaugcuuaaacucaaauggaaguccgauuccuacuuuucguggagcgacugguggucgucgccaggguuugccauucagaagauucgggucaaagcaggugaaacucagaaaaaggucauuuucugcucaagggaaaaagucucccaucuucaaaagggaaaagcacccgcaguguuugugaaaugucaugacaagucccugaauaagaagucgggaugauaauaggcuggagccucgguggccaugcuucuugccccuugggccuccccccagccccuccuccccuuccugcacccguacccccguggucuuugaauaaagucugagugg

SEQ ID NO: 5258 - protein, 1159 aa, Artificial Sequence
  derived and/or modified sequence
MPVRRGHVAPQNTFLDTIIRKFEGQSRKFIIANARVENCAVIYCNDGFCELCGYSRAEVMQRPCTCDFLHGPRTQRRAAAQIAQALLGAEERKVEIAFYRKDGSCFLCLVDVVPVKNEDGAVIMFILNFEVVMEKDMVGSPAHDTNHRGPPTSWLAPGRAKTFRLKLPALLALTARESSVRSGGAGGAGAPGAVVVDVDLTPAAPSSESLALDEVTAMDNHVAGLGPAEERRALVGPGSPPRSAPGQLPSPRAHSLNPDASGSSCSLARTRSRESCASVRRASSADDIEAMRAGVLPPPPRHASTGAMHPLRSGLLNSTSDSDLVRYRTISKIPQITLNFVDLKGDPFLASPTSDREIIAPKIKERTHNVTEKVTQVLSLGADVLPEYKLQAPRIHRWTILHYSPFKAVWDWLILLLVIYTAVFTPYSAAFLLKETEEGPPATECGYACQPLAVVDLIVDIMFIVDILINFRTTYVNANEEVVSHPGRIAVHYFKGWFLIDMVAAIPFDLLIFGSGSEELIGLLKTARLLRLVRVARKLDRYSEYGAAVLFLLMCTFALIAHWLACIWYAIGNMEQPHMDSRIGWLHNLGDQIGKPYNSSGLGGPSIKDKYVTALYFTFSSLTSVGFGNVSPNTNSEKIFSICVMLIGSLMYASIFGNVSAIIQRLYSGTARYHTQMLRVREFIRFHQIPNPLRQRLEEYFQHAWSYTNGIDMNAVLKGFPECLQADICLHLNRSLLQHCKPFRGATKGCLRALAMKFKTTHAPPGDTLVHAGDLLTALYFISRGSIEILRGDVVVAILGKNDIFGEPLNLYARPGKSNGDVRALTYCDLHKIHRDDLLEVLDMYPEFSDHFWSSLEITFNLRDTNMIPGSPGSTELEGGFSRQRKRKLSFRRRTDKDTEQPGEVSALGPGRAGAGPSSRGRPGGPWGESPSSGPSSPESSEDEGPGRSSSPLRLVPFSSPRPPGEPPGGEPLMEDCEKSSDTCNPLSGAFSGVSNIFSFWGDSRGRQYQELPRCPAPTPSLLNIPLSSPGRRPRGDVESRLDALQRQLNRLETRLSADMATVLQLLQRQMTLVPPAYSAVTTPGPGPTSTSPLLPVSPLPTLTLDSLSQVSQFMACEELPPGAPELPQEGPTRRLSLPGQLGALTSQPLHRHGSDPGS

SEQ ID NO: 5259 - DNA, 4307 bp, Artificial Sequence
  derived and/or modified sequence
ccgcggccgggccgagccgcaggcgctgcccgagccgcgggcgctggagcggctgtcggcgcggtggcaggcgggagccaggagtccggggctcgggcgggcggagcgcagcgcggggacgcggcggagcgggccccgcggctcggcgggggccggcagacaggtgtgccggcggcgggcggctcgcgctcaggcggctccaggccgggcccggggtccggagcggggagccgggagccgagcgaggacccggcgcccgcagtccagtcttggccgcgcccgtgctcggcttggccgcggggtgcggggaccacggcccggccgggccacccgaagcctagtgctgggccgggccgggccggggtgggtgggggcccgcccggcccgcccatgggctcaggatgccggtgcggaggggccacgtcgcgccgcagaacaccttcctggacaccatcatccgcaagtttgagggccagagccgtaagttcatcatcgccaacgctcgggtggagaactgcgccgtcatctactgcaacgacggcttctgcgagctgtgcggctactcgcgggccgaggtgatgcagcgaccctgcacctgcgacttcctgcacgggccgcgcacgcagcgccgcgctgccgcgcagatcgcgcaggcactgctgggcgccgaggagcgcaaagtggaaatcgccttctaccggaaagatgggagctgcttcctatgtctggtggatgtggtgcccgtgaagaacgaggatggggctgtcatcatgttcatcctcaatttcgaggtggtgatggagaaggacatggtggggtccccggctcatgacaccaaccaccggggcccccccaccagctggctggccccaggccgcgccaagaccttccgcctgaagctgcccgcgctgctggcgctgacggcccgggagtcgtcggtgcggtcgggcggcgcgggcggcgcgggcgccccgggggccgtggtggtggacgtggacctgacgcccgcggcacccagcagcgagtcgctggccctggacgaagtgacagccatggacaaccacgtggcagggctcgggcccgcggaggagcggcgtgcgctggtgggtcccggctctccgccccgcagcgcgcccggccagctcccatcgccccgggcgcacagcctcaaccccgacgcctcgggctccagctgcagcctggcccggacgcgctcccgagaaagctgcgccagcgtgcgccgcgcctcgtcggccgacgacatcgaggccatgcgcgccggggtgctgcccccgccaccgcgccacgccagcaccggggccatgcacccactgcgcagcggcttgctcaactccacctcggactccgacctcgtgcgctaccgcaccattagcaagattccccaaatcaccctcaactttgtggacctcaagggcgaccccttcttggcttcgcccaccagtgaccgtgagatcatagcacctaagataaaggagcgaacccacaatgtcactgagaaggtcacccaggtcctgtccctgggcgccgacgtgctgcctgagtacaagctgcaggcaccgcgcatccaccgctggaccatcctgcattacagccccttcaaggccgtgtgggactggctcatcctgctgctggtcatctacacggctgtcttcacaccctactcggctgccttcctgctgaaggagacggaagaaggcccgcctgctaccgagtgtggctacgcctgccagccgctggctgtggtggacctcatcgtggacatcatgttcattgtggacatcctcatcaacttccgcaccacctacgtcaatgccaacgaggaggtggtcagccaccccggccgcatcgccgtccactacttcaagggctggttcctcatcgacatggtggccgccatccccttcgacctgctcatcttcggctctggctctgaggagctgatcgggctgctgaagactgcgcggctgctgcggctggtgcgcgtggcgcggaagctggatcgctactcagagtacggcgcggccgtgctgttcttgctcatgtgcacctttgcgctcatcgcgcactggctagcctgcatctggtacgccatcggcaacatggagcagccacacatggactcacgcatcggctggctgcacaacctgggcgaccagataggcaaaccctacaacagcagcggcctgggcggcccctccatcaaggacaagtatgtgacggcgctctacttcaccttcagcagcctcaccagtgtgggcttcggcaacgtctctcccaacaccaactcagagaagatcttctccatctgcgtcatgctcattggctccctcatgtatgctagcatcttcggcaacgtgtcggccatcatccagcggctgtactcgggcacagcccgctaccacacacagatgctgcgggtgcgggagttcatccgcttccaccagatccccaatcccctgcgccagcgcctcgaggagtacttccagcacgcctggtcctacaccaacggcatcgacatgaacgcggtgctgaagggcttccctgagtgcctgcaggctgacatctgcctgcacctgaaccgctcactgctgcagcactgcaaacccttccgaggggccaccaagggctgccttcgggccctggccatgaagttcaagaccacacatgcaccgccaggggacacactggtgcatgctggggacctgctcaccgccctgtacttcatctcccggggctccatcgagatcctgcggggcgacgtcgtcgtggccatcctggggaagaatgacatctttggggagcctctgaacctgtatgcaaggcctggcaagtcgaacggggatgtgcgggccctcacctactgtgacctacacaagatccatcgggacgacctgctggaggtgctggacatgtaccctgagttctccgaccacttctggtccagcctggagatcaccttcaacctgcgagataccaacatgatcccgggctcccccggcagtacggagttagagggtggcttcagtcggcaacgcaagcgcaagttgtccttccgcaggcgcacggacaaggacacggagcagccaggggaggtgtcggccttggggccgggccgggcgggggcagggccgagtagccggggccggccgggggggccgtggggggagagcccgtccagtggcccctccagccctgagagcagtgaggatgagggcccaggccgcagctccagccccctccgcctggtgcccttctccagccccaggccccccggagagccgccgggtggggagcccctgatggaggactgcgagaagagcagcgacacttgcaaccccctgtcaggcgccttctcaggagtgtccaacattttcagcttctggggggacagtcggggccgccagtaccaggagctccctcgatgccccgcccccacccccagcctcctcaacatccccctctccagcccgggtcggcggccccggggcgacgtggagagcaggctggatgccctccagcgccagctcaacaggctggagacccggctgagtgcagacatggccactgtcctgcagctgctacagaggcagatgacgctggtcccgcccgcctacagtgctgtgaccaccccggggcctggccccacttccacatccccgctgttgcccgtcagccccctccccaccctcaccttggactcgctttctcaggtttcccagttcatggcgtgtgaggagctgcccccgggggccccagagcttccccaagaaggccccacacgacgcctctccctaccgggccagctgggggccctcacctcccagcccctgcacagacacggctcggacccgggcagttagtggggctgcccagtgtggacacgtggctcacccagggatcaaggcgctgctgggccgctccccttggaggccctgctcaggaggccctgaccgtggaaggggagaggaactcgaaagcacagctcctcccccagcccttgggaccatcttctcctgcagtcccctgggccccagtgagaggggcaggggcagggccggcagtaggtggggcctgtggtccccccactgccctgagggcattagctggtctaactgcccggaggcacccggccctgggccttaggcacctcaaggacttttctgctatttactgctcttattgttaaggataataattaaggatcatatgaataattaatgaagatgctgatgactatgaataataaataattatcctgaggagactccaaaaaaaaaaaaaaaaaa

SEQ ID NO: 5260 - DNA, 3480 bp, Artificial Sequence
  derived and/or modified sequence
atgcccgtgcggcggggccacgtcgcccctcagaacacattcctagataccatcatccgcaaattcgaaggacaatcaagaaagtttatcatagccaatgcgcgcgtggagaattgtgctgtgatctactgtaacgacggattttgcgagctgtgtggctactcccgggcggaagttatgcaacgcccctgcacttgtgacttcctgcacggaccacggacacagcgcagagccgcagctcagatagctcaagccctcttaggagcagaggaaagaaaggtggaaatcgcattttatcgaaaggatggatcgtgtttcctgtgcctggtggatgttgtaccagtcaagaatgaagatggggcagtcatcatgtttattcttaatttcgaagtggtgatggagaaggatatggtaggatcccccgctcacgatacaaatcatagaggaccacccacttcttggttggcaccaggccgggccaaaactttcagacttaagttacctgcgcttctggcactcactgcaagggagtcgagcgtgagaagtggaggggcaggtggggccggtgcccctggcgctgttgtcgtggacgtggacttaactcccgccgccccatcatccgagtcattggccttagatgaggttacggccatggataatcacgtagcaggactggggcctgccgaagagaggcgggctctggtgggcccgggttcacctcccagatctgcacctggacagctcccctccccgcgggcccatagtctcaacccagatgcctctgggagctcttgctcacttgcaagaactcggagtagagaaagctgtgcttccgtcaggcgggcatccagcgcggatgacatagaggcaatgagagccggggttcttcctccccctccacgccacgccagtaccggagccatgcaccctttacgcagcgggctgctgaattcaacatcagactccgacttagtcagatacaggactatctctaagattccccagataactctgaattttgtggacctgaagggagaccccttcctagccagtcctaccagcgatcgggaaattatagcccctaagataaaggaaagaacccataacgtcacagaaaaagttacccaggtactgtccctgggcgccgacgtacttcccgaatacaagctgcaggccccgagaattcaccgctggacaatcctgcactacagtccattcaaagcggtatgggattggctgatcctgctgctagtgatctacaccgccgtttttaccccatatagcgctgccttcctgctgaaggagacggaagaaggtccacccgcaacagagtgcggatacgcttgccaacccttggctgtggtagatctcattgtcgacatcatgttcatagttgacattctgattaattttcgcactacttatgttaatgccaatgaagaggtcgtcagccaccctggacgcatagctgtgcactactttaagggctggttcctgatcgatatggtggctgcaatcccatttgacttgctgatctttggctcggggagcgaagaactgatcgggctgctaaagaccgccagactgcttaggctggtccgcgtggccaggaagctggacagatattcggagtacggagccgccgtcctcttcctacttatgtgcacctttgcattaatcgcacattggctcgcctgcatctggtacgccatcggcaatatggaacagccacatatggactctaggattgggtggctccacaatctcggcgatcagatcgggaagccatataatagcagtgggctcggggggccatctatcaaggacaagtacgtgactgcactctattttactttcagttctttgacatcagtcggctttggaaatgtcagtccgaatacaaactccgagaaaatcttctctatttgtgttatgcttatcgggagtttgatgtacgctagtatctttggtaatgtgtcagcgataattcaacggctgtactcaggcaccgcaagataccacacccagatgctcagagtgcgggaatttattaggttccaccagattcctaatcccctacggcagcgactggaggaatacttccagcatgcatggtcctataccaacggaattgatatgaatgccgttttgaaggggttccctgaatgtcttcaggcagatatctgccttcacttgaacaggagcctacttcagcactgcaagccatttaggggcgctactaagggatgcctcagggccttggctatgaagtttaagaccacccatgctccccccggagatacccttgtccatgctggagacctgcttacagctctttactttatcagtcgggggagcatcgaaattctgcgcggcgacgtagttgtggcgatcctgggtaaaaacgatatatttggggagcccctgaacttgtatgcaaggcccggcaagtctaatggcgatgttagagcccttacctactgtgacctgcataagatccatcgtgacgatctattggaagtcttggacatgtaccccgagtttagcgatcacttctggagcagtctggagattacttttaacttacgtgataccaatatgatccctgggtcacctgggtcaactgagcttgaaggtggctttagcaggcagcggaagcggaaactgtccttccgacggcgaacggataaggatacagagcaaccgggggaggtgagcgccctggggccaggaagagcgggagccggcccaagctcccgagggaggcccggagggccgtggggagaatcaccttcaagcggcccatcctcgcccgagagctccgaggatgaaggcccggggcggtcttcctctccactgcggctagtgccattttcttcaccacgcccccccggcgagccacctggcggtgagcctcttatggaagattgtgaaaaatcaagcgacacttgcaatcccctaagcggggccttcagtggagtgagtaatatctttagtttctggggcgattccagaggtaggcagtaccaggaacttcccaggtgtcccgcccctaccccgtctttgctcaacatccccctttcaagtcccgggagacgaccaaggggggacgtagaatcgcgactggacgctctccagcggcagctcaatcgactggaaacgagactgtctgccgacatggctacagtactgcagcttctgcagcggcagatgaccctcgtgccccctgcatattccgccgtcactacccccggaccagggccaacctcgacatccccccttctgccggtgtcccccttgcccaccttgacacttgatagcctctcccaggtaagtcagttcatggcctgtgaggaattaccacctggcgccccagagctccctcaggaaggacctacgcgcagacttagcttacccgggcagctcggcgcgctgacgtcacagcctttgcatcggcatgggagtgaccctgggagctag

SEQ ID NO: 5261 - DNA, 3480 bp, Artificial Sequence
  derived and/or modified sequence
atgcctgtgcggcggggccacgtggccccccagaacaccttcctggacaccatcatcaggaagtttgagggccagagcaggaagttcatcatcgccaatgcccgggtggagaactgtgccgtcatctactgcaatgatggcttctgtgagctgtgtggctacagcagagctgaggtgatgcagaggccctgcacctgtgacttcctgcacggccccaggacccagaggagagctgctgcccagatcgcccaggccctgctgggcgctgaggagaggaaggtggagatcgccttctacaggaaggatggcagctgcttcctgtgcctggtggatgtggtgcctgtgaagaatgaagatggagctgtgatcatgttcatcctgaactttgaggtggtgatggagaaggacatggtgggcagccctgcccatgacaccaaccaccggggcccccccacctcctggctggcccctggccgggccaagaccttccggctgaagctgcctgccctgctggccctgacagcccgggagagctctgtgcgcagcggcggggccggcggggccggggcccctggagctgtggtggtggatgtggacctgaccccagctgcccccagcagcgagagcctggccctggatgaggtgacagccatggacaaccacgtggccggcctgggccctgctgaggagcggcgggccctggtgggccctggcagcccccccaggtctgcccctggccagctgcccagcccccgggcccacagcctgaacccagatgccagcggcagcagctgcagcctggcccggaccaggagccgggagagctgtgcctctgtgcggcgggccagcagcgcagatgacatcgaggccatgagagctggggtgctgcccccaccacccaggcatgccagcactggagccatgcaccccctgcggagcggcctgctgaacagcaccagtgacagcgacctggtgcgctaccgcaccatcagcaagatcccccagatcaccctgaactttgtggacctgaagggggaccccttcctggccagccccaccagtgaccgggagatcatcgcccccaagatcaaggagaggacccacaacgtgacagagaaggtgacccaggtgctgagcctgggcgcagatgtgctgcctgagtacaagctgcaggccccccgcatccaccgctggaccatcctgcactacagccccttcaaggctgtgtgggactggctgatcctgctgctggtgatctacacagctgtgttcaccccctacagcgctgccttcctgctgaaggagacagaggagggccccccagccacagaatgtggctacgcctgccagcccctggccgtggtggacctgattgtggacatcatgttcatcgtggacatcctgatcaacttccgcaccacctacgtgaatgccaatgaggaggtggtgagccaccctggaagaattgctgtgcactacttcaagggctggttcctgattgacatggtggccgccatcccctttgacctgctgatctttggaagtggcagcgaggagctgattggcctgctgaagacagcccggctgctgcggctggtgcgggtggccaggaagctggaccgctacagtgaatatggagctgctgtgctcttcctgctgatgtgcacctttgccctgattgcccactggctggcctgcatctggtacgccatcggcaacatggagcagccccacatggacagcagaattggctggctgcacaacctgggggaccagatcggcaagccctacaacagcagcggcctgggcggccccagcatcaaggacaagtatgtgacagccctgtacttcaccttcagcagcctgacctctgtgggctttggaaatgtgagccccaacaccaacagcgagaagatcttcagcatctgtgtgatgctgattggcagcctgatgtatgccagcatctttggaaatgtgtctgccatcatccagaggctgtacagcggcacagcccgctaccacacccagatgctgcgggtgcgggagttcatccgcttccaccagatccccaaccccctgcggcagaggctggaggagtacttccagcacgcctggagctacaccaatggaattgacatgaatgctgtgctgaagggcttccctgagtgcctgcaggccgacatctgcctgcacctgaacagaagcctgctgcagcactgcaagcccttccggggggccaccaagggctgcctgcgggccctggccatgaagttcaagaccacccacgcccctcctggggacaccctggtgcacgccggggacctgctgacagccctgtacttcatcagccggggcagcattgagatcctgcggggagatgtggtggtggccatcctgggcaagaatgacatctttggagagcccctgaacctgtatgcccggcctgggaagagcaatggagatgtgcgggccctgacctactgtgacctgcacaagatccacagagatgacctgctggaggtgctggacatgtacccagagttcagtgaccacttctggagcagcctggagatcaccttcaacctgcgggacaccaacatgatccctggcagccctggcagcacagagctggagggcggcttcagccggcagaggaagaggaagctgtccttcagaagaagaacagacaaggacacagagcagcccggggaggtgtctgccctgggccctggccgggccggggccggccccagcagccggggccggcctgggggcccctggggcgagagccccagcagcggccccagcagccctgagagcagtgaagatgagggccctggccgcagcagcagccccctgcggctggtgcccttcagcagccccaggcctcctggagagcccccaggaggagagcccctgatggaggactgtgagaagagcagtgacacctgcaaccccctgagcggggccttcagcggcgtgagcaacatcttctccttctggggagacagccggggccggcagtaccaggagctgccccgctgcccagcccccacccccagcctgctgaacatccccctgagcagccctggccggcggcccagaggagatgtggagagccggctggatgccctgcagaggcagctgaaccggctggagacccggctgtctgctgacatggccaccgtgctgcagctgctgcagaggcagatgaccctggtgcccccagcctacagcgctgtgaccaccccaggccctggccccaccagcaccagccccctgctgcctgtgagccccctgcccaccctgaccctggacagcctgagccaggtgtcccagttcatggcctgtgaggagctgcccccaggggcccctgagctgccccaggagggccccacccggcggctgagcctgcccggccagctgggcgccctgaccagccagcccctgcacagacatggcagtgaccccggcagctag

SEQ ID NO: 5262 - DNA, 3480 bp, Artificial Sequence
  derived and/or modified sequence
atgcccgtgcggcggggccacgtggccccccagaacaccttcctggacacgattattcgaaaattcgaaggccagtccaggaagtttattattgccaacgccagagttgagaattgtgctgtcatctactgtaatgatggtttctgcgaactttgcgggtatagtagagccgaggtgatgcagcgaccatgcacgtgcgacttcctccacggaccccgcactcagcgccgagctgccgcacaaatcgctcaggcactcctgggggccgaggagagaaaggtggaaattgccttttataggaaagacggatcatgctttctctgtcttgtcgacgtggtgccagtgaaaaacgaggacggggctgtgatcatgtttattcttaactttgaagtggtcatggagaaggatatggtgggttcccctgcccacgacaccaaccatagaggtcctccgaccagttggctggcccctggccgcgcaaagactttcaggctgaagctgcccgcactgttagcactaaccgcacgagagtcatctgtgcggtccggaggagccggcggtgcaggagccccaggggcagtggtggtagacgtcgacctgacccctgcagcaccttcaagcgagtctctggctttggatgaggtcactgcaatggataatcacgtcgctggtttgggacctgcagaagaacggagggctctcgtgggccctggctctcccccccggtccgcccccggccagctcccttctcccagggcacactcactgaatccagatgcctctggatcatcctgttcgctggcgcgaacacgaagccgcgagtcttgcgcgtcagtgagaagggcctcatccgctgacgatatcgaagctatgcgggccggtgtgctccctcctcctcccaggcacgcatccacaggggctatgcatcctttgagatccggcttactcaattcaacatctgacagcgatttggttagataccggaccatttcaaagattccccaaatcaccctgaactttgtggatctgaaaggcgacccatttctggcatccccgacatctgatagggaaattatagcccccaaaatcaaggagcggacacacaatgtaacagagaaggttacgcaggtcctgagcctcggggccgatgtgctgcccgaatacaaactacaggcccctaggatccatcgatggactatcttgcattacagcccttttaaagccgtctgggactggctcatcctcctgcttgttatctacactgctgttttcacgccctattcagccgccttcttgctgaaagaaacagaggagggaccaccagcgaccgagtgtggttacgcatgtcagcctctcgccgtagttgaccttattgtagacatcatgtttattgttgatatactgataaacttccgtaccacctacgtgaacgccaacgaagaggtcgtgtcacaccccgggcgtatagcagttcactactttaagggttggtttttgattgacatggtggcggccattcccttcgatctattgatcttcggttcaggttctgaagagctcattgggctgcttaagacagcgcgactcctaaggctggttcgggttgctcgcaagctagaccgctactctgagtatggggcagccgtgctttttctgcttatgtgtacatttgcccttattgcccactggctggcatgtatctggtatgctattggtaatatggaacagccgcacatggattctagaataggctggctgcacaaccttggcgaccagattgggaaaccttataactcttctggcctcgggggaccgtctatcaaggacaaatacgtgaccgcactatacttcacattctcatcactgacctcagtgggcttcgggaatgtgtcccccaataccaacagcgagaaaatattctcgatctgtgtcatgttgataggctctcttatgtacgctagcatcttcggaaatgtgagtgcaataatccagaggctctatagtggcacagctagatatcacacacagatgctgagggtgcgagagttcatccgattccaccaaataccaaatcctttgcggcagagattggaggagtatttccaacatgcctggtcctacactaacggcattgacatgaatgcagtgctgaaaggattccccgaatgtttgcaggccgatatctgcctccatttgaatagatcattactccagcactgcaaaccttttcgtggggccacaaaaggatgcctgcgcgccctagctatgaagtttaagacgacacatgccccacctggggacaccctggtccacgctggggacctgctgacagcgctgtattttattagccggggcagcatagagattctcagaggggatgtagtggtggccatcctaggcaagaatgatatctttggggaaccgctgaacttgtatgctaggcctggcaagtccaacggagatgtaagggcattgacatactgtgatttgcacaaaatccatcgggatgatttactggaggttctggacatgtaccctgagttttccgaccatttctggagttcactagagattacatttaacttacgagatacgaacatgatccccggatcccccgggagtactgagctggaggggggattttctcgccagcgcaagaggaagctgtctttccgccgacgcaccgacaaggacacggagcagccaggagaggtgagcgccctaggccccgggcgcgctggagcagggccttctagccgaggtcggcccggaggcccttggggagagtcccctagctccggaccttcaagtcctgagtcaagcgaggatgaaggacccgggcgttccagctccccactgagactggtcccttttagctcaccacgcccccctggtgaaccaccaggcggggagcctctgatggaggattgcgaaaagtcctctgacacctgcaacccactttccggagccttttctggggtctctaacatcttcagtttctggggagactccaggggcaggcagtaccaggaactgccccgatgtcctgcccccaccccaagtctgctaaacatcccgctctccagcccagggagacggcccagaggggacgtagagtctagactggatgcccttcagagacaattgaaccgtctggagacccgcttgagcgctgatatggccacggtgctgcagctactgcagcgccagatgactctcgtgccaccagcatattctgccgtcaccactccggggcctggaccaacgagtacttccccactgcttccagtttctcctctgcctacgttgacattagactctctgtcccaggtgagccagttcatggcgtgcgaagagctaccccccggagcgccagaacttccacaggaagggcccacccgaagactgtcactccccggtcagctgggcgcactcacatcccagcccctgcaccgacacggcagtgatcctggtagctag

SEQ ID NO: 5263 - DNA, 4286 bp, Artificial Sequence
  derived and/or modified sequence
tccgcggccgggccgagccgcaggcgctgcccgagccgcgggcgctggagcggctgtcggcgcggtggcaggcgggagccaggagtccggggctcgggcgggcggagcgcagcgcggggacgcggcggagcgggccccgcggctcggcgggggccggcagacaggtgtgccggcggcgggcggctcgcgctcaggcggctccaggccgggcccggggtccggagcggggagccgggagccgagcgaggacccggcgcccgcagtccagtcttggccgcgcccgtgctcggcttggccgcggggtgcggggaccacggcccggccgggccacccgaagcctagtgctgggccgggccgggccggggtgggtgggggcccgcccggcccgcccatgggctcaggatgccggtgcggaggggccacgtcgcgccgcagaacaccttcctggacaccatcatccgcaagtttgagggccagagccgtaagttcatcatcgccaacgctcgggtggagaactgcgccgtcatctactgcaacgacggcttctgcgagctgtgcggctactcgcgggccgaggtgatgcagcgaccctgcacctgcgacttcctgcacgggccgcgcacgcagcgccgcgctgccgcgcagatcgcgcaggcactgctgggcgccgaggagcgcaaagtggaaatcgccttctaccggaaagatgggagctgcttcctatgtctggtggatgtggtgcccgtgaagaacgaggatggggctgtcatcatgttcatcctcaatttcgaggtggtgatggagaaggacatggtggggtccccggctcatgacaccaaccaccggggcccccccaccagctggctggccccaggccgcgccaagaccttccgcctgaagctgcccgcgctgctggcgctgacggcccgggagtcgtcggtgcggtcgggcggcgcgggcggcgcgggcgccccgggggccgtggtggtggacgtggacctgacgcccgcggcacccagcagcgagtcgctggccctggacgaagtgacagccatggacaaccacgtggcagggctcgggcccgcggaggagcggcgtgcgctggtgggtcccggctctccgccccgcagcgcgcccggccagctcccatcgccccgggcgcacagcctcaaccccgacgcctcgggctccagctgcagcctggcccggacgcgctcccgagaaagctgcgccagcgtgcgccgcgcctcgtcggccgacgacatcgaggccatgcgcgccggggtgctgcccccgccaccgcgccacgccagcaccggggccatgcacccactgcgcagcggcttgctcaactccacctcggactccgacctcgtgcgctaccgcaccattagcaagattccccaaatcaccctcaactttgtggacctcaagggcgaccccttcttggcttcgcccaccagtgaccgtgagatcatagcacctaagataaaggagcgaacccacaatgtcactgagaaggtcacccaggtcctgtccctgggcgccgacgtgctgcctgagtacaagctgcaggcaccgcgcatccaccgctggaccatcctgcattacagccccttcaaggccgtgtgggactggctcatcctgctgctggtcatctacacggctgtcttcacaccctactcggctgccttcctgctgaaggagacggaagaaggcccgcctgctaccgagtgtggctacgcctgccagccgctggctgtggtggacctcatcgtggacatcatgttcattgtggacatcctcatcaacttccgcaccacctacgtcaatgccaacgaggaggtggtcagccaccccggccgcatcgccgtccactacttcaagggctggttcctcatcgacatggtggccgccatccccttcgacctgctcatcttcggctctggctctgaggagctgatcgggctgctgaagactgcgcggctgctgcggctggtgcgcgtggcgcggaagctggatcgctactcagagtacggcgcggccgtgctgttcttgctcatgtgcacctttgcgctcatcgcgcactggctagcctgcatctggtacgccatcggcaacatggagcagccacacatggactcacgcatcggctggctgcacaacctgggcgaccagataggcaaaccctacaacagcagcggcctgggcggcccctccatcaaggacaagtatgtgacggcgctctacttcaccttcagcagcctcaccagtgtgggcttcggcaacgtctctcccaacaccaactcagagaagatcttctccatctgcgtcatgctcattggctccctcatgtatgctagcatcttcggcaacgtgtcggccatcatccagcggctgtactcgggcacagcccgctaccacacacagatgctgcgggtgcgggagttcatccgcttccaccagatccccaatcccctgcgccagcgcctcgaggagtacttccagcacgcctggtcctacaccaacggcatcgacatgaacgcggtgctgaagggcttccctgagtgcctgcaggctgacatctgcctgcacctgaaccgctcactgctgcagcactgcaaacccttccgaggggccaccaagggctgccttcgggccctggccatgaagttcaagaccacacatgcaccgccaggggacacactggtgcatgctggggacctgctcaccgccctgtacttcatctcccggggctccatcgagatcctgcggggcgacgtcgtcgtggccatcctggggaagaatgacatctttggggagcctctgaacctgtatgcaaggcctggcaagtcgaacggggatgtgcgggccctcacctactgtgacctacacaagatccatcgggacgacctgctggaggtgctggacatgtaccctgagttctccgaccacttctggtccagcctggagatcaccttcaacctgcgagataccaacatgatcccgggctcccccggcagtacggagttagagggtggcttcagtcggcaacgcaagcgcaagttgtccttccgcaggcgcacggacaaggacacggagcagccaggggaggtgtcggccttggggccgggccgggcgggggcagggccgagtagccggggccggccgggggggccgtggggggagagcccgtccagtggcccctccagccctgagagcagtgaggatgagggcccaggccgcagctccagccccctccgcctggtgcccttctccagccccaggccccccggagagccgccgggtggggagcccctgatggaggactgcgagaagagcagcgacacttgcaaccccctgtcaggcgccttctcaggagtgtccaacattttcagcttctggggggacagtcggggccgccagtaccaggagctccctcgatgccccgcccccacccccagcctcctcaacatccccctctccagcccgggtcggcggccccggggcgacgtggagagcaggctggatgccctccagcgccagctcaacaggctggagacccggctgagtgcagacatggccactgtcctgcagctgctacagaggcagatgacgctggtcccgcccgcctacagtgctgtgaccaccccggggcctggccccacttccacatccccgctgttgcccgtcagccccctccccaccctcaccttggactcgctttctcaggtttcccagttcatggcgtgtgaggagctgcccccgggggccccagagcttccccaagaaggccccacacgacgcctctccctaccgggccagctgggggccctcacctcccagcccctgcacagacacggctcggacccgggcagttagtggggctgcccagtgtggacacgtggctcacccagggatcaaggcgctgctgggccgctccccttggaggccctgctcaggaggccctgaccgtggaaggggagaggaactcgaaagcacagctcctcccccagcccttgggaccatcttctcctgcagtcccctgggccccagtgagaggggcaggggcagggccggcagtaggtggggcctgtggtccccccactgccctgagggcattagctggtctaactgcccggaggcacccggccctgggccttaggcacctcaaggacttttctgctatttactgctcttattgttaaggataataattaaggatcatatgaataattaatgaagatgctgatgactatgaataataaataattatcctgaggaga

SEQ ID NO: 5264 - DNA, 3480 bp, Artificial Sequence
  derived and/or modified sequence
atgcccgtgcggagagggcacgttgcccctcagaatactttccttgacactattattcgtaagtttgaaggccagagtagaaaattcatcattgctaatgcgagagtagaaaattgcgctgtcatttactgcaacgatgggttctgcgagctgtgtgggtactcaagagctgaggtaatgcaaagaccatgcacctgtgacttcctccacgggcctagaactcagcgcagggccgctgcccaaatcgctcaggcactgttgggagcagaagagcgtaaagtagaaatcgcgttctacaggaaggatggctcttgcttcctctgcttggtggatgtggtgcctgtaaagaacgaagatggggcagttatcatgtttattctgaatttcgaagtcgtaatggaaaaagacatggtcgggtcccccgcacacgatacgaaccaccggggacctccaacgtcctggctggcccctggccgagccaaaacctttcggctgaaactgcctgctctgctcgctttgacagcaagggagagtagtgtgcggtccgggggtgccggaggggctggagctcccggtgcggtggtggtggatgtggatctgacaccagctgcaccctcttcagaaagcctggcccttgacgaggtcactgctatggataatcacgtggcaggtcttggacccgctgaagaacgccgtgctttagtggggccaggctctcccccacgatccgctcctggccagctcccatctcctcgcgctcacagcttgaacccggatgcctcaggaagctcgtgcagtttggcccgtacacgttcccgcgagagttgcgcctcagtgcgacgtgcttcctcagcagacgatatcgaggccatgcgcgctggggtcctgcctccacctcccaggcacgcctctaccggtgccatgcatcccctccggagcggcctgcttaactccaccagcgacagcgacttggtgagataccggaccatcagcaagattccacagattactctgaatttcgtggatctgaaaggtgatcccttcctggcttcaccaaccagtgatcgtgaaatcatagctcccaagattaaggaacgcacccacaacgtcacggagaaggtgacccaggtgttgtccctgggagccgatgtgctccccgagtataagctccaggcccctagaattcataggtggacaatccttcattattccccatttaaagcagtgtgggactggctgatcctgctcctggtcatttatactgccgttttcactccttacagcgcagcctttctgctgaaggagacggaggagggacccccagctactgaatgtgggtacgcatgccagccactggcagtggtcgatctaatcgtggacatcatgtttatcgtcgatatcctgataaacttccgcactacatatgtaaatgcaaatgaagaggtagtgtcccacccaggaaggatcgcagttcattactttaaaggatggtttctaattgatatggtagccgctatacctttcgacttgctgatcttcggtagtggtagcgaagaattgatcggcctcctcaaaaccgctcgactgctgaggttggtgcgcgtggcccgtaagctggaccgttacagcgaatacggcgctgctgtactcttcctgcttatgtgtacattcgcattgatcgcccattggctggcctgtatatggtacgctatcggcaatatggagcagcctcacatggattcccgcattggatggttacacaatcttggcgatcagataggaaaaccatacaattccagtgggctgggcggacccagtatcaaggacaagtacgtcaccgcgctgtactttactttttcaagtctcacctcagtggggttcggcaatgtgtccccgaataccaacagcgagaaaatttttagcatatgtgtcatgctcattggcagtcttatgtatgcttctattttcgggaacgtgagtgctataatccagaggctgtactccggcacagccaggtatcacacgcaaatgctccgagtgagggagttcattagatttcatcaaattccgaacccacttcgtcaacgacttgaggagtactttcagcacgcttggtcatacactaacggaatagatatgaacgccgtgcttaagggctttcccgagtgcctgcaggccgacatctgtttgcacctgaatcgtagcctgcttcagcactgtaagccatttcgaggcgctaccaaggggtgcttaagggctctcgccatgaaattcaaaaccactcatgcgccacccggtgacaccttggtgcacgccggtgatctgttaacggcactttactttattagccgcggatcgattgagatcctgaggggggatgttgtggttgccattctcggaaaaaacgacatttttggcgaacccttaaacttgtatgcacggccagggaagtctaacggcgatgtcagagccttgacatattgtgatctccataagatccacagagatgaccttctggaagtgttggacatgtatccagagttcagtgaccatttttggagctccttggagattacatttaacctgcgtgacaccaacatgatccctggcagccccggatctacggagctggaggggggtttcagccgccagcgaaagcgcaagctaagctttcggagaaggaccgataaagataccgaacagcccggagaagtgtctgctttgggtcctggaagggcaggtgctggccctagcagtagagggagaccaggaggaccgtggggtgaatcacccagctcagggccttcctcaccggaaagctctgaggacgagggaccaggaaggagtagttcccccttgcggcttgtgccattctccagtccacggcctccaggagaaccccctggaggagagcctctcatggaggattgcgagaaatcttcagacacctgtaacccactctcaggagcattttcaggtgtgtccaatatcttctcattttggggcgactcgaggggacgccaataccaggaactgccaagatgccctgccccaacaccatcactgctcaatattcccctctcttcacccggtcgtcggccaaggggcgacgttgagagccgcctcgatgcactccagagacaactgaatcgcctggaaacaagactgtctgccgacatggcgaccgtgctccagctccttcagagacagatgacactggtgccgccagcctacagcgctgtgaccacgcccggacctggccctacaagcacatcccctctactgcctgtaagtccactgccaacgttgacactagattctcttagtcaggtgtctcagttcatggcttgtgaggagcttccacctggcgctcctgaactgcctcaagagggccctactcggagactgtctctaccaggacaactgggtgcccttactagccagcctctacatcgccatggctctgatcctgggtcatag

SEQ ID NO: 5265 - DNA, 3480 bp, Artificial Sequence
  derived and/or modified sequence
atgcccgtgagaagaggccacgtggccccccagaacaccttcctggacaccatcatcagaaagttcgagggccagagcagaaagttcatcatcgccaacgccagagtggagaactgcgccgtgatctactgcaacgacggcttctgcgagctgtgcggctacagcagagccgaggtgatgcagagaccctgcacctgcgacttcctgcacggccccagaacccagagaagagccgccgcccagatcgcccaggccctgctgggcgccgaggagagaaaggtggagatcgccttctacagaaaggacggcagctgcttcctgtgcctggtggacgtggtgcccgtgaagaacgaggacggcgccgtgatcatgttcatcctgaacttcgaggtggtgatggagaaggacatggtgggcagccccgcccacgacaccaaccacagaggcccccccaccagctggctggcccccggcagagccaagaccttcagactgaagctgcccgccctgctggccctgaccgccagagagagcagcgtgagaagcggcggcgccggcggcgccggcgcccccggcgccgtggtggtggacgtggacctgacccccgccgcccccagcagcgagagcctggccctggacgaggtgaccgccatggacaaccacgtggccggcctgggccccgccgaggagagaagagccctggtgggccccggcagcccccccagaagcgcccccggccagctgcccagccccagagcccacagcctgaaccccgacgccagcggcagcagctgcagcctggccagaaccagaagcagagagagctgcgccagcgtgagaagagccagcagcgccgacgacatcgaggccatgagagccggcgtgctgccccccccccccagacacgccagcaccggcgccatgcaccccctgagaagcggcctgctgaacagcaccagcgacagcgacctggtgagatacagaaccatcagcaagatcccccagatcaccctgaacttcgtggacctgaagggcgaccccttcctggccagccccaccagcgacagagagatcatcgcccccaagatcaaggagagaacccacaacgtgaccgagaaggtgacccaggtgctgagcctgggcgccgacgtgctgcccgagtacaagctgcaggcccccagaatccacagatggaccatcctgcactacagccccttcaaggccgtgtgggactggctgatcctgctgctggtgatctacaccgccgtgttcaccccctacagcgccgccttcctgctgaaggagaccgaggagggcccccccgccaccgagtgcggctacgcctgccagcccctggccgtggtggacctgatcgtggacatcatgttcatcgtggacatcctgatcaacttcagaaccacctacgtgaacgccaacgaggaggtggtgagccaccccggcagaatcgccgtgcactacttcaagggctggttcctgatcgacatggtggccgccatccccttcgacctgctgatcttcggcagcggcagcgaggagctgatcggcctgctgaagaccgccagactgctgagactggtgagagtggccagaaagctggacagatacagcgagtacggcgccgccgtgctgttcctgctgatgtgcaccttcgccctgatcgcccactggctggcctgcatctggtacgccatcggcaacatggagcagccccacatggacagcagaatcggctggctgcacaacctgggcgaccagatcggcaagccctacaacagcagcggcctgggcggccccagcatcaaggacaagtacgtgaccgccctgtacttcaccttcagcagcctgaccagcgtgggcttcggcaacgtgagccccaacaccaacagcgagaagatcttcagcatctgcgtgatgctgatcggcagcctgatgtacgccagcatcttcggcaacgtgagcgccatcatccagagactgtacagcggcaccgccagataccacacccagatgctgagagtgagagagttcatcagattccaccagatccccaaccccctgagacagagactggaggagtacttccagcacgcctggagctacaccaacggcatcgacatgaacgccgtgctgaagggcttccccgagtgcctgcaggccgacatctgcctgcacctgaacagaagcctgctgcagcactgcaagcccttcagaggcgccaccaagggctgcctgagagccctggccatgaagttcaagaccacccacgccccccccggcgacaccctggtgcacgccggcgacctgctgaccgccctgtacttcatcagcagaggcagcatcgagatcctgagaggcgacgtggtggtggccatcctgggcaagaacgacatcttcggcgagcccctgaacctgtacgccagacccggcaagagcaacggcgacgtgagagccctgacctactgcgacctgcacaagatccacagagacgacctgctggaggtgctggacatgtaccccgagttcagcgaccacttctggagcagcctggagatcaccttcaacctgagagacaccaacatgatccccggcagccccggcagcaccgagctggagggcggcttcagcagacagagaaagagaaagctgagcttcagaagaagaaccgacaaggacaccgagcagcccggcgaggtgagcgccctgggccccggcagagccggcgccggccccagcagcagaggcagacccggcggcccctggggcgagagccccagcagcggccccagcagccccgagagcagcgaggacgagggccccggcagaagcagcagccccctgagactggtgcccttcagcagccccagaccccccggcgagccccccggcggcgagcccctgatggaggactgcgagaagagcagcgacacctgcaaccccctgagcggcgccttcagcggcgtgagcaacatcttcagcttctggggcgacagcagaggcagacagtaccaggagctgcccagatgccccgcccccacccccagcctgctgaacatccccctgagcagccccggcagaagacccagaggcgacgtggagagcagactggacgccctgcagagacagctgaacagactggagaccagactgagcgccgacatggccaccgtgctgcagctgctgcagagacagatgaccctggtgccccccgcctacagcgccgtgaccacccccggccccggccccaccagcaccagccccctgctgcccgtgagccccctgcccaccctgaccctggacagcctgagccaggtgagccagttcatggcctgcgaggagctgccccccggcgcccccgagctgccccaggagggccccaccagaagactgagcctgcccggccagctgggcgccctgaccagccagcccctgcacagacacggcagcgaccccggcagctag

SEQ ID NO: 5266 - protein, 45 aa, Artificial Sequence
  derived and/or modified sequence
MKALLILGLLLFSVAVQGKVFERCELARSLKRFGMDNFRGISLAN

SEQ ID NO: 5267 - protein, 45 aa, Artificial Sequence
  derived and/or modified sequence
MKALLILGLLLFSVAVQGKVFERCELARSLKRFGMDNFRGITLAN

SEQ ID NO: 5268 - protein, 130 aa, Artificial Sequence
  derived and/or modified sequence
QKYERCELAKALKKGGLADFKGYSLENWICTAFHESGYNTASTNYNPPDKSTDYGIFQINSRWWCNDYKTPRSKNTCNIDCKVLLGDDISPAIKCAKRVVSDPNGMGAWVAWKKYCKGKNLSQWTQGCKL

SEQ ID NO: 5269 - protein, 148 aa, Artificial Sequence
  derived and/or modified sequence
MKALIVLGLVLLSVTVQGKVFERCELARTLKRLGMDGYRGISLANWMCLAKWESGYNTRATNYNAGDRSTDYGIFQINSRYWCNDGKTPGAVNACHLSCSALLQDNIADAVACAKRVVRDPQGIRAWVAWRNRCQNRDVRQYVQGCGV

SEQ ID NO: 5270 - DNA, 447 bp, Artificial Sequence
  derived and/or modified sequence
atgaaggctcttatcgtgcttgggctcgtgctcctcagtgtgacagtgcaaggaaaggtgtttgagcgatgtgagctggctcggaccctgaagagactgggcatggacggttacagggggatctccctagccaactggatgtgtctggctaagtgggagtcaggctacaacacacgtgcgacaaactataacgccggcgaccgatccacagactatgggatattccaaataaattcccgatattggtgcaatgacggaaaaacccccggcgctgtcaatgcctgtcatctgagctgtagcgcgctgcttcaagacaacattgccgatgccgtggcgtgtgcaaaacgcgtggtacgcgatccccaaggcatacgggcctgggtggcctggcgtaaccgttgccagaatagagatgtgaggcagtacgtccaggggtgtggagtgtag

SEQ ID NO: 5271 - DNA, 447 bp, Artificial Sequence
  derived and/or modified sequence
atgaaggccctgattgtgctgggcctggtgctgctgtctgtgacagtgcagggcaaggtgtttgagcgctgtgagctggcccggaccctgaagaggctgggcatggatggctaccggggcatcagcctggccaactggatgtgcctggccaagtgggagagcggctacaacacccgggccaccaactacaatgctggggacaggagcacagattatggcatcttccagatcaacagccgctactggtgcaatgatggcaagaccccaggagctgtgaatgcctgccacctgagctgcagcgccctgctgcaggacaacattgctgatgctgtggcctgtgccaagagggtggtgcgggacccccagggcatccgggcctgggtggcctggaggaaccgctgccagaacagagatgtgcggcagtatgtgcagggctgcggcgtgtag

SEQ ID NO: 5272 - DNA, 1530 bp, Artificial Sequence
  derived and/or modified sequence
gttaaaagatgttaaatactggggccagctcaccctggtcagcctagcactctgacctagcagtcaacatgaaggctctcattgttctggggcttgtcctcctttctgttacggtccagggcaaggtctttgaaaggtgtgagttggccagaactctgaaaagattgggaatggatggctacaggggaatcagcctagcaaactggatgtgtttggccaaatgggagagtggttacaacacacgagctacaaactacaatgctggagacagaagcactgattatgggatatttcagatcaatagccgctactggtgtaatgatggcaaaaccccaggagcagttaatgcctgtcatttatcctgcagtgctttgctgcaagataacatcgctgatgctgtagcttgtgcaaagagggttgtccgtgatccacaaggcattagagcatgggtggcatggagaaatcgttgtcaaaacagagatgtccgtcagtatgttcaaggttgtggagtgtaactccagaattttccttcttcagctcattttgtctctctcacattaagggagtaggaattaagtgaaaggtcacactaccattatttccccttcaaacaaataatatttttacagaagcaggagcaaaatatggcctttcttctaagagatataatgttcactaatgtggttattttacattaagcctacaacatttttcagtttgcaaatagaactaatactggtgaaaatttacctaaaaccttggttatcaaatacatctccagtacattccgttctttttttttttgagacagtctcgctctgtcgcccaggctggagtgcagtggcgcaatctcggctcactgcaacctccacctcccgggttcacgccattctcctgcctcagcctcccgagtagctgggattacgggcgcccgccaccacgcccggctaattttttgtatttttagtagagacagggtttcaccgtgttagccaggatggtctcgatctcctgaccttgtgatccacccacctcggcctcccaaagtgctgggattacaggcgtgagccactgcgcccggccacattcagttcttatcaaagaaataacccagacttaatcttgaatgatacgattatgcccaatattaagtaaaaaatataagaaaaggttatcttaaatagatcttaggcaaaataccagctgatgaaggcatctgatgccttcatctgttcagtcatctccaaaaacagtaaaaataaccactttttgttgggcaatatgaaatttttaaaggagtagaataccaaatgatagaaacagactgcctgaattgagaattttgatttcttaaagtgtgtttctttctaaattgctgttccttaatttgattaatttaattcatgtattatgattaaatctgaggcagatgagcttacaagtattgaaataattactaattaatcacaaatgtgaagttatgcatgatgtaaaaaatacaaacattctaattaaaggctttgcaacaca

SEQ ID NO: 5273 - DNA, 447 bp, Artificial Sequence
  derived and/or modified sequence
atgaaggccctgatcgtgctgggcctggtgctgctgagcgtgaccgttcagggaaaagtttttgaacggtgtgaattggcccgcacactcaagaggctgggaatggacggatacagaggcatttccctcgccaactggatgtgcctggcgaagtgggagtctgggtataatacacgggctacaaactataacgcgggtgaccgaagtacggactacgggatcttccaaataaactcccgctattggtgtaatgatggaaaaactcctggcgcagtgaacgcctgtcatctatcatgctctgcgctgctgcaagataatattgcagacgccgtcgcttgcgcaaagcgggtggtacgcgaccctcagggcatccgtgcctgggtggcctggcggaacaggtgtcagaatagggatgtgcggcagtatgtgcaggggtgcggcgtctag

SEQ ID NO: 5274 - DNA, 447 bp, Artificial Sequence
  derived and/or modified sequence
atgaaggccctcattgtcctagggttagtgctgttatccgtgaccgtacaagggaaggtcttcgagcgctgcgaacttgctcggacgctgaaacgtctgggaatggacggataccgcggtatctccttagccaattggatgtgcttagcgaagtgggaatccggatataatactagggcaactaattataacgccggagatagatctaccgattatggtattttccagatcaactccagatattggtgtaacgatggaaaaacacctggggctgtcaacgcctgccatctatcttgcagtgctctccttcaggacaacatagcagatgcagtggcctgcgctaaaagggttgttcgggacccgcaaggcatccgcgcttgggtcgcttggaggaacagatgtcagaaccgggatgtgcgacagtacgttcaggggtgcggtgtgtag

SEQ ID NO: 5275 - DNA, 447 bp, Artificial Sequence
  derived and/or modified sequence
atgaaggccctgatcgtgctgggcctggtgctgctgagcgtgaccgtgcagggcaaggtgttcgagagatgcgagctggccagaaccctgaagagactgggcatggacggctacagaggcatcagcctggccaactggatgtgcctggccaagtgggagagcggctacaacaccagagccaccaactacaacgccggcgacagaagcaccgactacggcatcttccagatcaacagcagatactggtgcaacgacggcaagacccccggcgccgtgaacgcctgccacctgagctgcagcgccctgctgcaggacaacatcgccgacgccgtggcctgcgccaagagagtggtgagagacccccagggcatcagagcctgggtggcctggagaaacagatgccagaacagagacgtgagacagtacgtgcagggctgcggcgtgtag

SEQ ID NO: 5276 - protein, 527 aa, Artificial Sequence
  derived and/or modified sequence
MENQEKASIAGHMFDVVVIGGGISGLSAAKLLTEYGVSVLVLEARDRVGGRTYTIRNEHVDYVDVGGAYVGPTQNRILRLSKELGIETYKVNVSERLVQYVKGKTYPFRGAFPPVWNPIAYLDYNNLWRTIDNMGKEIPTDAPWEAQHADKWDKMTMKELIDKICWTKTARRFAYLFVNINVTSEPHEVSALWFLWYVKQCGGTTRIFSVTNGGQERKFVGGSGQVSERIMDLLGDQVKLNHPVTHVDQSSDNIIIETLNHEHYECKYVINAIPPTLTAKIHFRPELPAERNQLIQRLPMGAVIKCMMYYKEAFWKKKDYCGCMIIEDEDAPISITLDDTKPDGSLPAIMGFILARKADRLAKLHKEIRKKKICELYAKVLGSQEALHPVHYEEKNWCEEQYSGGCYTAYFPPGIMTQYGRVIRQPVGRIFFAGTETATKWSGYMEGAVEAGERAAREVLNGLGKVTEKDIWVQEPESKDVPAVEITHTFWERNLPSVSGLLKIIGFSTSVTALGFVLYKYKLLPRS

SEQ ID NO: 5277 - protein, 394 aa, Artificial Sequence
  derived and/or modified sequence
MGKEIPTDAPWEAQHADKWDKMTMKELIDKICWTKTARRFAYLFVNINVTSEPHEVSALWFLWYVKQCGGTTRIFSVTNGGQERKFVGGSGQVSERIMDLLGDQVKLNHPVTHVDQSSDNIIIETLNHEHYECKYVINAIPPTLTAKIHFRPELPAERNQLIQRLPMGAVIKCMMYYKEAFWKKKDYCGCMIIEDEDAPISITLDDTKPDGSLPAIMGFILARKADRLAKLHKEIRKKKICELYAKVLGSQEALHPVHYEEKNWCEEQYSGGCYTAYFPPGIMTQYGRVIRQPVGRIFFAGTETATKWSGYMEGAVEAGERAAREVLNGLGKVTEKDIWVQEPESKDVPAVEITHTFWERNLPSVSGLLKIIGFSTSVTALGFVLYKYKLLPRS

SEQ ID NO: 5278 - DNA, 1584 bp, Artificial Sequence
  derived and/or modified sequence
atggaaaatcaagaaaaggctagtattgccggccatatgtttgatgtggtggtgataggcgggggcatcagcggcttgagcgccgccaagcttctgaccgagtatggagttagcgtgctggtgctcgaggctagggatcgggtgggaggccgcacttacaccatcaggaatgaacacgtggattacgtcgacgtaggcggcgcctacgtcggaccaacacagaacaggatactgagattatcaaaggagcttgggatagagacatataaggtgaacgtttccgagaggctggtccaatacgtgaagggaaagacatacccctttagaggtgctttccctccggtgtggaaccccattgcatatctggactacaataatctgtggagaacaatagataacatgggtaaagaaatcccgacagacgccccttgggaggcccagcatgccgataaatgggacaagatgactatgaaggagctgatcgataagatctgctggaccaagaccgcccgtcgcttcgcttatttgttcgtgaatattaatgtgacgagtgagccccatgaagtgtcggcactttggttcctgtggtatgtcaagcagtgtggcggcacaaccagaattttctccgtgaccaacggtgggcaagaacgaaagttcgtcggagggtcagggcaagtcagtgagcgaatcatggatttgttaggagaccaggtgaaactgaaccaccccgtgacacatgtggaccagagcagtgacaatatcatcatagagacactgaaccacgagcattacgagtgcaaatacgttataaatgctatcccacccactctgaccgcaaagatccacttcagacctgaattacccgcagaaagaaatcagttaattcagagacttcccatgggcgcagtgatcaaatgtatgatgtattacaaagaggctttctggaagaagaaggactactgtggatgtatgattattgaggatgaggacgctcccatcagtataacactagacgataccaagcccgatggttctctgccagcaattatgggtttcattctggcccgcaaagccgataggttggctaagttgcacaaagaaattcgtaagaagaaaatctgtgagctttacgccaaggtcctcgggtctcaggaagccctgcatcccgtacactatgaagaaaaaaactggtgtgaggaacaatacagcggcgggtgctacacagcctatttccccccaggcattatgacccagtatggccgcgtcatacggcagcctgtaggcaggatcttcttcgcaggcaccgagaccgcaactaaatggtcgggatatatggagggtgcagtcgaggccggtgaacgcgcggctagagaggtgctgaacggacttgggaaggtaacagaaaaagacatttgggtgcaagagcccgaatctaaagacgtgcccgctgtggagattacgcacacattttgggagaggaatctgccaagtgtcagtgggctgctgaaaatcattggctttagcacatcagtgactgccctaggctttgtgctgtataagtacaagcttttaccgcgatcatag

SEQ ID NO: 5279 - DNA, 1584 bp, Artificial Sequence
  derived and/or modified sequence
atggagaaccaggagaaggccagcattgctggccacatgtttgatgtggtggtgattggaggcggcatcagcggcctgtctgctgccaagctgctgacagaatatggagtgtctgtgctggtgctggaggcccgggacagagtgggcggccgcacctacaccatcagaaatgaacatgtggactatgtggatgtgggcggggcctacgtgggccccacccagaaccgcatcctgcggctgagcaaggagctgggcatcgagacctacaaggtgaatgtgtctgagcggctggtgcagtatgtgaagggcaagacctaccccttccggggggccttcccccctgtgtggaaccccatcgcctacctggactacaacaacctgtggaggaccatcgacaacatgggcaaggagatccccacagatgccccctgggaggcccagcacgccgacaagtgggacaagatgaccatgaaggagctgattgacaagatctgctggaccaagacagccaggagatttgcctacctgtttgtgaacatcaacgtgaccagcgagccccatgaggtgtctgccctgtggttcctgtggtacgtgaagcagtgtggcggcaccacccgcatcttctctgtgaccaacggcggccaggagaggaagtttgtgggcggcagcggccaggtgtctgagcgcatcatggacctgctgggggaccaggtgaagctgaaccaccctgtgacccacgtggaccagagcagtgacaacatcatcatcgagaccctgaaccacgagcactatgagtgcaagtatgtgatcaatgccatcccccccaccctgacagccaagatccacttccggcctgagctgcctgctgagaggaaccagctgatccagaggctgcccatgggcgccgtcatcaagtgcatgatgtactacaaggaggccttctggaagaagaaggactactgcggctgcatgatcattgaagatgaagatgcccccatcagcatcaccctggatgacaccaagccagatggcagcctgcctgccatcatgggcttcatcctggccaggaaggctgaccggctggccaagctgcacaaggagatcaggaagaagaagatctgtgagctgtatgccaaggtgctgggcagccaggaggccctgcaccctgtgcactatgaggagaagaactggtgtgaggagcagtacagcggcggctgctacacagcctacttccccccaggcatcatgacccagtatggccgggtcatccggcagcctgtgggccgcatcttctttgctggaacagaaacagccaccaagtggagcggctacatggagggcgctgtggaggccggggagagagctgcccgggaggtgctgaatggcctgggcaaggtgacagagaaggacatctgggtgcaggagcctgagagcaaggatgtgcctgctgtggagatcacccacaccttctgggagaggaacctgcccagcgtgtctggcctgctgaagatcatcggcttcagcacctctgtgacagccctgggctttgtgctgtacaagtacaagctgctgcccaggagctag

SEQ ID NO: 5280 - DNA, 4015 bp, Artificial Sequence
  derived and/or modified sequence
cgggtatcaaaagaaggatcggctccgcccccgggctccccgggggagttgatagaagggtccttcccaccctttgccgtccccactcctgtgcctacgacccaggagcgtgtcagccaaagcatggagaatcaagagaaggcgagtatcgcgggccacatgttcgacgtagtcgtgatcggaggtggcatttcaggactatctgctgccaaactcttgactgaatatggcgttagtgttttggttttagaagctcgggacagggttggaggaagaacatatactataaggaatgagcatgttgattacgtagatgttggtggagcttatgtgggaccaacccaaaacagaatcttacgcttgtctaaggagctgggcatagagacttacaaagtgaatgtcagtgagcgtctcgttcaatatgtcaaggggaaaacatatccatttcggggcgcctttccaccagtatggaatcccattgcatatttggattacaataatctgtggaggacaatagataacatggggaaggagattccaactgatgcaccctgggaggctcaacatgctgacaaatgggacaaaatgaccatgaaagagctcattgacaaaatctgctggacaaagactgctaggcggtttgcttatctttttgtgaatatcaatgtgacctctgagcctcacgaagtgtctgccctgtggttcttgtggtatgtgaagcagtgcgggggcaccactcggatattctctgtcaccaatggtggccaggaacggaagtttgtaggtggatctggtcaagtgagcgaacggataatggacctcctcggagaccaagtgaagctgaaccatcctgtcactcacgttgaccagtcaagtgacaacatcatcatagagacgctgaaccatgaacattatgagtgcaaatacgtaattaatgcgatccctccgaccttgactgccaagattcacttcagaccagagcttccagcagagagaaaccagttaattcagcggcttccaatgggagctgtcattaagtgcatgatgtattacaaggaggccttctggaagaagaaggattactgtggctgcatgatcattgaagatgaagatgctccaatttcaataaccttggatgacaccaagccagatgggtcactgcctgccatcatgggcttcattcttgcccggaaagctgatcgacttgctaagctacataaggaaataaggaagaagaaaatctgtgagctctatgccaaagtgctgggatcccaagaagctttacatccagtgcattatgaagagaagaactggtgtgaggagcagtactctgggggctgctacacggcctacttccctcctgggatcatgactcaatatggaagggtgattcgtcaacccgtgggcaggattttctttgcgggcacagagactgccacaaagtggagcggctacatggaaggggcagttgaggctggagaacgagcagctagggaggtcttaaatggtctcgggaaggtgaccgagaaagatatctgggtacaagaacctgaatcaaaggacgttccagcggtagaaatcacccacaccttctgggaaaggaacctgccctctgtttctggcctgctgaagatcattggattttccacatcagtaactgccctggggtttgtgctgtacaaatacaagctcctgccacggtcttgaagttctgttcttatgctctctgctcactggttttcaataccaccaagaggaaaatattgacaagtttaaaggctgtgtcattgggccatgtttaagtgtactggatttaactacctttggcttaattccaatcattgttaaagtaaaaacaattcaaagaatcacctaattaatttcagtaagatcaagctccatcttatttgtcagtgtagatcaactcatgttaattgatagaataaagccttgtgatcactttctgaaattcacaaagttaaacgtgatgtgctcatcagaaacaatttctgtgtcctgtttttattcccttcaatgcaaaatacatgatgatttcagaaacaaagcatttgactttctgtctgtggaggtggagtaggtgaaggcccagcctgtaactgtcctttttcttcccttaggcaatggtgaactgtcattacagagcctagaggctcacagcctcctggaggaagcagcctccactttggatcaggaaatagtaaaggaaagcagtgttgggggtagcggcatgcagaccctcagaccagaatggggacatcttgtggtctgctgcctcaggaatctcctgaccacttgtagtccctccgacttctctagacatctagtctcagtgctagcttatttgtatttttcctctttcacttcttatggaggagagtgtttaactgagttagaatgttgaaactgacttgctgtgacttatgtgcagctttccagttgagcagaggaaaatagtggcaggactgtcccccaggaggactccctgcttagctctgtgggagaccaactacgactggcatcttctcttccccctggaaggcagctagacaccaatggatccttgtcagttgtaacattctatttcaacttcaggaaagcagcagttttcttttaatttttcctatgaccataaaattagacatacctctcaacttacatatgtcttcaacatggttacctctgcataaatattagcaaagcatgccaatttctcttaagtactgaaatacatatgataaatttgactgttatttgttgagactatcaaacagaaaagaaattagggctctaatttccttaaagcaagctcacttgctttagttgttaagttttataaaagacatgaaattgagtcattttatatatgaaaactaagttctctatcttaggagtaatgtcggcccacaagggtgcccacctcttgttttccccttttaaaaactcagatttttaaaagccctttccaaaggtttcaactgtaaaatacttctttttacaatgtatcaacatatttttatttaaggggaattaacaattgccagggaaaccagccaacccaagtttattatatcattaaccttatcataaattcaaacctaagttgctggaccctggtgtgaggacataaatcttccaaagttttgcctatcctaagagctgcatttttctactgctctttaccttgcattttagctaatttaggagttttgagaatgtattggatacgctccagtacataaggagttgccgcatattatatcagactgctttgagaaatctcatccctagtctattgcagttgtttctattagcttactgattaactcagtcctgacacaccttttgggaaatgctgatttaaacttcttaactggcaacagttggaacagtaatcagtttgctaacatatttaaagtcttgaatgttgaagaactcatgtgatttacccttttcaactttttggaaaacgatttaatttattctaattagattaaccctattaatctatggattgggtatcaaaatgaatgccagtccagatgtgcctagacacgaaattggagctgaggactctcacgatatgcaagttcatccaacgtgaagataccataagctttttctctgaaccagagaaatgaaagtcagtttaagaggctgatagatcttggccctgttaaggcatccacttcacagttctgaaggctgagtcagccccactccacagttaggccaagaattagattttaaaacttcatctgtctgtcccagttaactgttaaataaggcctcatcctccactgaagagtatggattgaaggattgtgaactatgtttagtgtgattgtgaacttggtgcctaatgttccatgtctgaagtttgccccagtgctacacgttggagtatacctatgtgtgtgctttgccactgaagtaagattttgcctgtatggtactgttttgtttgttaataaagtgcactgccacccccaatgca

SEQ ID NO: 5281 - DNA, 2383 bp, Artificial Sequence
  derived and/or modified sequence
cccactcctgtgcctacgacccaggagcgtgtcagccaaagcatggagaatcaagagaaggcgagtatcgcgggccacatgttcgacgtagtcgtgatcggaggtggcatttcaggccaagagaagagattggcatgaactgttgctttgccagttccagccagtaccagcaaaaacatacatgtatgttggagcatcagaggaaagcagctcctggtggagagactatctgctgccaaactcttgactgaatatggcgttagtgttttggttttagaagctcgggacagggttggaggaagaacatatactataaggaatgagcatgttgattacgtagatgttggtggagcttatgtgggaccaacccaaaacagaatcttacgcttgtctaaggagctgggcatagagacttacaaagtgaatgtcagtgagcgtctcgttcaatatgtcaaggggaaaacatatccatttcggggcgcctttccaccagtatggaatcccattgcatatttggattacaataatctgtggaggacaatagataacatggggaaggagattccaactgatgcaccctgggaggctcaacatgctgacaaatgggacaaaatgaccatgaaagagctcattgacaaaatctgctggacaaagactgctaggcggtttgcttatctttttgtgaatatcaatgtgacctctgagcctcacgaagtgtctgccctgtggttcttgtggtatgtgaagcagtgcgggggcaccactcggatattctctgtcaccaatggtggccaggaacggaagtttgtaggtggatctggtcaagtgagcgaacggataatggacctcctcggagaccaagtgaagctgaaccatcctgtcactcacgttgaccagtcaagtgacaacatcatcatagagacgctgaaccatgaacattatgagtgcaaatacgtaattaatgcgatccctccgaccttgactgccaagattcacttcagaccagagcttccagcagagagaaaccagttaattcagcggcttccaatgggagctgtcattaagtgcatgatgtattacaaggaggccttctggaagaagaaggattactgtggctgcatgatcattgaagatgaagatgctccaatttcaataaccttggatgacaccaagccagatgggtcactgcctgccatcatgggcttcattcttgcccggaaagctgatcgacttgctaagctacataaggaaataaggaagaagaaaatctgtgagctctatgccaaagtgctgggatcccaagaagctttacatccagtgcattatgaagagaagaactggtgtgaggagcagtactctgggggctgctacacggcctacttccctcctgggatcatgactcaatatggaagggtgattcgtcaacccgtgggcaggattttctttgcgggcacagagactgccacaaagtggagcggctacatggaaggggcagttgaggctggagaacgagcagctagggaggtcttaaatggtctcgggaaggtgaccgagaaagatatctgggtacaagaacctgaatcaaaggacgttccagcggtagaaatcacccacaccttctgggaaaggaacctgccctctgtttctggcctgctgaagatcattggattttccacatcagtaactgccctggggtttgtgctgtacaaatacaagctcctgccacggtcttgaagttctgttcttatgctctctgctcactggttttcaataccaccaagaggaaaatattgacaagtttaaaggctgtgtcattgggccatgtttaagtgtactggatttaactacctttggcttaattccaatcattgttaaagtaaaaacaattcaaagaatcacctaattaatttcagtaagatcaagctccatcttatttgtcagtgtagatcaactcatgttaattgatagaataaagccttgtgatcactttctgaaattcacaaagttaaacgtgatgtgctcatcagaaacaatttctgtgtcctgtttttattcccttcaatgcaaaatacatgatgatttcagaaacaaagcatttgactttctgtctgtggaggtggagtaggtgaaggcccagcctgtaactgtcctttttcttcccttaggcaatggtgaactgtcattacagagcctagaggctcacagcctcctggaggaagcagcctccactttggatcaggaaatagtaaaggaaagcagtgttgggggtagcggcatgcagaccctcagaccagaatggggacatcttgtggtctgctgcctcaggaatctcctgaccacttgtagtccctccgacttctctagacatctagtctcagtgcta

SEQ ID NO: 5282 - DNA, 1584 bp, Artificial Sequence
  derived and/or modified sequence
atggagaaccaggagaaggccagcatcgccggccacatgttcgacgtggtcgtcatcgggggcggcattagtggcctatccgccgccaaactccttaccgaatatggggtgagcgtccttgtcctggaggcccgcgaccgcgttggcggacgtacctacaccatacgtaacgagcatgtggactatgtcgacgttggcggggcctacgtgggccccacacagaacagaatcctgaggcttagtaaagagctgggcattgagacctataaggtcaatgtatccgaaagactagtccagtatgtcaaagggaagacctacccattccgaggagcttttcctcccgtgtggaatcccatcgcatatttggactataataacttgtggaggactattgataacatgggcaaggagataccaaccgacgcaccttgggaggctcaacatgcagacaaatgggataaaatgaccatgaaggaactgatcgataagatatgttggactaaaacggccaggaggttcgcctatctgtttgtgaacattaacgtgacatctgagccccacgaagtctcggctttgtggttcctttggtacgttaaacagtgtgggggtaccacccgcatctttagtgtcactaacgggggccaggagcggaagttcgtgggggggagtgggcaggtgtcagaaagaattatggacctgctgggggaccaggtgaaactcaaccaccccgtgacacacgtggatcaatcatcagataacattataatagagaccttaaatcatgagcactacgagtgtaaatacgtgatcaacgcgattcctccaaccttgacagcaaagatacatttcagaccagaattgcccgccgaacgtaatcagttgatacagcggctgcctatgggcgctgttatcaaatgcatgatgtattataaggaagcgttctggaaaaagaaggattactgcggctgtatgatcatagaggacgaagatgctcctatctctatcacactggacgatacaaagccagacggttctctgcctgctatcatgggctttatcttggctcgcaaggcagatcgtctcgcaaagttgcataaggagattcgcaaaaagaagatctgtgaactatacgctaaggtgctgggctcccaagaagccctgcatccggtacattacgaggagaagaactggtgcgaagagcagtactctggtgggtgctacactgcatacttccctcctggaatcatgacacagtatgggcgcgtcattcggcagccagtgggtagaattttcttcgcaggaactgagacggccaccaagtggagcggatacatggagggggccgtggaggccggcgagcgggccgcacgggaagtcttaaacggactggggaaagttactgaaaaagacatctgggtgcaagaacccgagagcaaggatgtacctgcggtggaaatcacccacaccttctgggagcgcaatcttccttccgtgagtggactgcttaaaatcatcggattttctacaagcgtgaccgcgctcggatttgtgctttacaagtataagctgctaccccgatcctag

SEQ ID NO: 5283 - DNA, 1584 bp, Artificial Sequence
  derived and/or modified sequence
atggaaaatcaagaaaaggcctctatcgccggacacatgtttgacgtggtagttatagggggaggcattagcggcctttctgcagccaaactcctgaccgagtatggcgtgagcgttctagtgctcgaagctcgagatagggttggcggaaggacgtatacaatcagaaacgagcatgtcgactatgtcgacgttggcggagcctatgtgggcccaacacaaaatcgcatactgcgtctgtccaaagaactcggaattgagacgtacaaagttaatgtttccgagaggctggtgcagtatgtgaaaggcaaaacctacccatttcgaggcgctttccctcctgtatggaacccaattgcctaccttgactataataacctttggcggactatcgataatatgggcaaggagattcctaccgacgccccttgggaggctcagcacgccgacaagtgggataagatgactatgaaggagctgatcgataaaatctgttggacgaaaactgctaggaggttcgcctacctctttgtgaacatcaacgtcacaagcgaaccccacgaagtctccgctttgtggtttctatggtatgttaagcaatgtggcggtacgaccaggatcttcagcgttaccaatgggggacaagagcggaaatttgtcgggggttctggacaagtctcggagcggatcatggatcttttgggggaccaggtgaaactgaaccacccggtgacccatgttgatcaatctagtgacaacattattattgaaacactgaatcacgaacattacgagtgcaagtacgtgatcaacgcgatcccccctacactcactgctaagattcattttagacccgagttgcctgcagagcggaaccagctcatccagcggctgccgatgggcgcagtaattaaatgtatgatgtactacaaagaggcattctggaagaaaaaagattactgcggatgcatgattattgaggatgaggatgctccgatatccattactctggacgacacgaagcccgatggcagtttgcccgcaatcatgggttttatcctggcacgtaaggccgaccggctggcaaaattgcataaggagattcgtaagaagaagatttgtgaactgtacgccaaggtactggggtcacaggaggctttgcatccagttcattatgaggaaaaaaactggtgcgaagagcagtactcaggaggctgttacaccgcgtatttccccccaggtatcatgacacaatacggcagggtgattcgccagccggttgggaggatcttcttcgccggaactgaaacagccaccaaatggagcggatatatggaaggagccgtagaagccggagagcgtgccgctcgggaagtacttaacgggctgggcaaggtgacagaaaaggatatctgggtgcaggagccagaatccaaggatgtccctgcagttgaaattacccacactttttgggagcggaacttgccaagtgtgtccgggctcttgaagatcataggctttagtacaagcgtaaccgccttgggcttcgtcctatacaaatacaagctgctgcctaggagctag

SEQ ID NO: 5284 - DNA, 1584 bp, Artificial Sequence
  derived and/or modified sequence
atggagaaccaggagaaggccagcatcgccggccacatgttcgacgtggtggtgatcggcggcggcatcagcggcctgagcgccgccaagctgctgaccgagtacggcgtgagcgtgctggtgctggaggccagagacagagtgggcggcagaacctacaccatcagaaacgagcacgtggactacgtggacgtgggcggcgcctacgtgggccccacccagaacagaatcctgagactgagcaaggagctgggcatcgagacctacaaggtgaacgtgagcgagagactggtgcagtacgtgaagggcaagacctaccccttcagaggcgccttcccccccgtgtggaaccccatcgcctacctggactacaacaacctgtggagaaccatcgacaacatgggcaaggagatccccaccgacgccccctgggaggcccagcacgccgacaagtgggacaagatgaccatgaaggagctgatcgacaagatctgctggaccaagaccgccagaagattcgcctacctgttcgtgaacatcaacgtgaccagcgagccccacgaggtgagcgccctgtggttcctgtggtacgtgaagcagtgcggcggcaccaccagaatcttcagcgtgaccaacggcggccaggagagaaagttcgtgggcggcagcggccaggtgagcgagagaatcatggacctgctgggcgaccaggtgaagctgaaccaccccgtgacccacgtggaccagagcagcgacaacatcatcatcgagaccctgaaccacgagcactacgagtgcaagtacgtgatcaacgccatcccccccaccctgaccgccaagatccacttcagacccgagctgcccgccgagagaaaccagctgatccagagactgcccatgggcgccgtgatcaagtgcatgatgtactacaaggaggccttctggaagaagaaggactactgcggctgcatgatcatcgaggacgaggacgcccccatcagcatcaccctggacgacaccaagcccgacggcagcctgcccgccatcatgggcttcatcctggccagaaaggccgacagactggccaagctgcacaaggagatcagaaagaagaagatctgcgagctgtacgccaaggtgctgggcagccaggaggccctgcaccccgtgcactacgaggagaagaactggtgcgaggagcagtacagcggcggctgctacaccgcctacttcccccccggcatcatgacccagtacggcagagtgatcagacagcccgtgggcagaatcttcttcgccggcaccgagaccgccaccaagtggagcggctacatggagggcgccgtggaggccggcgagagagccgccagagaggtgctgaacggcctgggcaaggtgaccgagaaggacatctgggtgcaggagcccgagagcaaggacgtgcccgccgtggagatcacccacaccttctgggagagaaacctgcccagcgtgagcggcctgctgaagatcatcggcttcagcaccagcgtgaccgccctgggcttcgtgctgtacaagtacaagctgctgcccagaagctag

SEQ ID NO: 5285 - protein, 781 aa, Artificial Sequence
  derived and/or modified sequence
MAKTPSDHLLSTLEELVPYDFEKFKFKLQNTSVQKEHSRIPRSQIQRARPVKMATLLVTYYGEEYAVQLTLQVLRAINQRLLAEELHRAAIQEYSTQENGTDDSAASSSLGENKPRSLKTPDHPEGNEGNGPRPYGGGAASLRCSQPEAGRGLSRKPLSKRREKASEGLDAQGKPRTRSPALPGGRSPGPCRALEGGQAEVRLRRNASSAGRLQGLAGGAPGQKECRPFEVYLPSGKMRPRSLEVTISTGEKAPANPEILLTLEEKTAANLDSATEPRARPTPDGGASADLKEGPGNPEHSVTGRPPDTAASPRCHAQEGDPVDGTCVRDSCSFPEAVSGHPQASGSRSPGCPRCQDSHERKSPGSLSPQPLPQCKRHLKQVQLLFCEDHDEPICLICSLSQEHQGHRVRPIEEVALEHKKKIQKQLEHLKKLRKSGEEQRSYGEEKAVSFLKQTEALKQRVQRKLEQVYYFLEQQEHFFVASLEDVGQMVGQIRKAYDTRVSQDIALLDALIGELEAKECQSEWELLQDIGDILHRAKTVPVPEKWTTPQEIKQKIQLLHQKSEFVEKSTKYFSETLRSEMEMFNVPELIGAQAHAVNVILDAETAYPNLIFSDDLKSVRLGNKWERLPDGPQRFDSCIIVLGSPSFLSGRRYWEVEVGDKTAWILGACKTSISRKGNMTLSPENGYWVVIMMKENEYQASSVPPTRLLIKEPPKRVGIFVDYRVGSISFYNVTARSHIYTFASCSFSGPLQPIFSPGTRDGGKNTAPLTICPVGGQGPD

SEQ ID NO: 5286 - protein, 601 aa, Artificial Sequence
  derived and/or modified sequence
MAKTPSDHLLSTLEELVPYDFEKFKFKLQNTSVQKEHSRIPRSQIQRARPVKMATLLVTYYGEEYAVQLTLQVLRAINQRLLAEELHRAAIQDMGSCYVAQVGLELLISNNPPIFASETAGITGRPPDTAASPRCHAQEGDPVDGTCVRDSCSFPEAVSGHPQASGSRSPGCPRCQDSHERKSPGSLSPQPLPQCKRHLKQVQLLFCEDHDEPICLICSLSQEHQGHRVRPIEEVALEHKKKIQKQLEHLKKLRKSGEEQRSYGEEKAVSFLKQTEALKQRVQRKLEQVYYFLEQQEHFFVASLEDVGQMVGQIRKAYDTRVSQDIALLDALIGELEAKECQSEWELLQDIGDILHRAKTVPVPEKWTTPQEIKQKIQLLHQKSEFVEKSTKYFSETLRSEMEMFNVPELIGAQAHAVNVILDAETAYPNLIFSDDLKSVRLGNKWERLPDGPQRFDSCIIVLGSPSFLSGRRYWEVEVGDKTAWILGACKTSISRKGNMTLSPENGYWVVIMMKENEYQASSVPPTRLLIKEPPKRVGIFVDYRVGSISFYNVTARSHIYTFASCSFSGPLQPIFSPGTRDGGKNTAPLTICPVGGQGPD

SEQ ID NO: 5287 - protein, 570 aa, Artificial Sequence
  derived and/or modified sequence
MAKTPSDHLLSTLEELVPYDFEKFKFKLQNTSVQKEHSRIPRSQIQRARPVKMATLLVTYYGEEYAVQLTLQVLRAINQRLLAEELHRAAIQGRPPDTAASPRCHAQEGDPVDGTCVRDSCSFPEAVSGHPQASGSRSPGCPRCQDSHERKSPGSLSPQPLPQCKRHLKQVQLLFCEDHDEPICLICSLSQEHQGHRVRPIEEVALEHKKKIQKQLEHLKKLRKSGEEQRSYGEEKAVSFLKQTEALKQRVQRKLEQVYYFLEQQEHFFVASLEDVGQMVGQIRKAYDTRVSQDIALLDALIGELEAKECQSEWELLQDIGDILHRAKTVPVPEKWTTPQEIKQKIQLLHQKSEFVEKSTKYFSETLRSEMEMFNVPELIGAQAHAVNVILDAETAYPNLIFSDDLKSVRLGNKWERLPDGPQRFDSCIIVLGSPSFLSGRRYWEVEVGDKTAWILGACKTSISRKGNMTLSPENGYWVVIMMKENEYQASSVPPTRLLIKEPPKRVGIFVDYRVGSISFYNVTARSHIYTFASCSFSGPLQPIFSPGTRDGGKNTAPLTICPVGGQGPD

SEQ ID NO: 5288 - protein, 688 aa, Artificial Sequence
  derived and/or modified sequence
MAKTPSDHLLSTLEELVPYDFEKFKFKLQNTSVQKEHSRIPRSQIQRARPVKMATLLVTYYGEEYAVQLTLQVLRAINQRLLAEELHRAAIQEYSTQENGTDDSAASSSLGENKPRSLKTPDHPEGNEGNGPRPYGGGAASLRCSQPEAGRGLSRKPLSKRREKASEGLDAQGKPRTRSPALPGGRSPGPCRALEGGQAEVRLRRNASSAGRLQGLAGGAPGQKECRPFEVYLPSGKMRPRSLEVTISTGEKAPANPEILLTLEEKTAANLDSATEPRARPTPDGGASADLKEGPGNPEHSVTGRPPDTAASPRCHAQEGDPVDGTCVRDSCSFPEAVSGHPQASGSRSPGCPRCQDSHERKSPGSLSPQPLPQCKRHLKQVQLLFCEDHDEPICLICSLSQEHQGHRVRPIEEVALEHKKKIQKQLEHLKKLRKSGEEQRSYGEEKAVSFLKQTEALKQRVQRKLEQVYYFLEQQEHFFVASLEDVGQMVGQIRKAYDTRVSQDIALLDALIGELEAKECQSEWELLQDIGDILHRAKTVPVPEKWTTPQEIKQKIQLLHQKSEFVEKSTKYFSETLRSEMEMFNVPELIGAQAHAVNVILDAETAYPNLIFSDDLKSVRLGNKWERLPDGPQRFDSCIIVLGSPSFLSGRRYWEVEVGDKRFSCLSLRSSWDYRRPPPCPANFLHF

SEQ ID NO: 5289 - DNA, 3507 bp, Artificial Sequence
  derived and/or modified sequence
gaagccagacagctggctcgagcctctcctgctcagcaccatggctaagacccctagtgaccatctgctgtccaccctggaggagctggtgccctatgacttcgagaagttcaagttcaagctgcagaacaccagtgtgcagaaggagcactccaggatcccccggagccagatccagagagccaggccggtgaagatggccactctgctggtcacctactatggggaagagtacgccgtgcagctcaccctgcaggtcctgcgggccatcaaccagcgcctgctggccgaggagctccacagggcagccattcaggaatattccacacaagaaaacggcacagatgattccgcagcgtccagctccctgggggagaacaagcccaggagcctgaagactccagaccaccccgaggggaacgaggggaacggccctcggccgtacgggggcggagctgccagcctgcggtgcagccagcccgaggccgggagggggctgtcgaggaagcccctgagcaaacgcagagagaaggcctcggagggcctggacgcgcagggcaagcctcggacccggagcccggccctgccgggcgggagaagccccggcccctgcagggcgctagaggggggccaggccgaggtccggctgcgcagaaacgccagctccgcggggaggctgcaggggctggcggggggcgccccggggcagaaggagtgcaggcccttcgaagtgtacctgccctcgggaaagatgcgacctagaagccttgaggtcaccatttctacaggggagaaggcgcccgcaaatccagaaattctcctgactctagaggaaaagacagctgcgaatctggactcggcaacagaaccccgggcaaggcccactccggatggaggggcatctgcggacctgaaggaaggccctggaaatccagaacattcggtcaccggaaggccaccagacacggctgcgagtccccgctgccacgcccaggaaggagacccagttgacggtacctgtgtgcgtgattcctgcagcttccccgaggcagtttctgggcacccccaggcctcaggcagccgctcacctggctgcccccggtgccaggactcccatgaaaggaagagcccgggaagcctaagcccccagcccctgccacagtgtaagcgccacctgaagcaggtccagctgctcttctgtgaggatcacgatgagcccatctgcctcatctgcagtctgagtcaggagcaccaaggccaccgggtgcgccccattgaggaggtcgccctggaacacaagaagaaaattcagaagcagctggagcatctgaagaagctgagaaaatcaggggaggagcagcgatcctatggggaggagaaggcagtgagctttctgaaacaaactgaagcgctgaagcagcgggtgcagaggaagctggagcaggtgtactacttcctggagcagcaagagcatttctttgtggcctcactggaggacgtgggccagatggttgggcagatcaggaaggcatatgacacccgcgtatcccaggacatcgccctgctcgatgcgctgattggggaactggaggccaaggagtgccagtcagaatgggaacttctgcaggacattggagacatcttgcacagggctaagacagtgcctgtccctgaaaagtggaccactcctcaagagataaaacaaaagatccaactcctccaccagaagtcagagtttgtggagaagagcacaaagtacttctcagaaaccctgcgttcagaaatggaaatgttcaatgttccagagctgattggcgctcaggcacatgctgttaatgtgattctggatgcagaaaccgcttaccccaacctcatcttctctgatgatctgaagagtgttagacttggaaacaagtgggagaggctgcctgatggcccgcaaagatttgacagctgtatcattgttctgggctctccgagtttcctctctggccgccgttactgggaggtggaggttggagacaagacagcatggatcctgggagcctgcaagacatccataagcaggaaagggaacatgactctgtcgccagagaatggctactgggtggtgataatgatgaaggaaaatgagtaccaggcgtccagcgttcccccgacccgcctgctaataaaggagcctcccaagcgtgtgggcatcttcgtggactacagagttggaagcatctccttttacaatgtgacagccagatcccacatctatacattcgccagctgctctttctctgggccccttcaacctatcttcagccctgggacacgtgatggagggaagaacacagctcctctgactatctgtccagtgggtggtcaggggcctgactgaatgcccaacactgcatctctcttcctgcttctggccttgtatcttgcattcacactcaatagtcacggaatgccgactaggtgctagctgctatgggaaatgcaaaaataacaaaatagttactgtgcccacggagcctacccgattatagcagaggtaagttaggaacgaacatgttagtcaatccgggtgaagacatgtactgatgacacaccatggatttcagaggaggaagtacggagtcgttgcataatccgcccctggtgggtggcactctcaggtgctcctgaacagaagatttggccctcattttccctcagaaccccacggcaaggatatatgtccccttgttctctctgcttctgtcttgaggatatgggaagcctagagaaacgcaagcagactggattgggatagaagtatttgtgtacctggattaatgaactatgattttttttttttttttttgagaccaaatcttgctctgtggcccaggctggagtgcagtggcacgatctcagctcactgcaacctccacctcccaggttcaagcgattctcctgcctcagcctcctgagcagctgggattacaggtgcgtgccaccacaccaggctggttttcttgtatttttagtagagacgggggtttcaccatgttagccaggctggtctcgaactcctgacctcaggtgatccacccgcctcagcctcccaaagtgctgggattacaggcatgagccactgtgcccggcctatgattcttttttttttttttttttgagacaaagttttgctcttgtcacccaggctggagtgcagtggtgcaatcttggctcgcaacctccgcctcccaggttcaagagattctcctgcctcagcctccgaagtagctgggattacaggcgcccgccaccatgcccggctaattttttgcatttttagtagacatgaggtttcatcatgttggccaggccggtctcaaactcctgacctcaggtgatgcacccacctcagcctcccaaagtgcagggattacaggcatgagccaccatgccgggccatgattcttaagagaattgactgggcctcatgaataaaaaaattagaaaatctaaaaaaaa

SEQ ID NO: 5290 - DNA, 2346 bp, Artificial Sequence
  derived and/or modified sequence
atggctaaaacacccagcgaccatttgctttccacccttgaggagctggttccttatgacttcgaaaaattcaagtttaagcttcagaatacgagtgtgcagaaggaacatagccgaattccccggtcccagatccagagagctagaccagtaaaaatggcaaccttgctggtaacctattacggtgaggaatatgccgttcagctaactctccaggtgctgcgagctatcaaccagcggttgttggcggaagagctgcatagggctgctatccaggaatattcaacccaggagaatggcaccgatgactcagcagccagctcttcccttggggagaataagcctcgaagtctaaaaacaccggatcatcccgagggaaatgaaggtaacgggcctaggccctacggtggcggcgcggcctccctgcgttgcagtcagcctgaagcgggtcgtgggctgagcagaaaaccactgagcaagagaagggagaaagccagtgaagggctagatgctcaggggaaaccaagaactagaagcccggccctgcctggtggaaggagtccaggcccttgccgcgccctggaaggtggacaggcagaggtcagattacgaagaaatgcatcttcagccgggagactgcaagggttggccggcggggcacctggtcagaaggaatgccggcctttcgaggtgtatcttccttcaggtaaaatgaggccaagatctctcgaggtgacgatcagcacaggcgagaaggcaccagccaaccccgagatcctcttgacattggaggagaagactgccgctaatctcgacagcgcaactgaacccagagcaaggcccactcctgacggtggcgcgagtgctgacctgaaggagggacccgggaaccccgaacactctgtgactgggagaccccccgatactgccgcttcacccagatgccacgcccaggagggagaccccgtggatggtacatgcgtgagggacagctgtagtttccccgaagcggtatccggccaccctcaagccagtggttctagatcccccggatgcccgagatgccaggactcacacgagaggaagagccccggctcactgtcaccccaacctttgccccagtgtaagaggcacctaaaacaggtgcagctcctattttgcgaagatcacgacgagcctatctgtctgatctgttctctgagtcaagaacaccaggggcaccgggtccgacctattgaggaggtcgccctagagcacaaaaaaaaaatccagaagcagctagaacacctgaaaaagctgcggaaaagtggcgaggagcaacgtagttatggagaagaaaaagcagtctcttttctcaaacagaccgaggccttgaagcagcgggtgcagcggaagctggaacaagtctactatttcttggaacagcaggagcatttctttgtcgcatcattagaagacgtgggacagatggttggacagatcagaaaggcatatgatactcgagtaagtcaggacattgctctgttggacgctctgatcggggagttagaggctaaggagtgtcagagcgagtgggagcttctgcaggacatcggcgacatcctgcaccgggctaaaaccgtgccagtgcctgagaagtggacaaccccacaggagatcaagcagaagattcagctccttcaccagaagagtgagttcgtagaaaagtccaccaagtatttcagcgaaaccctgcggagcgaaatggagatgttcaatgtgccagaactcatcggtgcacaagcacacgccgtgaacgtgattctggatgccgaaaccgcctatccaaaccttattttctcggatgatctcaaaagtgtgcggttggggaacaagtgggagcgactccctgatggtccccagagattcgattcgtgcattatcgtattgggctcgccttccttcctcagcggcaggcgctactgggaagttgaggtaggagacaaaacagcctggatcctcggagcttgtaaaacgtccatttcccgaaagggaaatatgaccctgtcacccgaaaacgggtactgggtggtgatcatgatgaaggaaaacgaatatcaggcctcttctgtgccccccactagactcttaataaaagagccccctaagagagtaggtatctttgtggactaccgggtgggctccatttccttctacaatgtgacggctcggagtcatatttataccttcgccagttgttccttttccggccctttgcagcccatcttctcacccggaacccgggacggagggaagaacaccgctccattgacaatttgcccggtcggcggccagggaccagactag

SEQ ID NO: 5291 - DNA, 1806 bp, Artificial Sequence
  derived and/or modified sequence
atggctaagacaccctctgaccacctgttaagcacactggaggagctggtcccttatgactttgagaagtttaaattcaaactacagaacacatccgtccaaaaagaacactccaggattccaaggtctcagatacaacgggcccgccctgtaaaaatggcgacactgttggtgacctactatggcgaggagtacgcggttcagttaaccttgcaagtccttagggccatcaaccagcggctgctggctgaggaactacaccgggcggctatccaggatatggggagttgctatgtggcacaggtgggactggagttactcatctcgaacaatccacctatcttcgcaagtgagaccgccggcattaccggccgaccaccagacacagcggcctccccccggtgtcatgcccaggaaggcgatcccgtagacgggacctgtgtgcgggattcctgtagctttcccgaggccgtctcaggccacccccaggctagcgggagtcgctccccggggtgccccagatgtcaggattcccacgagaggaagtccccagggagtctgagtccccagcctctcccccagtgtaagaggcatttaaaacaggtccaacttctattctgcgaggatcatgacgagccgatctgtttgatctgctctcttagccaggagcaccagggacatagggtccgccccatagaagaagtagctctggagcacaaaaagaagattcagaagcagctggagcatctcaaaaagctgcggaagtcgggcgaggagcaacgctcctacggcgaagagaaggctgtgtcctttctcaaacagaccgaggcattgaaacagcgcgtccagcggaagttagagcaagtttattacttcctggaacaacaggagcattttttcgtggcaagcctggaagacgtggggcagatggtgggtcagatacgtaaagcatatgacacgagagtgtcgcaggatattgcactgctcgacgctctgattggtgagctcgaagccaaagaatgccaaagcgagtgggaactcttacaggatataggagacatacttcacagagctaagacggtgcctgttccagaaaagtggacgactccccaggagataaaacagaagattcagctgctacaccagaagtcagaatttgtggagaagtcaaccaaatattttagtgagacactccgttcagaaatggaaatgttcaatgtacctgagttgataggcgcccaagctcacgccgtcaacgtaatcctggatgctgaaaccgcatacccgaatctcatcttcagcgacgacctgaagtcggttcggcttggtaataaatgggaacgcctgcccgacggccctcagcgcttcgacagctgcatcattgtgttgggttctccttccttcctctctggtcgccgctattgggaagtggaggtcggggacaaaaccgcttggattcttggcgcatgcaagactagcattagtcggaaggggaatatgaccctgagccctgagaatggctattgggttgtcatcatgatgaaagaaaacgagtaccaggcatcatccgtgccaccaacccgacttctcataaaggaaccccctaaacgcgtggggatttttgtcgactacagggtaggatccatcagcttttataacgtcaccgcccgttctcacatttatacatttgctagctgtagctttagcggcccgttacagcctattttttctcccggcaccagggatggcggaaagaacactgcacctctcacaatttgtccagtggggggtcaaggcccggactag

SEQ ID NO: 5292 - DNA, 1713 bp, Artificial Sequence
  derived and/or modified sequence
atggccaaaactccttcggatcatctgttgagcaccctcgaagagctggttccatacgacttcgaaaagttcaaatttaagctccaaaatacatccgtccagaaggaacactctcggatcccccgcagccagatacaacgggcccggcccgtgaaaatggctactctgctggttacttactacggagaggaatatgctgtccagctaacactccaggtcctgagagctatcaatcagcggttgttggccgaggagctgcaccgggcagccatccaggggcggccaccagataccgctgcttcccctcgctgtcacgcacaggagggtgatccagtggacggaacttgtgtgagagactcttgtagctttcccgaggccgtaagtggccacccgcaggctagcgggtctagatccccaggctgtcctaggtgccaggactcccacgaacggaaaagccctggcagtctatcaccccagcccctcccacaatgtaagcgtcatctgaagcaggttcagcttctattttgcgaggaccatgatgaacccatttgccttatctgctctctgagccaggaacaccagggtcaccgcgtgaggcctatagaggaggtggcactcgagcacaagaagaagatccagaaacagttggagcaccttaaaaaactgcgaaagtctggcgaggaacagagaagctatggcgaagaaaaagccgtttctttcttaaaacagaccgaagccctgaaacagagggtgcagaggaagttggagcaagtctactattttctggagcaacaggagcacttttttgttgcttccctggaagacgtcggccaaatggttgggcagattcgcaaggcctatgacactagagtcagccaagatatcgcgctattggatgctctaataggcgaacttgaggccaaggagtgccagagcgagtgggaattacttcaggacattggtgacattttgcatcgggcgaaaacggtgccagtgcccgaaaaatggactacaccccaggaaatcaagcaaaaaattcagttactgcatcagaagagcgagtttgtagagaagtcaacaaagtattttagtgaaaccttgagatctgaaatggaaatgtttaacgttcccgaactgattggagcacaggcccatgcagtcaacgtgattctggatgccgagactgcttatcctaatctaatcttctcagacgatttaaagagcgtgcgtctaggtaacaaatgggagcgtctgcctgacggtccccaaaggtttgattcctgtattatcgttctcggtagtccgtcctttttgtctggcagacgatactgggaggtggaggtgggtgataagactgcttggatactgggcgcgtgcaagacctctatctctaggaagggtaatatgacactcagtccagagaatggatactgggtagtcataatgatgaaagagaacgaatatcaggcgagtagcgtccctcctacaaggcttcttatcaaggagccaccaaagcgcgtaggcattttcgtggactatcgcgtggggagtatcagcttttacaatgtgaccgcacggtcgcacatttataccttcgcctcctgcagtttcagcggccctctgcagcctatttttagtcctgggacgcgcgacggtgggaaaaacacggctccactcaccatatgtcccgtgggcggccagggccccgactag

SEQ ID NO: 5293 - DNA, 2067 bp, Artificial Sequence
  derived and/or modified sequence
atggcaaaaacaccctcagatcacctacttagcaccttggaagaacttgtgccatacgactttgagaagtttaagtttaaactgcagaataccagcgtgcaaaaagaacattcacggattccaaggagtcaaatccagagggctcggcctgtcaaaatggccactctactcgtgacctactacggagaagagtacgcagtgcagttgacattgcaggtactccgggcaatcaatcagcggctgctggctgaagagctgcaccgtgctgcgatccaggaatattcgactcaggagaatgggaccgacgatagtgcagctagctcttcacttggagagaacaagccacgctcgctgaaaacccccgaccaccccgaaggaaatgaagggaatggtcctaggccctatggaggtggggcagcatctttgaggtgttcccagcctgaagccgggaggggcctctctcgcaaaccgttgtctaagagacgtgaaaaggcaagtgagggacttgatgcccagggaaagccgaggacccgcagcccagctcttcccggcggacgatcaccaggtccgtgtagggcactcgaaggaggccaggccgaagtccggttgagacggaacgctagcagtgccggcaggcttcagggtctggccggaggcgccccagggcagaaagagtgccgaccatttgaagtctacctaccctccgggaagatgcgccctcggtccttagaagtcacaatctccactggtgaaaaggcccccgctaatcctgagatactcctcaccctcgaagaaaagactgccgccaaccttgacagcgctaccgagcctcgggccagacccaccccagacggcggggcctcagcagacctgaaggagggcccaggaaatccggagcacagtgtgactgggcgcccacccgacaccgccgctagtcccagatgccacgcccaggagggcgatcccgtcgatgggacctgcgttcgcgactcctgttcctttcccgaagccgtgtctggacatcctcaggccagtggctctcgcagccccggctgcccaaggtgtcaggactctcacgagaggaagtccccaggctctctgagcccacagccactcccccaatgtaagagacacttgaaacaagtccagcttttattttgtgaagatcatgatgagccgatctgtcttatatgctccttgtcccaagaacatcagggccatcgcgtgcgtcccattgaggaggtggctctggagcacaagaaaaaaattcagaagcagctggagcacctgaagaaactgagaaaaagtggcgaagagcagcggagctacggcgaagaaaaggcagtatccttcctgaagcagacagaagcattgaaacagcgagtgcaaagaaaacttgaacaggtttactatttcctggaacagcaggaacatttttttgtggcttcacttgaggacgtcggacaaatggttggacagatacggaaagcttacgatacacgtgtgtcgcaggacattgcattgctcgacgccctcatcggcgaactggaagccaaggagtgccagagtgaatgggaattgctacaagatatcggagacatactgcaccgtgcaaagacagtgccagtgcccgagaagtggacaaccccccaggagataaaacagaagatccagctgctccaccagaaatccgagtttgtcgaaaaatctaccaagtacttttccgagaccctgaggtcagaaatggaaatgtttaatgtgcctgaactcattggcgcccaggctcacgccgtcaacgtgatcctcgacgccgaaactgcctatcctaacctgatcttttcggacgacctgaaaagcgtgcggctgggaaataaatgggagaggctccccgatggtcctcaacggtttgattcctgcattatcgtcctggggtcaccatccttcctgtccggccgtcgatattgggaagtagaagtgggggataaaaggttttcctgcctgagcctcagaagttcatgggactacagaagaccacccccttgccctgctaattttcttcatttctag

SEQ ID NO: 5294 - DNA, 2346 bp, Artificial Sequence
  derived and/or modified sequence
atggccaagacccccagcgaccacctgctgagcaccctggaggagctggtgccctatgactttgagaagttcaagttcaagctgcagaacacctctgtgcagaaggagcacagccgcatccccaggagccagatccagagggcccggcctgtgaagatggccaccctgctggtgacctactatggagaggagtatgctgtgcagctgaccctgcaggtgctgcgggccatcaaccagaggctgctggccgaggagctgcacagagctgccatccaggagtacagcacccaggagaatggaacagatgacagcgctgccagcagcagcctgggggagaacaagcccaggagcctgaagaccccagaccaccctgagggcaatgaaggaaatggcccccggccctatggaggaggagctgccagcctgcgctgcagccagcctgaggccggccggggcctgagcaggaagcccctgagcaagagaagagagaaggccagcgagggcctggatgcccagggcaagcccaggaccaggagccctgccctgcccggcggccgcagccctggcccctgccgggccctggagggcggccaggccgaggtgcggctgcggagaaatgccagcagcgctggccgcctgcagggcctggccggcggggcccctggccagaaggaatgtcggccctttgaggtgtacctgcccagcggcaagatgaggcccaggagcctggaggtgaccatcagcactggagagaaggccccagccaaccctgagatcctgctgaccctggaggagaagacagctgccaacctggacagcgccacagagccccgggcccggcccaccccagatggaggagccagcgctgacctgaaggagggccctggcaaccctgagcacagcgtgacaggccggcccccagacacagctgccagcccccgctgccacgcccaggagggggaccctgtggatggcacctgtgtgcgggacagctgcagcttccctgaggccgtgtctggccacccccaggccagcggcagccgcagccctggctgcccccgctgccaggacagccatgagaggaagagccctggcagcctgagcccccagcccctgccccagtgcaagaggcacctgaagcaggtgcagctgctcttctgtgaggaccatgatgagcccatctgcctgatctgcagcctgagccaggagcaccagggccaccgggtgcggcccatcgaggaggtggccctggagcacaagaagaagatccagaagcagctggagcacctgaagaagctgaggaagagcggggaggagcagaggagctatggagaggagaaggctgtgtccttcctgaagcagacagaggccctgaagcagagggtgcagaggaagctggagcaggtgtactacttcctggagcagcaggagcacttctttgtggccagcctggaggatgtgggccagatggtgggccagatcaggaaggcctatgacaccagggtgtcccaggacatcgccctgctggatgccctgattggagagctggaggccaaggagtgccagagcgagtgggagctgctgcaggacattggagacatcctgcaccgggccaagacagtgcctgtgcctgagaagtggaccaccccccaggagatcaagcagaagatccagctgctgcaccagaagtcagaatttgtggagaagagcaccaagtacttcagcgagaccctgcggtctgagatggagatgttcaacgtgcctgagctgattggagcccaggcccatgctgtgaatgtcatcctggatgctgagacagcctaccccaacctgatcttcagtgatgacctgaagtctgtgcggctgggcaacaagtgggagcggctgcctgatggcccccagagatttgacagctgcatcatcgtgctgggcagccccagcttcctgagcggccgccgctactgggaggtggaggtgggggacaagacagcctggatcctgggcgcctgcaagaccagcatcagcaggaaaggaaacatgaccctgagcccagaaaatggctactgggtggtgatcatgatgaaggaaaatgagtaccaggccagctctgtgccccccacccggctgctgatcaaggagccccccaagagggtgggcatctttgtggactacagagtgggcagcatctccttctacaacgtgacagcccggagccacatctacacctttgccagctgcagcttcagcggccccctgcagcccatcttcagccctggcaccagagatggcggcaagaacacagcccccctgaccatctgccctgtgggcggccagggccctgactag

SEQ ID NO: 5295 - DNA, 1806 bp, Artificial Sequence
  derived and/or modified sequence
atggccaagacccccagcgaccacctgctgagcaccctggaggagctggtgccctatgactttgagaagttcaagttcaagctgcagaacacctctgtgcagaaggagcacagccgcatccccaggagccagatccagagggcccggcctgtgaagatggccaccctgctggtgacctactatggagaggagtatgctgtgcagctgaccctgcaggtgctgcgggccatcaaccagaggctgctggccgaggagctgcacagagctgccatccaggacatgggcagctgctacgtggcccaggtgggcctggagctgctgatcagcaacaacccccccatctttgccagcgagacagctggcatcaccggccggcccccagacacagctgccagcccccgctgccacgcccaggagggggaccctgtggatggcacctgtgtgcgggacagctgcagcttccctgaggccgtgtctggccacccccaggccagcggcagccgcagccctggctgcccccgctgccaggacagccatgagaggaagagccctggcagcctgagcccccagcccctgccccagtgcaagaggcacctgaagcaggtgcagctgctcttctgtgaggaccatgatgagcccatctgcctgatctgcagcctgagccaggagcaccagggccaccgggtgcggcccatcgaggaggtggccctggagcacaagaagaagatccagaagcagctggagcacctgaagaagctgaggaagagcggggaggagcagaggagctatggagaggagaaggctgtgtccttcctgaagcagacagaggccctgaagcagagggtgcagaggaagctggagcaggtgtactacttcctggagcagcaggagcacttctttgtggccagcctggaggatgtgggccagatggtgggccagatcaggaaggcctatgacaccagggtgtcccaggacatcgccctgctggatgccctgattggagagctggaggccaaggagtgccagagcgagtgggagctgctgcaggacattggagacatcctgcaccgggccaagacagtgcctgtgcctgagaagtggaccaccccccaggagatcaagcagaagatccagctgctgcaccagaagtcagaatttgtggagaagagcaccaagtacttcagcgagaccctgcggtctgagatggagatgttcaacgtgcctgagctgattggagcccaggcccatgctgtgaatgtcatcctggatgctgagacagcctaccccaacctgatcttcagtgatgacctgaagtctgtgcggctgggcaacaagtgggagcggctgcctgatggcccccagagatttgacagctgcatcatcgtgctgggcagccccagcttcctgagcggccgccgctactgggaggtggaggtgggggacaagacagcctggatcctgggcgcctgcaagaccagcatcagcaggaaaggaaacatgaccctgagcccagaaaatggctactgggtggtgatcatgatgaaggaaaatgagtaccaggccagctctgtgccccccacccggctgctgatcaaggagccccccaagagggtgggcatctttgtggactacagagtgggcagcatctccttctacaacgtgacagcccggagccacatctacacctttgccagctgcagcttcagcggccccctgcagcccatcttcagccctggcaccagagatggcggcaagaacacagcccccctgaccatctgccctgtgggcggccagggccctgactag

SEQ ID NO: 5296 - DNA, 1713 bp, Artificial Sequence
  derived and/or modified sequence
atggccaagacccccagcgaccacctgctgagcaccctggaggagctggtgccctatgactttgagaagttcaagttcaagctgcagaacacctctgtgcagaaggagcacagccgcatccccaggagccagatccagagggcccggcctgtgaagatggccaccctgctggtgacctactatggagaggagtatgctgtgcagctgaccctgcaggtgctgcgggccatcaaccagaggctgctggccgaggagctgcacagagctgccatccagggccggcccccagacacagctgccagcccccgctgccacgcccaggagggggaccctgtggatggcacctgtgtgcgggacagctgcagcttccctgaggccgtgtctggccacccccaggccagcggcagccgcagccctggctgcccccgctgccaggacagccatgagaggaagagccctggcagcctgagcccccagcccctgccccagtgcaagaggcacctgaagcaggtgcagctgctcttctgtgaagatcatgatgagcccatctgcctgatctgcagcctgagccaggagcaccagggccaccgggtgcggcccatcgaggaggtggccctggagcacaagaagaagatccagaagcagctggagcacctgaagaagctgaggaagtctggagaggagcagaggagctatggagaggagaaggctgtgtccttcctgaagcagacagaggccctgaagcagagggtgcagaggaagctggagcaggtgtactacttcctggagcagcaggagcacttctttgtggccagcctggaggatgtgggccagatggtgggccagatcaggaaggcctatgacaccagggtgtcccaggacatcgccctgctggatgccctgattggagagctggaggccaaggagtgccagagcgagtgggagctgctgcaggacatcggggacatcctgcaccgggccaagacagtgcctgtgcctgagaagtggaccaccccccaggagatcaagcagaagatccagctgctgcaccagaagtcagaatttgtggagaagagcaccaagtacttcagcgagaccctgcggtctgagatggagatgtttaatgtgcctgagctgattggagcccaggcccatgctgtgaatgtcatcctggatgctgagacagcctaccccaacctgatcttcagtgatgacctgaagtctgtgcggctgggcaacaagtgggagcggctgcctgatggcccccagagatttgacagctgcatcatcgtgctgggcagccccagcttcctgtctggaagacgctactgggaggtggaggtgggggacaagacagcctggatcctgggcgcctgcaagaccagcatcagcaggaagggcaacatgaccctgagcccagaaaatggctactgggtggtgatcatgatgaaggaaaatgagtaccaggccagctctgtgccccccacccggctgctgatcaaggagccccccaagagggtgggcatctttgtggactacagagtgggcagcatctccttctacaacgtgacagcccggagccacatctacacctttgccagctgcagcttcagcggccccctgcagcccatcttcagccctggcaccagagatggcggcaagaacacagcccccctgaccatctgccctgtgggcggccagggccctgactag

SEQ ID NO: 5297 - DNA, 2067 bp, Artificial Sequence
  derived and/or modified sequence
atggccaagacccccagcgaccacctgctgagcaccctggaggagctggtgccctatgactttgagaagttcaagttcaagctgcagaacacctctgtgcagaaggagcacagccgcatccccaggagccagatccagagggcccggcctgtgaagatggccaccctgctggtgacctactatggagaggagtatgctgtgcagctgaccctgcaggtgctgcgggccatcaaccagaggctgctggccgaggagctgcacagagctgccatccaggagtacagcacccaggagaatggaacagatgacagcgctgccagcagcagcctgggggagaacaagcccaggagcctgaagaccccagaccaccctgagggcaatgaaggaaatggcccccggccctatggaggaggagctgccagcctgcgctgcagccagcctgaggccggccggggcctgagcaggaagcccctgagcaagagaagagagaaggccagcgagggcctggatgcccagggcaagcccaggaccaggagccctgccctgcccggcggccgcagccctggcccctgccgggccctggagggcggccaggccgaggtgcggctgcggagaaatgccagcagcgctggccgcctgcagggcctggccggcggggcccctggccagaaggaatgtcggccctttgaggtgtacctgcccagcggcaagatgaggcccaggagcctggaggtgaccatcagcactggagagaaggccccagccaaccctgagatcctgctgaccctggaggagaagacagctgccaacctggacagcgccacagagccccgggcccggcccaccccagatggaggagccagcgctgacctgaaggagggccctggcaaccctgagcacagcgtgacaggccggcccccagacacagctgccagcccccgctgccacgcccaggagggggaccctgtggatggcacctgtgtgcgggacagctgcagcttccctgaggccgtgtctggccacccccaggccagcggcagccgcagccctggctgcccccgctgccaggacagccatgagaggaagagccctggcagcctgagcccccagcccctgccccagtgcaagaggcacctgaagcaggtgcagctgctcttctgtgaggaccatgatgagcccatctgcctgatctgcagcctgagccaggagcaccagggccaccgggtgcggcccatcgaggaggtggccctggagcacaagaagaagatccagaagcagctggagcacctgaagaagctgaggaagagcggggaggagcagaggagctatggagaggagaaggctgtgtccttcctgaagcagacagaggccctgaagcagagggtgcagaggaagctggagcaggtgtactacttcctggagcagcaggagcacttctttgtggccagcctggaggatgtgggccagatggtgggccagatcaggaaggcctatgacaccagggtgtcccaggacatcgccctgctggatgccctgattggagagctggaggccaaggagtgccagagcgagtgggagctgctgcaggacattggagacatcctgcaccgggccaagacagtgcctgtgcctgagaagtggaccaccccccaggagatcaagcagaagatccagctgctgcaccagaagtcagaatttgtggagaagagcaccaagtacttcagcgagaccctgcggtctgagatggagatgttcaacgtgcctgagctgattggagcccaggcccatgctgtgaatgtcatcctggatgctgagacagcctaccccaacctgatcttcagtgatgacctgaagtctgtgcggctgggcaacaagtgggagcggctgcctgatggcccccagagatttgacagctgcatcatcgtgctgggcagccccagcttcctgagcggccgccgctactgggaggtggaggtgggggacaagcgcttcagctgcctgagcctgcggagctcctgggactaccgccggcccccaccctgcccagccaacttcctgcacttctag

SEQ ID NO: 5298 - DNA, 3499 bp, Artificial Sequence
  derived and/or modified sequence
gaagccagacagctggctcgagcctctcctgctcagcaccatggctaagacccctagtgaccatctgctgtccaccctggaggagctggtgccctatgacttcgagaagttcaagttcaagctgcagaacaccagtgtgcagaaggagcactccaggatcccccggagccagatccagagagccaggccggtgaagatggccactctgctggtcacctactatggggaagagtacgccgtgcagctcaccctgcaggtcctgcgggccatcaaccagcgcctgctggccgaggagctccacagggcagccattcaggaatattccacacaagaaaacggcacagatgattccgcagcgtccagctccctgggggagaacaagcccaggagcctgaagactccagaccaccccgaggggaacgaggggaacggccctcggccgtacgggggcggagctgccagcctgcggtgcagccagcccgaggccgggagggggctgtcgaggaagcccctgagcaaacgcagagagaaggcctcggagggcctggacgcgcagggcaagcctcggacccggagcccggccctgccgggcgggagaagccccggcccctgcagggcgctagaggggggccaggccgaggtccggctgcgcagaaacgccagctccgcggggaggctgcaggggctggcggggggcgccccggggcagaaggagtgcaggcccttcgaagtgtacctgccctcgggaaagatgcgacctagaagccttgaggtcaccatttctacaggggagaaggcgcccgcaaatccagaaattctcctgactctagaggaaaagacagctgcgaatctggactcggcaacagaaccccgggcaaggcccactccggatggaggggcatctgcggacctgaaggaaggccctggaaatccagaacattcggtcaccggaaggccaccagacacggctgcgagtccccgctgccacgcccaggaaggagacccagttgacggtacctgtgtgcgtgattcctgcagcttccccgaggcagtttctgggcacccccaggcctcaggcagccgctcacctggctgcccccggtgccaggactcccatgaaaggaagagcccgggaagcctaagcccccagcccctgccacagtgtaagcgccacctgaagcaggtccagctgctcttctgtgaggatcacgatgagcccatctgcctcatctgcagtctgagtcaggagcaccaaggccaccgggtgcgccccattgaggaggtcgccctggaacacaagaagaaaattcagaagcagctggagcatctgaagaagctgagaaaatcaggggaggagcagcgatcctatggggaggagaaggcagtgagctttctgaaacaaactgaagcgctgaagcagcgggtgcagaggaagctggagcaggtgtactacttcctggagcagcaagagcatttctttgtggcctcactggaggacgtgggccagatggttgggcagatcaggaaggcatatgacacccgcgtatcccaggacatcgccctgctcgatgcgctgattggggaactggaggccaaggagtgccagtcagaatgggaacttctgcaggacattggagacatcttgcacagggctaagacagtgcctgtccctgaaaagtggaccactcctcaagagataaaacaaaagatccaactcctccaccagaagtcagagtttgtggagaagagcacaaagtacttctcagaaaccctgcgttcagaaatggaaatgttcaatgttccggagctgattggcgctcaggcacatgctgttaatgtgattctggatgcagaaaccgcttaccccaacctcatcttctctgatgatctgaagagtgttagacttggaaacaagtgggagaggctgcctgatggcccgcaaagatttgacagctgtatcattgttctgggctctccgagtttcctctctggccgccgttactgggaggtggaggttggagacaagacagcatggatcctgggagcctgcaagacatccataagcaggaaagggaacatgactctgtcgccagagaatggctactgggtggtgataatgatgaaggaaaatgagtaccaggcgtccagcgttcccccgacccgcctgctaataaaggagcctcccaagcgtgtgggcatcttcgtggactacagagttggaagcatctccttttacaatgtgacagccagatcccacatctatacattcgccagctgctctttctctgggccccttcaacctatcttcagccctgggacacgtgatggagggaagaacacagctcctctgactatctgtccagtgggtggtcaggggcctgactgaatgcccaacactgcatctctcttcctgcttctggccttgtatcttgcattcacactcaatagtcacggaatgccgactaggtgctagctgctatgggaaatgcaaaaataacaaaatagttactgtgcccacggagcctacccgattatagcagaggtaagttaggaacgaacatgttagtcaatccgggtgaagacatgtactgatgacacaccatggatttcagaggaggaagtacggagtcgttgcataatccgcccctggtgggtggcactctcaggtgctcctgaacagaagatttggccctcattttccctcagaaccccacggcaaggatatatgtccccttgttctctctgcttctgtcttgaggatatgggaagcctagagaaacgcaagcagactggattgggatagaagtatttgtgtacctggattaatgaactatgattttttttttttttttttgagaccaaatcttgctctgtggcccaggctggagtgcagtggcacgatctcagctcactgcaacctccacctcccaggttcaagcgattctcctgcctcagcctcctgagcagctgggattacaggtgcgtgccaccacaccaggctggttttcttgtatttttagtagagacgggggtttcaccatgttagccaggctggtctcgaactcctgacctcaggtgatccacccgcctcagcctcccaaagtgctgggattacaggcatgagccactgtgcccggcctatgattcttttttttttttttttttgagacaaagttttgctcttgtcacccaggctggagtgcagtggtgcaatcttggctcgcaacctccgcctcccaggttcaagagattctcctgcctcagcctccgaagtagctgggattacaggcgcccgccaccatgcccggctaattttttgcatttttagtagacatgaggtttcatcatgttggccaggccggtctcaaactcctgacctcaggtgatgcacccacctcagcctcccaaagtgcagggattacaggcatgagccaccatgccgggccatgattcttaagagaattgactgggcctcatgaataaaaaaattagaaaatct

SEQ ID NO: 5299 - DNA, 2959 bp, Artificial Sequence
  derived and/or modified sequence
gaagccagacagctggctcgagcctctcctgctcagcaccatggctaagacccctagtgaccatctgctgtccaccctggaggagctggtgccctatgacttcgagaagttcaagttcaagctgcagaacaccagtgtgcagaaggagcactccaggatcccccggagccagatccagagagccaggccggtgaagatggccactctgctggtcacctactatggggaagagtacgccgtgcagctcaccctgcaggtcctgcgggccatcaaccagcgcctgctggccgaggagctccacagggcagccattcaggatatggggtcttgctatgttgcccaggttggtctcgaactcctgatctcaaacaatcctcccatctttgcctccgaaactgctgggattacaggaaggccaccagacacggctgcgagtccccgctgccacgcccaggaaggagacccagttgacggtacctgtgtgcgtgattcctgcagcttccccgaggcagtttctgggcacccccaggcctcaggcagccgctcacctggctgcccccggtgccaggactcccatgaaaggaagagcccgggaagcctaagcccccagcccctgccacagtgtaagcgccacctgaagcaggtccagctgctcttctgtgaggatcacgatgagcccatctgcctcatctgcagtctgagtcaggagcaccaaggccaccgggtgcgccccattgaggaggtcgccctggaacacaagaagaaaattcagaagcagctggagcatctgaagaagctgagaaaatcaggggaggagcagcgatcctatggggaggagaaggcagtgagctttctgaaacaaactgaagcgctgaagcagcgggtgcagaggaagctggagcaggtgtactacttcctggagcagcaagagcatttctttgtggcctcactggaggacgtgggccagatggttgggcagatcaggaaggcatatgacacccgcgtatcccaggacatcgccctgctcgatgcgctgattggggaactggaggccaaggagtgccagtcagaatgggaacttctgcaggacattggagacatcttgcacagggctaagacagtgcctgtccctgaaaagtggaccactcctcaagagataaaacaaaagatccaactcctccaccagaagtcagagtttgtggagaagagcacaaagtacttctcagaaaccctgcgttcagaaatggaaatgttcaatgttccggagctgattggcgctcaggcacatgctgttaatgtgattctggatgcagaaaccgcttaccccaacctcatcttctctgatgatctgaagagtgttagacttggaaacaagtgggagaggctgcctgatggcccgcaaagatttgacagctgtatcattgttctgggctctccgagtttcctctctggccgccgttactgggaggtggaggttggagacaagacagcatggatcctgggagcctgcaagacatccataagcaggaaagggaacatgactctgtcgccagagaatggctactgggtggtgataatgatgaaggaaaatgagtaccaggcgtccagcgttcccccgacccgcctgctaataaaggagcctcccaagcgtgtgggcatcttcgtggactacagagttggaagcatctccttttacaatgtgacagccagatcccacatctatacattcgccagctgctctttctctgggccccttcaacctatcttcagccctgggacacgtgatggagggaagaacacagctcctctgactatctgtccagtgggtggtcaggggcctgactgaatgcccaacactgcatctctcttcctgcttctggccttgtatcttgcattcacactcaatagtcacggaatgccgactaggtgctagctgctatgggaaatgcaaaaataacaaaatagttactgtgcccacggagcctacccgattatagcagaggtaagttaggaacgaacatgttagtcaatccgggtgaagacatgtactgatgacacaccatggatttcagaggaggaagtacggagtcgttgcataatccgcccctggtgggtggcactctcaggtgctcctgaacagaagatttggccctcattttccctcagaaccccacggcaaggatatatgtccccttgttctctctgcttctgtcttgaggatatgggaagcctagagaaacgcaagcagactggattgggatagaagtatttgtgtacctggattaatgaactatgattttttttttttttttttgagaccaaatcttgctctgtggcccaggctggagtgcagtggcacgatctcagctcactgcaacctccacctcccaggttcaagcgattctcctgcctcagcctcctgagcagctgggattacaggtgcgtgccaccacaccaggctggttttcttgtatttttagtagagacgggggtttcaccatgttagccaggctggtctcgaactcctgacctcaggtgatccacccgcctcagcctcccaaagtgctgggattacaggcatgagccactgtgcccggcctatgattcttttttttttttttttttgagacaaagttttgctcttgtcacccaggctggagtgcagtggtgcaatcttggctcgcaacctccgcctcccaggttcaagagattctcctgcctcagcctccgaagtagctgggattacaggcgcccgccaccatgcccggctaattttttgcatttttagtagacatgaggtttcatcatgttggccaggccggtctcaaactcctgacctcaggtgatgcacccacctcagcctcccaaagtgcagggattacaggcatgagccaccatgccgggccatgattcttaagagaattgactgggcctcatgaataaaaaaattagaaaatct

SEQ ID NO: 5300 - DNA, 1713 bp, Artificial Sequence
  derived and/or modified sequence
atggctaagacccctagtgaccatctgctgtccaccctggaggagctggtgccctatgacttcgagaagttcaagttcaagctgcagaacaccagtgtgcagaaggagcactccaggatcccccggagccagatccagagagccaggccggtgaagatggccactctgctggtcacctactatggggaagagtacgccgtgcagctcaccctgcaggtcctgcgggccatcaaccagcgcctgctggccgaggagctccacagggcagccattcagggaaggccaccagacacggctgcgagtccccgctgccacgcccaggaaggagacccagttgacggtacctgtgtgcgtgattcctgcagcttccccgaggcagtttctgggcacccccaggcctcaggcagccgctcacctggctgcccccggtgccaggactcccatgaaaggaagagcccgggaagcctaagcccccagcccctgccacagtgtaagcgccacctgaagcaggtccagctgctcttctgtgaggatcacgatgagcccatctgcctcatctgcagtctgagtcaggagcaccaaggccaccgggtgcgccccattgaggaggtcgccctggaacacaagaagaaaattcagaagcagctggagcatctgaagaagctgagaaaatcaggggaggagcagcgatcctatggggaggagaaggcagtgagctttctgaaacaaactgaagcgctgaagcagcgggtgcagaggaagctggagcaggtgtactacttcctggagcagcaagagcatttctttgtggcctcactggaggacgtgggccagatggttgggcagatcaggaaggcatatgacacccgcgtatcccaggacatcgccctgctcgatgcgctgattggggaactggaggccaaggagtgccagtcagaatgggaacttctgcaggacattggagacatcttgcacagggctaagacagtgcctgtccctgaaaagtggaccactcctcaagagataaaacaaaagatccaactcctccaccagaagtcagagtttgtggagaagagcacaaagtacttctcagaaaccctgcgttcagaaatggaaatgttcaatgttccggagctgattggcgctcaggcacatgctgttaatgtgattctggatgcagaaaccgcttaccccaacctcatcttctctgatgatctgaagagtgttagacttggaaacaagtgggagaggctgcctgatggcccgcaaagatttgacagctgtatcattgttctgggctctccgagtttcctctctggccgccgttactgggaggtggaggttggagacaagacagcatggatcctgggagcctgcaagacatccataagcaggaaagggaacatgactctgtcgccagagaatggctactgggtggtgataatgatgaaggaaaatgagtaccaggcgtccagcgttcccccgacccgcctgctaataaaggagcctcccaagcgtgtgggcatcttcgtggactacagagttggaagcatctccttttacaatgtgacagccagatcccacatctatacattcgccagctgctctttctctgggccccttcaacctatcttcagccctgggacacgtgatggagggaagaacacagctcctctgactatctgtccagtgggtggtcaggggcctgactga

SEQ ID NO: 5301 - DNA, 2984 bp, Artificial Sequence
  derived and/or modified sequence
gaagccagacagctggctcgagcctctcctgctcagcaccatggctaagacccctagtgaccatctgctgtccaccctggaggagctggtgccctatgacttcgagaagttcaagttcaagctgcagaacaccagtgtgcagaaggagcactccaggatcccccggagccagatccagagagccaggccggtgaagatggccactctgctggtcacctactatggggaagagtacgccgtgcagctcaccctgcaggtcctgcgggccatcaaccagcgcctgctggccgaggagctccacagggcagccattcagggaaggccaccagacacggctgcgagtccccgctgccacgcccaggaaggagacccagttgacggtacctgtgtgcgtgattcctgcagcttccccgaggcagtttctgggcacccccaggcctcaggcagccgctcacctggctgcccccggtgccaggactcccatgaaaggaagagcccgggaagcctaagcccccagcccctgccacagtgtaagcgccacctgaagcaggtccagctgctcttctgtgaggatcacgatgagcccatctgcctcatctgcagtctgagtcaggagcaccaaggccaccgggtgcgccccattgaggaggtcgccctggaacacaagaagaaaattcagaagcagctggagcatctgaagaagctgagaaaatcaggggaggagcagcgatcctatggggaggagaaggcagtgagctttctgaaacaaactgaagcgctgaagcagcgggtgcagaggaagctggagcaggtgtactacttcctggagcagcaagagcatttctttgtggcctcactggaggacgtgggccagatggttgggcagatcaggaaggcatatgacacccgcgtatcccaggacatcgccctgctcgatgcgctgattggggaactggaggccaaggagtgccagtcagaatgggaacttctgcaggacattggagacatcttgcacagggctaagacagtgcctgtccctgaaaagtggaccactcctcaagagataaaacaaaagatccaactcctccaccagaagtcagagtttgtggagaagagcacaaagtacttctcagaaaccctgcgttcagaaatggaaatgttcaatggtgagtccagcggtaatggtgtgtgctggcctggggttgttgcagtgttcccttgtgctgttgacttgaggggccctatttagaagacaaaaaaaaaaaccaaacacctggagcaaagttccggagctgattggcgctcaggcacatgctgttaatgtgattctggatgcagaaaccgcttaccccaacctcatcttctctgatgatctgaagagtgttagacttggaaacaagtgggagaggctgcctgatggcccgcaaagatttgacagctgtatcattgttctgggctctccgagtttcctctctggccgccgttactgggaggtggaggttggagacaagacagcatggatcctgggagcctgcaagacatccataagcaggaaagggaacatgactctgtcgccagagaatggctactgggtggtgataatgatgaaggaaaatgagtaccaggcgtccagcgttcccccgacccgcctgctaataaaggagcctcccaagcgtgtgggcatcttcgtggactacagagttggaagcatctccttttacaatgtgacagccagatcccacatctatacattcgccagctgctctttctctgggccccttcaacctatcttcagccctgggacacgtgatggagggaagaacacagctcctctgactatctgtccagtgggtggtcaggggcctgactgaatgcccaacactgcatctctcttcctgcttctggccttgtatcttgcattcacactcaatagtcacggaatgccgactaggtgctagctgctatgggaaatgcaaaaataacaaaatagttactgtgcccacggagcctacccgattatagcagaggtaagttaggaacgaacatgttagtcaatccgggtgaagacatgtactgatgacacaccatggatttcagaggaggaagtacggagtcgttgcataatccgcccctggtgggtggcactctcaggtgctcctgaacagaagatttggccctcattttccctcagaaccccacggcaaggatatatgtccccttgttctctctgcttctgtcttgaggatatgggaagcctagagaaacgcaagcagactggattgggatagaagtatttgtgtacctggattaatgaactatgattttttttttttttttttgagaccaaatcttgctctgtggcccaggctggagtgcagtggcacgatctcagctcactgcaacctccacctcccaggttcaagcgattctcctgcctcagcctcctgagcagctgggattacaggtgcgtgccaccacaccaggctggttttcttgtatttttagtagagacgggggtttcaccatgttagccaggctggtctcgaactcctgacctcaggtgatccacccgcctcagcctcccaaagtgctgggattacaggcatgagccactgtgcccggcctatgattcttttttttttttttttttgagacaaagttttgctcttgtcacccaggctggagtgcagtggtgcaatcttggctcgcaacctccgcctcccaggttcaagagattctcctgcctcagcctccgaagtagctgggattacaggcgcccgccaccatgcccggctaattttttgcatttttagtagacatgaggtttcatcatgttggccaggccggtctcaaactcctgacctcaggtgatgcacccacctcagcctcccaaagtgcagggattacaggcatgagccaccatgccgggccatgattcttaagagaattgactgggcctcatgaataaaaaaattagaaaatct

SEQ ID NO: 5302 - DNA, 2273 bp, Artificial Sequence
  derived and/or modified sequence
agacagctggctcgagcctctcctgctcagcaccatggctaagacccctagtgaccatctgctgtccaccctggaggagctggtgccctatgacttcgagaagttcaagttcaagctgcagaacaccagtgtgcagaaggagcactccaggatcccccggagccagatccagagagccaggccggtgaagatggccactctgctggtcacctactatggggaagagtacgccgtgcagctcaccctgcaggtcctgcgggccatcaaccagcgcctgctggccgaggagctccacagggcagccattcaggaatattccacacaagaaaacggcacagatgattccgcagcgtccagctccctgggggagaacaagcccaggagcctgaagactccagaccaccccgaggggaacgaggggaacggccctcggccgtacgggggcggagctgccagcctgcggtgcagccagcccgaggccgggagggggctgtcgaggaagcccctgagcaaacgcagagagaaggcctcggagggcctggacgcgcagggcaagcctcggacccggagcccggccctgccgggcgggagaagccccggcccctgcagggcgctagaggggggccaggccgaggtccggctgcgcagaaacgccagctccgcggggaggctgcaggggctggcggggggcgccccggggcagaaggagtgcaggcccttcgaagtgtacctgccctcgggaaagatgcgacctagaagccttgaggtcaccatttctacaggggagaaggcgcccgcaaatccagaaattctcctgactctagaggaaaagacagctgcgaatctggactcggcaacagaaccccgggcaaggcccactccggatggaggggcatctgcggacctgaaggaaggccctggaaatccagaacattcggtcaccggaaggccaccagacacggctgcgagtccccgctgccacgcccaggaaggagacccagttgacggtacctgtgtgcgtgattcctgcagcttccccgaggcagtttctgggcacccccaggcctcaggcagccgctcacctggctgcccccggtgccaggactcccatgaaaggaagagcccgggaagcctaagcccccagcccctgccacagtgtaagcgccacctgaagcaggtccagctgctcttctgtgaggatcacgatgagcccatctgcctcatctgcagtctgagtcaggagcaccaaggccaccgggtgcgccccattgaggaggtcgccctggaacacaagaagaaaattcagaagcagctggagcatctgaagaagctgagaaaatcaggggaggagcagcgatcctatggggaggagaaggcagtgagctttctgaaacaaactgaagcgctgaagcagcgggtgcagaggaagctggagcaggtgtactacttcctggagcagcaagagcatttctttgtggcctcactggaggacgtgggccagatggttgggcagatcaggaaggcatatgacacccgcgtatcccaggacatcgccctgctcgatgcgctgattggggaactggaggccaaggagtgccagtcagaatgggaacttctgcaggacattggagacatcttgcacagggctaagacagtgcctgtccctgaaaagtggaccactcctcaagagataaaacaaaagatccaactcctccaccagaagtcagagtttgtggagaagagcacaaagtacttctcagaaaccctgcgttcagaaatggaaatgttcaatgttccggagctgattggcgctcaggcacatgctgttaatgtgattctggatgcagaaaccgcttaccccaacctcatcttctctgatgatctgaagagtgttagacttggaaacaagtgggagaggctgcctgatggcccgcaaagatttgacagctgtatcattgttctgggctctccgagtttcctctctggccgccgttactgggaggtggaggttggagacaagagattctcctgcctcagcctccgaagtagctgggattacaggcgcccgccaccatgcccggctaattttttgcatttttagtagacatgaggtttcatcatgttggccaggccggtctcaaactcctgacctcaggtgatgcacccacctcagcctcccaaagtgcagggattacaggcatgagccaccatgccgggccatgattcttaagagaattgactgggcctcatgaataaaaaaattagaaaatctg

SEQ ID NO: 5303 - DNA, 2346 bp, Artificial Sequence
  derived and/or modified sequence
atggccaagacccccagcgaccacctgctgagcaccctggaggagttggttccctacgatttcgaaaaattcaaattcaaactacagaacacgagcgtgcaaaaggagcattcgcggataccacggtctcaaatacagcgtgcgcgtcctgtcaagatggctactctgctggtaacttactacggggaggaatatgccgtacagctcaccctccaggtccttcgggcaatcaatcaaagactattggctgaggagctgcaccgagcagcaatccaggaatatagtacccaggagaatggaaccgatgactctgcagcgtcctcctccctgggggaaaataagccaagaagtctgaagacaccggaccatccagagggaaatgagggaaatggcccaaggccgtatggcgggggcgcagcttctctgagatgcagtcagcccgaggctggccggggcctttctaggaagcccctgtccaaaagacgggaaaaagcatccgagggcttagatgctcaaggcaaaccaaggaccagaagcccagccctgcctggcgggagatctccaggaccctgcagagcactggagggtggacaggctgaggtccggctgaggcgaaacgccagcagtgctggacggttgcaaggcctggctggcggggcgcccggccagaaagaatgtcgcccattcgaagtatacctgccctcaggcaaaatgagaccccgctcgctggaggtgaccatctccaccggagagaaggcccccgcaaatccagaaattctccttactctggaggagaagaccgccgctaacttagacagcgccaccgagccccgagctagacctacgcccgacgggggagcctccgctgatctgaaggagggacccgggaatcctgagcactctgttacaggacggcctcccgacacggcagcgagtccgcgctgtcatgcgcaagagggtgaccccgtcgatggaacatgcgtgcgggattcttgctcttttccggaagcggtaagcggtcacccccaggctagcggctctaggagtccaggttgccccaggtgtcaagactcacacgagcggaaatctcccggatcactgtccccccagcccttaccacagtgcaagcggcatttgaagcaggtgcagctactcttctgcgaagaccatgatgagcctatatgcctgatatgttcactaagtcaagaacatcaggggcatagagtgaggcccatcgaggaagtggctctcgagcataagaagaagattcagaaacagctcgagcacctgaaaaaactgagaaaaagcggcgaggaacagaggagctacggcgaggagaaagcagtgtcatttctgaagcagaccgaagcactcaagcagcgggtacaaagaaaactggagcaagtctactactttctcgaacagcaggaacatttttttgttgcctccttggaagacgtgggacaaatggtcggacaaatcaggaaggcttacgatactcgggtatcccaggacatcgctctccttgacgctctgatcggggagctggaggctaaggagtgccagtccgaatgggagctgctgcaggacatcggggacatcctgcaccgtgccaaaactgtgcctgtgccagaaaaatggacaaccccccaggaaataaagcaaaaaattcagctgttgcaccagaagagtgagttcgtggagaagagtacaaagtacttctccgagacactgcggtccgagatggagatgtttaacgttcctgaacttattggcgcccaggcccacgccgtgaatgtaatcctggacgcggaaaccgcgtacccgaatctgattttctctgatgatcttaagagtgttcgcctaggcaacaaatgggaacgcttgcccgacggcccccaaagattcgattcatgtatcattgttttaggctccccgagttttctgagcggcaggaggtattgggaagttgaggttggtgacaagaccgcatggatcctgggagcctgtaaaacaagcatttcccgcaagggtaacatgacactcagcccagaaaatggatactgggttgttatcatgatgaaagagaacgaatatcaggcttcttctgtgccccccacacgcctgcttataaaggaaccccccaaaagagtcggtattttcgtagactatcgagtcggaagcatttcattttacaatgttacagctagaagccacatctacacatttgcctcatgtagcttttctggtccattgcagcctattttctcccctggcacccgtgatggcgggaagaacaccgcccctctcactatttgtcccgtaggtggccaaggaccggattag

SEQ ID NO: 5304 - DNA, 1806 bp, Artificial Sequence
  derived and/or modified sequence
atggccaagacccccagcgaccacctgctgagcaccctggaggagctcgtaccgtatgactttgagaagtttaaatttaaactccagaacacctccgtccaaaaggagcacagccgtatcccacgcagccagatacagagggcccggcccgtgaaaatggctactctgcttgtcacttactacggggaggagtacgccgtacagttaacccttcaggtgttaagggctattaaccagcgtttgctagcagaagagctacaccgggccgctatccaggacatggggtcctgttacgtggcgcaggtcggtcttgaactcttaattagtaacaacccccccatcttcgccagtgagactgccggcattacaggtcgccctccagacaccgcagcttctcccagatgccacgcccaggagggggaccccgttgatggtacttgtgtgcgggattcctgctcttttcctgaagccgtcagcgggcatccccaggccagcggctctcgctctcccgggtgtccacgatgtcaggactctcacgagcggaaaagccctggctctctctccccccagccattaccccaatgcaagcgacatctgaaacaagttcagctgttattttgcgaggaccatgacgaacccatttgcttgatctgcagtttgagccaagaacaccaaggtcatagggtgcgtccaatcgaggaagtagccttggaacacaagaagaagatccagaagcagttggaacatctcaagaaactgagaaaatccggcgaagaacagcgtagctacggggaggaaaaagccgtcagtttcctcaaacaaaccgaagcgctgaagcaaagggtgcagcgaaaactcgaacaggtttactactttttggaacaacaggaacattttttcgtggcctcgctcgaggatgtcggtcagatggtcggtcaaatccgcaaagcctatgacacccgcgtttcccaggatattgccctcctggatgctctgattggggaactagaagccaaggaatgtcagagcgagtgggagttgctacaggacattggagatattctgcatcgggccaaaacagtgcccgtacccgagaaatggacaacgcctcaagagattaaacagaagatccagctgctgcaccagaagtccgaatttgtcgagaaatcaactaagtatttctccgaaacactccgctctgagatggagatgtttaatgtgcctgaattgatcggggcccaggcccatgccgtaaacgtgatactggacgccgagaccgcataccccaacttaatctttagtgatgatttaaagtccgtgcggctaggaaacaagtgggaaagactgcctgacggtcctcaacgcttcgatagctgtattattgtgctgggctcccccagtttcctgtcgggccgacggtattgggaggttgaggtgggcgataagactgcatggatattaggtgcctgtaaaacctccatcagccggaaaggtaacatgaccctatcacctgaaaatggctactgggtggtcatcatgatgaaggaaaacgagtaccaagcgtcgagtgtgccacccacccgtcttctgatcaaggaacctcctaaacgggtgggaatcttcgtcgactacagggtggggagtatctccttctacaacgtcaccgccagaagccacatctacacctttgccagctgttctttctctgggcctttacagccaatattttcccccgggacacgggatgggggaaaaaatactgctccgctcactatatgtcccgtgggagggcagggacccgactag

SEQ ID NO: 5305 - DNA, 1713 bp, Artificial Sequence
  derived and/or modified sequence
atggccaagacccccagcgaccacctgctgagcaccctggaggagctggtgccctatgacttcgagaagtttaaatttaagctgcagaacacatctgtgcagaaagagcattctagaataccacgttctcaaatacaaagggccaggcccgtcaaaatggctacccttctggtgacatactatggagaagaatacgccgttcaacttacgcttcaggtcttgagggccattaaccaaagactgctggccgaggagctgcacagagccgctattcaagggaggcccccggataccgccgccagccctcgctgccacgctcaagaaggggaccctgtcgacgggacctgtgtgcgagattcttgctcatttccagaggcagtttctggccaccctcaggcctctgggtctcggtcccccgggtgtcctagatgccaagacagccacgagagaaagtctccaggttccctctccccccagcccctgcctcagtgcaaacgacacctgaaacaggttcagttgcttttctgcgaagatcatgatgagccaatttgtttgatatgttcattatcacaggagcatcaaggccacagagtgcgaccaatcgaagaagtggcactggaacataagaagaagatccaaaaacagctcgagcatctaaaaaaactgagaaagagcggcgaagaacagcgtagttatggcgaagaaaaggccgtctcatttctcaaacaaacagaagctctcaaacagcgcgtacaaaggaaactagagcaggtctattactttttagagcagcaggaacatttttttgtggcgtccctggaggacgtcggacagatggtaggccaaattcggaaggcttacgacactcgtgtttcccaggacattgccctgttagatgcattgatcggggaactcgaggctaaggagtgtcaaagcgagtgggagctgctgcaggatattggggacatccttcaccgcgccaagacggtgcctgttcctgaaaaatggacaacaccccaggaaattaagcagaagattcagctgctccaccagaaaagtgaattcgttgagaagtccactaaatacttcagcgaaaccctccggtccgagatggagatgttcaacgtgccagaactgattggggcacaagcacatgctgtaaatgtgatcctagatgctgagaccgcttatccaaacttgattttctccgacgatcttaagagtgtaagacttggaaacaagtgggagcggttgccagatggacctcaaagattcgacagctgcatcattgtacttggcagcccctctttcctgtctggtcggcgctactgggaggtggaagtcggagataaaaccgcttggatactgggggcttgcaagacaagcataagtagaaaaggaaacatgaccctgagccccgagaacgggtactgggtcgtaataatgatgaaagagaatgagtaccaggccagctctgtaccgcctactaggttacttatcaaagaaccccctaaacgcgttggcattttcgttgactatcgggtgggatcaatcagcttttataatgtgacagcccggagccatatttacacgtttgcctcctgtagctttagcggccctttgcagcccattttctccccaggaacaagggacggcggtaaaaacacggccccactcacgatttgccccgtgggcggtcagggcccagactag

SEQ ID NO: 5306 - DNA, 2067 bp, Artificial Sequence
  derived and/or modified sequence
atggccaagacccccagcgaccacctgctgagcaccctggaggagctggtcccctacgattttgagaaatttaaatttaagcttcagaacacatccgtgcagaaagaacattctcgtattcccagaagccaaatccagcgggcccggcctgtgaagatggccacactgctggtcacttactacggagaggaatacgcggttcaactgactctgcaagtactgcgagccattaaccagcggctgctggccgaggagttgcaccgggcggcgatccaagagtattctactcaagagaacgggactgatgactcagccgcaagcagtagccttggggaaaacaagccccgatccctgaaaacacctgatcaccccgagggaaacgaaggaaatggcccacggccatacggcggaggggctgccagcttaagatgctctcagcccgaggcaggccgcgggctttcccgaaagccactgagcaagcgtcgggagaaagcatccgagggcttggacgcgcaggggaagcctcgtactcggtcacccgcgctgcccggagggagatcgcctggtccttgccgtgccctggagggaggacaggctgaggttagactgaggcgcaatgcctccagcgccggaagactgcagggcctcgccggcggagcacccgggcagaaggagtgtaggcctttcgaggtttacttaccctccggcaagatgcgtcccagaagcctggaggtgactatcagcactggggagaaggcgccagccaaccctgaaatcctgttaacccttgaggaaaagaccgccgctaatttggattccgctacagaacctagagcccgccccacaccagacggtggtgctagcgcagacctcaaagaagggcctggcaaccccgagcactccgtcacaggccgcccccccgacactgccgcttcacctaggtgccacgcacaagagggcgatcctgtggacggcacctgcgtgcgcgacagttgctcctttcccgaggctgtgtcaggtcacccacaagccagtggctcaagaagcccaggctgcccacggtgccaggacagccacgagagaaaaagtccaggcagtctgtctccccaacctctgccgcagtgtaagagacacctgaaacaggtgcagctgcttttttgtgaggaccatgacgaaccgatctgtttaatctgttcactgagccaggagcaccagggccaccgtgtgcgccctatcgaagaagtggcattggaacataaaaaaaaaatacaaaaacagctggaacacctcaagaagctgaggaagagtggggaggagcagagatcttacggcgaagagaaagcagttagctttctcaagcagaccgaggctctgaagcagagagtccagagaaaattagagcaagtgtattatttcctcgaacagcaggagcatttctttgtggcaagcctggaagatgtcggacagatggtaggccagattaggaaggcatatgatacacgggtcagccaagatatcgccctgctggacgcccttattggtgaactggaggcaaaggaatgtcagtcagagtgggaactcctgcaggatatcggcgacatcctgcatcgggcaaaaacagtaccagtgccagagaagtggaccactccccaggagattaaacaaaagatccagctcctgcatcagaagtcggagttcgtggagaagtcaactaagtatttcagcgaaactctaaggagtgaaatggagatgtttaacgttcccgaactgattggggcacaggcacacgctgtgaatgtgatcctcgatgcggaaacagcctacccgaatttgatctttagcgacgaccttaagagtgtccggctggggaacaaatgggagaggttgccagatgggccccagcggttcgacagttgtatcattgtgctgggctcccccagtttcctttccgggcgacgatattgggaagtagaggtgggcgataagcgattctcctgcctcagccttcgttctagctgggattatcggcgaccacccccctgtccggccaacttcctgcacttctag

SEQ ID NO: 5307 - DNA, 2346 bp, Artificial Sequence
  derived and/or modified sequence
atggccaagacgccttccgatcatctcctgtccactctggaggaactcgtgccctacgactttgaaaagtttaaatttaaactgcaaaatacctcagtgcagaaagaacacagccgcatacccaggtcacagattcagagggccaggccagtgaagatggccaccctgctcgtgacgtactatggtgaggagtatgctgttcaactgactctccaagtccttagagccattaatcagcggctactggctgaggagctgcacagggcggctatccaggagtatagtacacaggagaacggcaccgatgatagcgccgcaagctcatctctcggtgaaaacaagccgagatcactcaaaacacctgatcaccccgaggggaacgagggtaacggtccaagaccctacggcggtggagccgcatctttaaggtgttcccagccagaggcgggacgaggactttccaggaaacccctgtctaagaggagagagaaagcctcagagggccttgatgcccaggggaagccacgcacacgatctcctgcgcttccaggcggtaggagtcctggcccttgccgggctctggaagggggacaggccgaggtgaggctgcgacggaacgcaagttcggctgggaggctgcaggggctggctggcggagccccaggtcagaaggaatgtcgtcccttcgaggtctacctcccttccgggaagatgaggcccagatctctcgaagtaaccatctctaccggcgaaaaggctcccgctaaccccgagatcttgcttaccctggaggaaaagaccgcagccaatttggattcggctaccgagccacgcgcacgccctactcctgacggtggagcgtccgctgacctgaaagaaggccctggcaaccctgagcatagcgtgacagggaggcccccagataccgctgctagtcccagatgtcatgctcaggaaggggaccccgttgatgggacctgcgtccgggactcatgcagtttccccgaggccgtgagcggacacccccaggcatccggttctcgttctcccggttgcccccgatgtcaggactcgcacgagcgcaaatcacccggttccctgagcccccagcctcttccgcaatgcaagcgccacctaaaacaagtccagctgctcttctgcgaggaccacgacgagcccatatgcctcatctgtagcctgagccaggagcaccaaggccatagagtgcggccaattgaagaagtagcccttgagcataaaaaaaagatccagaaacaattggaacacctaaagaagctcagaaagtccggggaggagcaacgtagctacggagaggagaaggccgtatcctttctgaaacaaaccgaggcactgaaacagcgggtacagaggaaattggagcaagtctattactttcttgaacagcaggagcactttttcgtggcctcattggaggatgtgggtcaaatggtggggcagatcaggaaagcatatgatacccgtgtcagccaggatatagcactgttggacgctttaatcggagagctcgaggcaaaggagtgccaaagtgaatgggagcttctgcaggatattggcgatatactgcatagagcaaagaccgtgccagtaccggagaaatggacaaccccacaggagattaagcagaagattcagttgctgcaccagaagtcagaattcgtagaaaaatctactaaatacttttccgagacgctgcgaagcgaaatggaaatgtttaacgttcctgaattgataggagcacaggcacacgcggtgaacgtcattctggacgcggaaacagcttatcccaacctgatcttttcagatgatctaaagtctgtgcgcctgggaaataaatgggagcgcctgccggatggtcctcaaaggttcgatagctgcattattgtcctgggaagccctagcttcttgtctggtaggcgttactgggaagtcgaggtcggtgataaaactgcttggatcctgggggcatgcaaaacttctataagcaggaagggtaacatgaccctgtccccagaaaatggctattgggttgttattatgatgaaggagaatgaatatcaggcatccagtgtaccccctacccgactcctgatcaaagagccccctaagcgtgtgggtatattcgtggactatcgggtcggcagcataagcttttataacgtgactgcccgttcccacatctacacatttgccagctgttcatttagtggacctctgcaacctatcttcagcccgggaaccagggacggcggtaagaataccgcgcctctcactatctgcccggtcggcggtcaaggcccagattag

SEQ ID NO: 5308 - DNA, 1806 bp, Artificial Sequence
  derived and/or modified sequence
atggctaagacaccctccgatcacctattgtctactctggaagagcttgttccctatgattttgagaaatttaaatttaagctccaaaataccagcgtgcagaaagaacacagccgcatcccacgaagtcagattcagcgggctcgccctgttaaaatggcgactctactggttacctactacggggaagaatacgccgtgcagctcaccctccaggtgctgagagccataaatcagcggcttctcgctgaagagctgcacagagccgcaatccaggacatgggttcttgttacgtagctcaggtagggcttgaactcctgatctctaacaatccacccattttcgcctccgagacggcgggtatcactggtcgccctccagacaccgcggcttccccaagatgccatgcccaggagggtgatccggtggacgggacatgcgtgagagactcttgctcattccctgaggctgtgtctgggcatcctcaggcgagtggttcacgttctccgggttgtccaaggtgtcaggacagccacgagagaaaaagcccaggctcactctcaccccaaccgcttccacagtgcaaacgacatttgaagcaggtccaactgctgttctgtgaggaccacgatgagccgatttgcttgatttgctctctatcccaggagcaccagggacaccgtgtgcgtccaatcgaggaggtggcactcgaacacaaaaagaaaatccaaaaacaactcgaacacttgaagaaactgagaaagagcggagaagagcaacggagttatggcgaggagaaggcggtgagtttcctgaagcagacggaggcactaaaacagcgtgttcagagaaaactggagcaggtctactacttcctggaacaacaggagcacttcttcgtggctagcctggaagatgttggtcagatggtgggccagattcgcaaagcctacgataccagagtgagtcaggacatcgccttgcttgatgccctgatcggggagctcgaggctaaagaatgtcagagtgagtgggagctgctccaggacatcggcgatattctccatagagcgaaaacagttccagtccctgaaaaatggactacccctcaagagattaagcagaagattcagctactacatcagaagtcagaattcgtcgagaagtccaccaaatatttctccgagacgctgaggagtgagatggaaatgtttaacgtaccggagctgatcggggctcaggcccacgcagtcaacgtcattctcgatgctgagacagcctaccccaatctgattttttccgacgacttaaagagcgtcaggctaggtaacaaatgggagcgccttcccgacggtccccagcgcttcgactcatgtattattgtcctgggcagccccagtttcctgtccggaaggcggtattgggaagtggaagttggcgataagaccgcctggatcctaggcgcttgcaaaactagcatcagtaggaaggggaatatgacgctgagtcccgaaaatggctactgggtggtgattatgatgaaagagaatgagtaccaagccagctcagtgcccccaacacggttactgattaaggagcctcccaaacgcgtggggatttttgtggattatcgcgtgggaagcatctccttctacaatgtgactgcgaggagccacatatataccttcgcatcttgctctttttccggtccattgcagcccattttttcaccagggactcgggacggaggcaagaacactgcgcctctcactatttgcccagtgggcggtcagggacccgattag

SEQ ID NO: 5309 - DNA, 1713 bp, Artificial Sequence
  derived and/or modified sequence
atggctaagaccccttccgaccatctgctttctactttagaagagttagtgccatacgatttcgagaagttcaagttcaaacttcaaaatacatcggtccagaaggaacatagtcgcattccacgcagccagattcaaagagccagacccgtcaagatggctacattgctcgtcacatactatggcgaggagtatgcagtgcaattgactctccaagtcctccgtgccatcaaccagaggttgttagctgaggaactgcacagggccgctattcagggacggcctccagatactgccgcttccccccgttgccacgcgcaggagggcgatcccgtggacggaacatgtgtcagagattcttgttctttccctgaagcagtttccggtcacccccaagcgtccggcagccgctcaccaggctgtccacggtgtcaagactctcatgagcgcaagagtcctgggagtctttcccctcagcccctcccccaatgtaagcgtcacctgaaacaggttcagctcctcttctgcgaagaccacgatgaacctatttgtttgatctgctctctgtctcaggagcaccagggccatagggtcagacctattgaagaagtggctctggaacacaaaaagaaaatccagaaacagctggagcacctgaagaagctgagaaagtcaggtgaggagcaacgcagctacggggaggaaaaagctgtcagctttcttaaacagaccgaggcgctgaagcagcgcgtccagagaaagctggaacaggtgtactatttcctggagcaacaggagcacttctttgtcgcgagcctggaggacgttggacagatggtgggtcaaatcaggaaggcctatgatacacgagtatcacaagacattgcactgcttgacgcactgattggtgagctggaggctaaagagtgtcaaagtgagtgggagctcctccaagacatcggagatattttgcaccgcgcaaagactgtacccgtacccgagaagtggaccaccccacaagagattaagcagaagattcagttactgcatcagaaatccgagttcgtggagaaatccacgaaatacttctccgaaacccttcggtctgagatggagatgttcaacgtgcctgagctcatcggtgcccaggcccatgccgtcaacgtgatacttgacgcagaaacggcttatcccaatctaatttttagtgatgacctgaaatccgtgaggttggggaacaagtgggagagacttcctgatggcccacagaggtttgactcctgcatcatcgtgcttggttctccctccttcctgtccggcagaaggtactgggaggtcgaggtcggagacaaaaccgcctggatattgggcgcatgtaaaacgtccatttcaaggaagggcaatatgacactatctcctgaaaacggttattgggtggtcattatgatgaaagagaacgagtaccaggcgtcttcagtcccgccaacaaggttgctgatcaaggaaccccctaagcgtgtcggcattttcgtcgattaccgcgttggctcgattagcttctacaacgtgactgccaggtctcatatctatacctttgcttcttgttcatttagcggtcctctgcaaccaatcttctctccaggaacacgagacggtggcaaaaacacagctccgctgacaatttgtcccgtgggcggacagggccctgactag

SEQ ID NO: 5310 - DNA, 2067 bp, Artificial Sequence
  derived and/or modified sequence
atggccaagacgcctagcgatcaccttctatccacattggaggagctggttccatatgattttgagaaattcaaattcaaactgcagaatactagtgttcagaaggagcatagccgcattccccgaagccagatccagcgagcaagacccgttaaaatggccactctgttggtcacttactacggcgaggagtacgcggtgcagctgacactgcaagtactaagagctataaaccagaggttgcttgccgaggagctccaccgcgctgctatccaggagtattcgactcaagagaacgggactgatgatagtgccgctagtagctcactgggagagaacaaacctaggagccttaagactccggaccatccagagggcaacgaaggaaacggccctcgcccttacggagggggtgccgcatccctccgctgcagccagccagaggccggtagggggctttcacgcaaaccattgtccaagcggagggaaaaagcgtcagaaggcctggatgcccagggcaagcccaggacacgctctccagcgttgccgggaggcagatctcctggcccatgccgtgcccttgagggaggacaggcagaggtaagactgaggcggaacgctagtagcgctggtcgcttgcaaggcttagctgggggagctccgggtcagaaggagtgtagacccttcgaggtctacttgcctagcggtaagatgcgcccaagatctttagaggtgacaatctctaccggcgaaaaggctcccgcaaacccagaaattctcctgacacttgaggagaagactgcagcgaatctggattcagccactgagcctagagcccgtccaacccctgacggaggggcttctgcggatctgaaagagggacccggtaaccctgaacactccgtgacaggaagaccaccagacacggccgcaagcccacgctgccacgctcaggaaggggaccctgtcgacggtacttgcgtacgggactcgtgtagctttcctgaagctgtgtctggtcaccctcaggcttctggcagcagatctcccggatgtccacgttgccaggacagccacgagcggaagtctcctggatctctgagcccgcagccactcccccagtgtaaaaggcacctcaagcaggtacagctgctgttctgcgaagatcacgacgaaccaatttgcctgatctgctccctctctcaggagcatcaggggcaccgcgtgagacctatcgaggaggtcgctctcgagcacaaaaagaagatccagaagcagctcgagcacctgaagaagctcagaaagtctggagaggaacagaggagttatggggaggagaaagcagtttcctttttgaagcagaccgaggctctgaagcaacgcgtgcagcgcaaactcgaacaagtctactactttttagagcaacaggaacatttctttgtggcctctcttgaagatgtcggacagatggttgggcagatcaggaaagcttatgacacaagggtgtcccaagacatcgccctactagacgcgctgatcggcgaactggaagcaaaggagtgccaatccgaatgggagcttctgcaagatattggcgacatactccatagagccaagactgtgcctgtccccgaaaagtggacaacaccccaggaaatcaaacagaaaatccagctgctccaccagaaatctgagttcgtcgaaaagtcaacaaaatacttcagtgaaacactgagatccgagatggaaatgtttaatgtgcccgagcttatcggggcacaagcccacgcagtaaatgtgatactggacgctgaaacagcctatccgaacctgatttttagcgacgatctcaagtccgtgaggctaggcaacaagtgggaaaggctccctgatggtcctcaacgcttcgacagctgtattatcgtgctcggaagcccaagttttctgtcaggcagaagatattgggaggtcgaggtgggtgacaaacgcttcagctgtctgtcacttcggtcgtcatgggattacagaagaccacctccctgcccagcaaattttctccatttttag

SEQ ID NO: 5311 - DNA, 2346 bp, Artificial Sequence
  derived and/or modified sequence
atggccaagacccccagcgaccacctgctgagcaccctggaggagctggtgccctacgacttcgagaagttcaagttcaagctgcagaacaccagcgtgcagaaggagcacagcagaatccccagaagccagatccagagagccagacccgtgaagatggccaccctgctggtgacctactacggcgaggagtacgccgtgcagctgaccctgcaggtgctgagagccatcaaccagagactgctggccgaggagctgcacagagccgccatccaggagtacagcacccaggagaacggcaccgacgacagcgccgccagcagcagcctgggcgagaacaagcccagaagcctgaagacccccgaccaccccgagggcaacgagggcaacggccccagaccctacggcggcggcgccgccagcctgagatgcagccagcccgaggccggcagaggcctgagcagaaagcccctgagcaagagaagagagaaggccagcgagggcctggacgcccagggcaagcccagaaccagaagccccgccctgcccggcggcagaagccccggcccctgcagagccctggagggcggccaggccgaggtgagactgagaagaaacgccagcagcgccggcagactgcagggcctggccggcggcgcccccggccagaaggagtgcagacccttcgaggtgtacctgcccagcggcaagatgagacccagaagcctggaggtgaccatcagcaccggcgagaaggcccccgccaaccccgagatcctgctgaccctggaggagaagaccgccgccaacctggacagcgccaccgagcccagagccagacccacccccgacggcggcgccagcgccgacctgaaggagggccccggcaaccccgagcacagcgtgaccggcagaccccccgacaccgccgccagccccagatgccacgcccaggagggcgaccccgtggacggcacctgcgtgagagacagctgcagcttccccgaggccgtgagcggccacccccaggccagcggcagcagaagccccggctgccccagatgccaggacagccacgagagaaagagccccggcagcctgagcccccagcccctgccccagtgcaagagacacctgaagcaggtgcagctgctgttctgcgaggaccacgacgagcccatctgcctgatctgcagcctgagccaggagcaccagggccacagagtgagacccatcgaggaggtggccctggagcacaagaagaagatccagaagcagctggagcacctgaagaagctgagaaagagcggcgaggagcagagaagctacggcgaggagaaggccgtgagcttcctgaagcagaccgaggccctgaagcagagagtgcagagaaagctggagcaggtgtactacttcctggagcagcaggagcacttcttcgtggccagcctggaggacgtgggccagatggtgggccagatcagaaaggcctacgacaccagagtgagccaggacatcgccctgctggacgccctgatcggcgagctggaggccaaggagtgccagagcgagtgggagctgctgcaggacatcggcgacatcctgcacagagccaagaccgtgcccgtgcccgagaagtggaccaccccccaggagatcaagcagaagatccagctgctgcaccagaagagcgagttcgtggagaagagcaccaagtacttcagcgagaccctgagaagcgagatggagatgttcaacgtgcccgagctgatcggcgcccaggcccacgccgtgaacgtgatcctggacgccgagaccgcctaccccaacctgatcttcagcgacgacctgaagagcgtgagactgggcaacaagtgggagagactgcccgacggcccccagagattcgacagctgcatcatcgtgctgggcagccccagcttcctgagcggcagaagatactgggaggtggaggtgggcgacaagaccgcctggatcctgggcgcctgcaagaccagcatcagcagaaagggcaacatgaccctgagccccgagaacggctactgggtggtgatcatgatgaaggagaacgagtaccaggccagcagcgtgccccccaccagactgctgatcaaggagccccccaagagagtgggcatcttcgtggactacagagtgggcagcatcagcttctacaacgtgaccgccagaagccacatctacaccttcgccagctgcagcttcagcggccccctgcagcccatcttcagccccggcaccagagacggcggcaagaacaccgcccccctgaccatctgccccgtgggcggccagggccccgactag

SEQ ID NO: 5312 - DNA, 1806 bp, Artificial Sequence
  derived and/or modified sequence
atggccaagacccccagcgaccacctgctgagcaccctggaggagctggtgccctacgacttcgagaagttcaagttcaagctgcagaacaccagcgtgcagaaggagcacagcagaatccccagaagccagatccagagagccagacccgtgaagatggccaccctgctggtgacctactacggcgaggagtacgccgtgcagctgaccctgcaggtgctgagagccatcaaccagagactgctggccgaggagctgcacagagccgccatccaggacatgggcagctgctacgtggcccaggtgggcctggagctgctgatcagcaacaacccccccatcttcgccagcgagaccgccggcatcaccggcagaccccccgacaccgccgccagccccagatgccacgcccaggagggcgaccccgtggacggcacctgcgtgagagacagctgcagcttccccgaggccgtgagcggccacccccaggccagcggcagcagaagccccggctgccccagatgccaggacagccacgagagaaagagccccggcagcctgagcccccagcccctgccccagtgcaagagacacctgaagcaggtgcagctgctgttctgcgaggaccacgacgagcccatctgcctgatctgcagcctgagccaggagcaccagggccacagagtgagacccatcgaggaggtggccctggagcacaagaagaagatccagaagcagctggagcacctgaagaagctgagaaagagcggcgaggagcagagaagctacggcgaggagaaggccgtgagcttcctgaagcagaccgaggccctgaagcagagagtgcagagaaagctggagcaggtgtactacttcctggagcagcaggagcacttcttcgtggccagcctggaggacgtgggccagatggtgggccagatcagaaaggcctacgacaccagagtgagccaggacatcgccctgctggacgccctgatcggcgagctggaggccaaggagtgccagagcgagtgggagctgctgcaggacatcggcgacatcctgcacagagccaagaccgtgcccgtgcccgagaagtggaccaccccccaggagatcaagcagaagatccagctgctgcaccagaagagcgagttcgtggagaagagcaccaagtacttcagcgagaccctgagaagcgagatggagatgttcaacgtgcccgagctgatcggcgcccaggcccacgccgtgaacgtgatcctggacgccgagaccgcctaccccaacctgatcttcagcgacgacctgaagagcgtgagactgggcaacaagtgggagagactgcccgacggcccccagagattcgacagctgcatcatcgtgctgggcagccccagcttcctgagcggcagaagatactgggaggtggaggtgggcgacaagaccgcctggatcctgggcgcctgcaagaccagcatcagcagaaagggcaacatgaccctgagccccgagaacggctactgggtggtgatcatgatgaaggagaacgagtaccaggccagcagcgtgccccccaccagactgctgatcaaggagccccccaagagagtgggcatcttcgtggactacagagtgggcagcatcagcttctacaacgtgaccgccagaagccacatctacaccttcgccagctgcagcttcagcggccccctgcagcccatcttcagccccggcaccagagacggcggcaagaacaccgcccccctgaccatctgccccgtgggcggccagggccccgactag

SEQ ID NO: 5313 - DNA, 1713 bp, Artificial Sequence
  derived and/or modified sequence
atggccaagacccccagcgaccacctgctgagcaccctggaggagctggtgccctacgacttcgagaagttcaagttcaagctgcagaacaccagcgtgcagaaggagcacagcagaatccccagaagccagatccagagagccagacccgtgaagatggccaccctgctggtgacctactacggcgaggagtacgccgtgcagctgaccctgcaggtgctgagagccatcaaccagagactgctggccgaggagctgcacagagccgccatccagggcagaccccccgacaccgccgccagccccagatgccacgcccaggagggcgaccccgtggacggcacctgcgtgagagacagctgcagcttccccgaggccgtgagcggccacccccaggccagcggcagcagaagccccggctgccccagatgccaggacagccacgagagaaagagccccggcagcctgagcccccagcccctgccccagtgcaagagacacctgaagcaggtgcagctgctgttctgcgaggaccacgacgagcccatctgcctgatctgcagcctgagccaggagcaccagggccacagagtgagacccatcgaggaggtggccctggagcacaagaagaagatccagaagcagctggagcacctgaagaagctgagaaagagcggcgaggagcagagaagctacggcgaggagaaggccgtgagcttcctgaagcagaccgaggccctgaagcagagagtgcagagaaagctggagcaggtgtactacttcctggagcagcaggagcacttcttcgtggccagcctggaggacgtgggccagatggtgggccagatcagaaaggcctacgacaccagagtgagccaggacatcgccctgctggacgccctgatcggcgagctggaggccaaggagtgccagagcgagtgggagctgctgcaggacatcggcgacatcctgcacagagccaagaccgtgcccgtgcccgagaagtggaccaccccccaggagatcaagcagaagatccagctgctgcaccagaagagcgagttcgtggagaagagcaccaagtacttcagcgagaccctgagaagcgagatggagatgttcaacgtgcccgagctgatcggcgcccaggcccacgccgtgaacgtgatcctggacgccgagaccgcctaccccaacctgatcttcagcgacgacctgaagagcgtgagactgggcaacaagtgggagagactgcccgacggcccccagagattcgacagctgcatcatcgtgctgggcagccccagcttcctgagcggcagaagatactgggaggtggaggtgggcgacaagaccgcctggatcctgggcgcctgcaagaccagcatcagcagaaagggcaacatgaccctgagccccgagaacggctactgggtggtgatcatgatgaaggagaacgagtaccaggccagcagcgtgccccccaccagactgctgatcaaggagccccccaagagagtgggcatcttcgtggactacagagtgggcagcatcagcttctacaacgtgaccgccagaagccacatctacaccttcgccagctgcagcttcagcggccccctgcagcccatcttcagccccggcaccagagacggcggcaagaacaccgcccccctgaccatctgccccgtgggcggccagggccccgactag

SEQ ID NO: 5314 - DNA, 2067 bp, Artificial Sequence
  derived and/or modified sequence
atggccaagacccccagcgaccacctgctgagcaccctggaggagctggtgccctacgacttcgagaagttcaagttcaagctgcagaacaccagcgtgcagaaggagcacagcagaatccccagaagccagatccagagagccagacccgtgaagatggccaccctgctggtgacctactacggcgaggagtacgccgtgcagctgaccctgcaggtgctgagagccatcaaccagagactgctggccgaggagctgcacagagccgccatccaggagtacagcacccaggagaacggcaccgacgacagcgccgccagcagcagcctgggcgagaacaagcccagaagcctgaagacccccgaccaccccgagggcaacgagggcaacggccccagaccctacggcggcggcgccgccagcctgagatgcagccagcccgaggccggcagaggcctgagcagaaagcccctgagcaagagaagagagaaggccagcgagggcctggacgcccagggcaagcccagaaccagaagccccgccctgcccggcggcagaagccccggcccctgcagagccctggagggcggccaggccgaggtgagactgagaagaaacgccagcagcgccggcagactgcagggcctggccggcggcgcccccggccagaaggagtgcagacccttcgaggtgtacctgcccagcggcaagatgagacccagaagcctggaggtgaccatcagcaccggcgagaaggcccccgccaaccccgagatcctgctgaccctggaggagaagaccgccgccaacctggacagcgccaccgagcccagagccagacccacccccgacggcggcgccagcgccgacctgaaggagggccccggcaaccccgagcacagcgtgaccggcagaccccccgacaccgccgccagccccagatgccacgcccaggagggcgaccccgtggacggcacctgcgtgagagacagctgcagcttccccgaggccgtgagcggccacccccaggccagcggcagcagaagccccggctgccccagatgccaggacagccacgagagaaagagccccggcagcctgagcccccagcccctgccccagtgcaagagacacctgaagcaggtgcagctgctgttctgcgaggaccacgacgagcccatctgcctgatctgcagcctgagccaggagcaccagggccacagagtgagacccatcgaggaggtggccctggagcacaagaagaagatccagaagcagctggagcacctgaagaagctgagaaagagcggcgaggagcagagaagctacggcgaggagaaggccgtgagcttcctgaagcagaccgaggccctgaagcagagagtgcagagaaagctggagcaggtgtactacttcctggagcagcaggagcacttcttcgtggccagcctggaggacgtgggccagatggtgggccagatcagaaaggcctacgacaccagagtgagccaggacatcgccctgctggacgccctgatcggcgagctggaggccaaggagtgccagagcgagtgggagctgctgcaggacatcggcgacatcctgcacagagccaagaccgtgcccgtgcccgagaagtggaccaccccccaggagatcaagcagaagatccagctgctgcaccagaagagcgagttcgtggagaagagcaccaagtacttcagcgagaccctgagaagcgagatggagatgttcaacgtgcccgagctgatcggcgcccaggcccacgccgtgaacgtgatcctggacgccgagaccgcctaccccaacctgatcttcagcgacgacctgaagagcgtgagactgggcaacaagtgggagagactgcccgacggcccccagagattcgacagctgcatcatcgtgctgggcagccccagcttcctgagcggcagaagatactgggaggtggaggtgggcgacaagagattcagctgcctgagcctgagaagcagctgggactacagaagaccccccccctgccccgccaacttcctgcacttctag

SEQ ID NO: 5315 - protein, 260 aa, Artificial Sequence
  derived and/or modified sequence
MKDFSHPNVLSLLGICLRSEGSPLVVLPYMKHGDLRNFIRNETHNPTVKDLIGFGLQVAKGMKYLASKKFVHRDLAARNCMLDEKFTVKVADFGLARDMYDKEYYSVHNKTGAKLPVKWMALESLQTQKFTTKSDVWSFGVLLWELMTRGAPPYPDVNTFDITVYLLQGRRLLQPEYCPDPLYEVMLKCWHPKAEMRPSFSELVSRISAIFSTFIGEHYVHVNATYVNVKCVAPYPSLLSSEDNADDEVDTRPASFWETS

SEQ ID NO: 5316 - DNA, 4173 bp, Artificial Sequence
  derived and/or modified sequence
atgaaggcccccgccgtgctggcccccggcatcctggtgctgctgttcaccctggtgcagagaagcaacggcgagtgcaaggaggccctggccaagagcgagatgaacgtgaacatgaagtaccagctgcccaacttcaccgccgagacccccatccagaacgtgatcctgcacgagcaccacatcttcctgggcgccaccaactacatctacgtgctgaacgaggaggacctgcagaaggtggccgagtacaagaccggccccgtgctggagcaccccgactgcttcccctgccaggactgcagcagcaaggccaacctgagcggcggcgtgtggaaggacaacatcaacatggccctggtggtggacacctactacgacgaccagctgatcagctgcggcagcgtgaacagaggcacctgccagagacacgtgttcccccacaaccacaccgccgacatccagagcgaggtgcactgcatcttcagcccccagatcgaggagcccagccagtgccccgactgcgtggtgagcgccctgggcgccaaggtgctgagcagcgtgaaggacagattcatcaacttcttcgtgggcaacaccatcaacagcagctacttccccgaccaccccctgcacagcatcagcgtgagaagactgaaggagaccaaggacggcttcatgttcctgaccgaccagagctacatcgacgtgctgcccgagttcagagacagctaccccatcaagtacgtgcacgccttcgagagcaacaacttcatctacttcctgaccgtgcagagagagaccctggacgcccagaccttccacaccagaatcatcagattctgcagcatcaacagcggcctgcacagctacatggagatgcccctggagtgcatcctgaccgagaagagaaagaagagaagcaccaagaaggaggtgttcaacatcctgcaggccgcctacgtgagcaagcccggcgcccagctggccagacagatcggcgccagcctgaacgacgacatcctgttcggcgtgttcgcccagagcaagcccgacagcgccgagcccatggacagaagcgccatgtgcgccttccccatcaagtacgtgaacgacttcttcaacaagatcgtgaacaagaacaacgtgagatgcctgcagcacttctacggccccaaccacgagcactgcttcaacagaaccctgctgagaaacagcagcggctgcgaggccagaagagacgagtacagaaccgagttcaccaccgccctgcagagagtggacctgttcatgggccagttcagcgaggtgctgctgaccagcatcagcaccttcatcaagggcgacctgaccatcgccaacctgggcaccagcgagggcagattcatgcaggtggtggtgagcagaagcggccccagcaccccccacgtgaacttcctgctggacagccaccccgtgagccccgaggtgatcgtggagcacaccctgaaccagaacggctacaccctggtgatcaccggcaagaagatcaccaagatccccctgaacggcctgggctgcagacacttccagagctgcagccagtgcctgagcgccccccccttcgtgcagtgcggctggtgccacgacaagtgcgtgagaagcgaggagtgcctgagcggcacctggacccagcagatctgcctgcccgccatctacaaggtgttccccaacagcgcccccctggagggcggcaccagactgaccatctgcggctgggacttcggcttcagaagaaacaacaagttcgacctgaagaagaccagagtgctgctgggcaacgagagctgcaccctgaccctgagcgagagcaccatgaacaccctgaagtgcaccgtgggccccgccatgaacaagcacttcaacatgagcatcatcatcagcaacggccacggcaccacccagtacagcaccttcagctacgtggaccccgtgatcaccagcatcagccccaagtacggccccatggccggcggcaccctgctgaccctgaccggcaactacctgaacagcggcaacagcagacacatcagcatcggcggcaagacctgcaccctgaagagcgtgagcaacagcatcctggagtgctacacccccgcccagaccatcagcaccgagttcgccgtgaagctgaagatcgacctggccaacagagagaccagcatcttcagctacagagaggaccccatcgtgtacgagatccaccccaccaagagcttcatcagcggcggcagcaccatcaccggcgtgggcaagaacctgaacagcgtgagcgtgcccagaatggtgatcaacgtgcacgaggccggcagaaacttcaccgtggcctgccagcacagaagcaacagcgagatcatctgctgcaccacccccagcctgcagcagctgaacctgcagctgcccctgaagaccaaggccttcttcatgctggacggcatcctgagcaagtacttcgacctgatctacgtgcacaaccccgtgttcaagcccttcgagaagcccgtgatgatcagcatgggcaacgagaacgtgctggagatcaagggcaacgacatcgaccccgaggccgtgaagggcgaggtgctgaaggtgggcaacaagagctgcgagaacatccacctgcacagcgaggccgtgctgtgcaccgtgcccaacgacctgctgaagctgaacagcgagctgaacatcgagtggaagcaggccatcagcagcaccgtgctgggcaaggtgatcgtgcagcccgaccagaacttcaccggcctgatcgccggcgtggtgagcatcagcaccgccctgctgctgctgctgggcttcttcctgtggctgaagaagagaaagcagatcaaggacctgggcagcgagctggtgagatacgacgccagagtgcacaccccccacctggacagactggtgagcgccagaagcgtgagccccaccaccgagatggtgagcaacgagagcgtggactacagagccaccttccccgaggaccagttccccaacagcagccagaacggcagctgcagacaggtgcagtaccccctgaccgacatgagccccatcctgaccagcggcgacagcgacatcagcagccccctgctgcagaacaccgtgcacatcgacctgagcgccctgaaccccgagctggtgcaggccgtgcagcacgtggtgatcggccccagcagcctgatcgtgcacttcaacgaggtgatcggcagaggccacttcggctgcgtgtaccacggcaccctgctggacaacgacggcaagaagatccactgcgccgtgaagagcctgaacagaatcaccgacatcggcgaggtgagccagttcctgaccgagggcatcatcatgaaggacttcagccaccccaacgtgctgagcctgctgggcatctgcctgagaagcgagggcagccccctggtggtgctgccctacatgaagcacggcgacctgagaaacttcatcagaaacgagacccacaaccccaccgtgaaggacctgatcggcttcggcctgcaggtggccaagggcatgaagtacctggccagcaagaagttcgtgcacagagacctggccgccagaaactgcatgctggacgagaagttcaccgtgaaggtggccgacttcggcctggccagagacatgtacgacaaggagtactacagcgtgcacaacaagaccggcgccaagctgcccgtgaagtggatggccctggagagcctgcagacccagaagttcaccaccaagagcgacgtgtggagcttcggcgtgctgctgtgggagctgatgaccagaggcgcccccccctaccccgacgtgaacaccttcgacatcaccgtgtacctgctgcagggcagaagactgctgcagcccgagtactgccccgaccccctgtacgaggtgatgctgaagtgctggcaccccaaggccgagatgagacccagcttcagcgagctggtgagcagaatcagcgccatcttcagcaccttcatcggcgagcactacgtgcacgtgaacgccacctacgtgaacgtgaagtgcgtggccccctaccccagcctgctgagcagcgaggacaacgccgacgacgaggtggacaccagacccgccagcttctgggagaccagctag

SEQ ID NO: 5317 - DNA, 4173 bp, Artificial Sequence
  derived and/or modified sequence
atgaaggcccccgccgttctcgcccctggtatcttggtcctcctattcacgctggtccagcgaagcaacggagagtgcaaggaggcactcgcaaaatctgagatgaacgtgaacatgaagtaccagctgcctaatttcaccgccgaaactcctatccaaaacgtgattctgcatgagcaccatatttttctgggtgcaacaaactacatttacgtgctgaacgaggaagacctccagaaagtggctgagtataagaccggccctgtgctcgaacaccctgactgtttcccatgtcaggactgtagcagcaaggcgaacctctcggggggcgtgtggaaagacaatattaacatggcgttagtggtcgacacatattatgacgatcaactgattagctgcggctccgtcaaccgaggaacatgtcagcgccacgtgttccctcacaatcacacagctgacatccagagcgaggtgcactgcatcttctctccgcagatcgaggaaccttctcagtgccctgattgcgttgtttccgccctgggagccaaggtgctatcttcagtcaaagaccgcttcatcaatttctttgtaggaaataccattaattcttcttatttccccgaccaccctctccatagtatttctgtcagaagattgaaggagacaaaggacggattcatgttcttaacagaccagtcctatatcgatgtgttgcccgaattcagagattcataccccatcaagtatgtgcacgcgtttgagagtaacaacttcatttacttcctgacagtgcagcgcgaaaccctcgacgcccagacgtttcatacacggatcattaggttttgtagcatcaacagcggcttacacagctacatggaaatgccactagagtgtatcttgacagaaaaaagaaagaaacgctctacgaagaaagaagtatttaatatcttgcaggccgcctacgtgtccaagcctggggcccaacttgcgaggcagatcggcgcctcactgaacgatgatatcctctttggtgtgttcgcccagtctaaacccgattctgccgaaccaatggacagaagtgcaatgtgcgcttttccaattaaatacgtaaatgacttctttaataaaattgtcaataagaataatgtacgatgtctgcagcacttctatggaccaaatcacgagcactgctttaaccggacactgttgcgaaattcttccggctgcgaggcaaggagagacgagtatagaaccgagttcacaacggccctccagagagtggatttgttcatgggacagttttccgaggtgctcctaacatcgatatcaactttcatcaaaggggacctgaccatcgcaaacctgggaacatccgagggcagattcatgcaagtcgtagtctcacggagtggaccatcgacccctcacgtgaactttctgcttgacagccacccggtgtcaccggaggtgatagtcgaacacacactgaatcagaacggttacacactggtgattacgggcaagaaaattaccaaaattccactgaatggcctgggatgccggcactttcagtcgtgttctcagtgcttgtcagcacccccctttgttcagtgcgggtggtgccacgataaatgtgtcaggtcagaggagtgtctttcaggcacatggacccagcaaatctgtttgcccgctatttacaaagtctttccaaacagcgctccccttgaaggaggcacccggcttaccatctgtgggtgggatttcggctttcggcggaataacaagttcgacctgaagaagacccgggtgctgctgggaaacgaaagttgcacgctcaccctttcagagtcaacaatgaatacactgaagtgcactgtaggccctgctatgaacaagcactttaacatgtctattatcatttccaacggacacggaactacccagtactccaccttcagctacgttgatccggtaattactagcatatcaccgaagtacgggcccatggctggtggcacactgctcactttaactgggaattacttgaatagtgggaatagccggcatataagcataggcgggaagacatgtacactgaagtccgtgtcaaatagtattttggaatgctacactccggcacagacaatttctacagagttcgcagtaaaactcaagattgaccttgccaaccgagaaacttcaattttctcgtaccgggaagatcccattgtctatgagatccacccgacaaaaagcttcatcagtggcgggagtaccataacaggagtggggaagaacctgaactccgtgtccgtaccgcggatggtcatcaacgtccatgaagctggccgaaactttacagtcgcatgtcagcacaggtccaacagtgagatcatatgctgtacaacacccagcctgcagcaattaaacctgcagctgcccctcaaaacaaaggctttttttatgctagatggcatcctatcaaagtatttcgaccttatctatgtccacaacccagtgtttaagcctttcgagaagcccgtaatgataagcatggggaacgaaaatgtgctagaaattaagggtaacgatatcgaccccgaagccgtgaagggagaagtgctcaaagtggggaataagtcttgcgagaatatccaccttcactccgaagccgtactctgtacagtaccgaatgatctgctgaagctgaactccgagctcaatatagagtggaagcaggccataagttcaactgtgctgggaaaagtaatcgtacaaccagaccagaatttcaccgggctgattgccggggtagtctcaatttctacagcccttcttcttctactgggattcttcctgtggctaaagaagcgcaagcagatcaaggacttgggaagtgaactggtgaggtacgacgctcgggtgcacactcctcaccttgaccgcttagtgtcagcgcgctccgtttcgcccacaaccgaaatggtatcaaatgagagtgttgattaccgggctactttccccgaggaccagttccccaactcctctcagaatggcagctgtcgtcaagtacagtatccgctcacagatatgagtcccatcctgacatctggagacagcgacatatcatcacccctgctgcagaataccgtgcacattgatctgtcagctctaaatccagagttggtgcaggccgtgcagcacgtcgtgatcggccctagctcgctcatcgtacactttaacgaggtaatcggacgtggtcactttggctgtgtctatcatgggaccttgctcgataacgatggaaagaaaatccattgtgctgtgaagagtctgaaccgcatcactgacatcggagaggttagccagttcctcacggaggggataatcatgaaggacttctcccaccctaatgtgctgtccttgctgggcatttgtctccggtctgagggcagcccactggtagtcctgccttacatgaagcacggcgacctaaggaactttattagaaatgagacccacaatcccaccgtgaaagacctcatcggttttgggctgcaggtagcaaaagggatgaagtatttggcctctaagaagtttgtgcatcgcgacttagcggcccgaaactgtatgcttgacgagaaatttactgtgaaagttgctgacttcggccttgcccgcgatatgtacgacaaagaatactacagcgtacacaacaaaaccggtgctaagctgcctgtcaagtggatggcactcgagtctttacagacccagaaatttacaacaaagagcgatgtttggtctttcggcgtgttactctgggaactgatgacacggggagccccaccgtacccagacgtgaacaccttcgatatcactgtttacctcctgcagggcaggaggctgctgcagccagagtattgccccgatcccctctacgaagtgatgcttaagtgctggcatccaaaagctgagatgcgaccctcctttagtgaattggtgagcaggatttcggctattttttccacctttatcggagaacactacgtccacgtaaacgcgacatatgttaacgtcaagtgcgtcgccccctatccgtccctattgtcgagcgaagacaacgccgacgacgaggtcgatacgcgacccgcaagtttctgggaaacttcctag

SEQ ID NO: 5318 - DNA, 4173 bp, Artificial Sequence
  derived and/or modified sequence
atgaaggccccagctgtgctggcccctggcatcctggtgctgctcttcaccctggtgcagaggagcaatggagagtgcaaggaggccctggccaagtctgagatgaatgtgaacatgaagtaccagctgcccaacttcaccgctgagacccccatccagaatgtcatcctgcacgagcaccacatcttcctgggcgccaccaactacatctacgtgctgaatgaggaggacctgcagaaggtggccgagtacaagacaggccctgtgctggagcacccagactgcttcccctgccaggactgcagcagcaaggccaacctgagcggcggcgtgtggaaggacaacatcaacatggccctggtggtggacacctactatgatgaccagctgatcagctgtggctctgtgaacagaggcacctgccagagacatgtgttcccccacaaccacacagctgacatccagagcgaggtgcactgcatcttcagcccccagatcgaggagcccagccagtgcccagactgtgtggtgtctgccctgggcgccaaggtgctgagctctgtgaaggaccgcttcatcaacttctttgtgggcaacaccatcaacagcagctacttcccagaccaccccctgcacagcatctctgtgcggcggctgaaggagaccaaggatggcttcatgttcctgacagaccagagctacattgatgtgctgcctgagttccgggacagctaccccatcaagtatgtgcacgcctttgagagcaacaacttcatctacttcctgactgtgcagcgggagaccctggatgcccagaccttccacacccgcatcatccgcttctgcagcatcaacagcggcctgcacagctacatggagatgcccctggagtgcatcctgacagagaagaggaagaagaggagcaccaagaaggaggtgttcaacatcctgcaggccgcctacgtgtccaagccaggggcccagctggcccggcagattggagccagcctgaatgatgacatcctgtttggagtgtttgcccagagcaagccagattctgctgagcccatggacagaagtgccatgtgtgccttccccatcaagtatgtgaatgacttcttcaacaagatcgtgaacaagaacaacgtgcgctgcctgcagcacttctacggccccaaccacgagcactgcttcaacagaaccctgctgaggaacagcagcggctgtgaggccaggagagatgagtacagaacagagttcaccacagccctgcagagggtggacctcttcatgggccagttcagcgaggtgctgctgaccagcatcagcaccttcatcaagggggacctgaccatcgccaacctgggcaccagcgagggccgcttcatgcaggtggtggtgagccgcagcggccccagcaccccccacgtgaacttcctgctggacagccaccctgtgtccccagaggtgattgtggagcacaccctgaaccagaatggctacaccctggtgatcaccgggaagaagatcaccaagatccccctgaatggcctgggctgccgccacttccagagctgcagccagtgcctgagcgcccccccatttgtgcagtgtggctggtgccacgacaagtgtgtgcgctctgaggagtgcctgagcggcacctggacccagcagatctgcctgcctgccatctacaaggtgttccccaacagcgcccccctggagggcggcacccggctgaccatctgtggctgggactttggcttcagaagaaacaacaagtttgacctgaagaagaccagggtgctgctgggcaatgaaagctgcaccctgaccctgtctgagagcaccatgaacaccctgaagtgcaccgtgggccctgccatgaacaagcacttcaacatgagcatcatcatcagcaatggccacggcaccacccagtacagcaccttctcctatgtggaccctgtgatcaccagcatcagccccaagtatggccccatggccggcggcaccctgctgaccctgaccggcaactacctgaacagcggcaacagccgccacatcagcatcggcggcaagacctgcaccctgaagtctgtgagcaacagcatcctggagtgctacaccccagcccagaccatcagcacagaatttgctgtgaagctgaagattgacctggccaaccgggagaccagcatcttctcctaccgggaggaccccatcgtgtatgagatccaccccaccaagagcttcatcagcggcggcagcaccatcactggagtgggcaagaacctgaacagcgtgtctgtgcccaggatggtgatcaacgtgcatgaggccggcaggaacttcaccgtggcctgccagcacaggagcaacagcgagatcatctgctgcaccacccccagcctgcagcagctgaacctgcagctgcccctgaagaccaaggccttcttcatgctggatggcatcctgagcaagtactttgacctgatctacgtgcacaaccctgtgttcaagccctttgagaagcctgtgatgatctccatgggaaatgaaaatgtgctggagatcaagggaaatgacattgatcctgaggccgtgaagggggaggtgctgaaggtgggcaacaagagctgtgagaacatccacctgcacagcgaggccgtgctgtgcaccgtgcccaatgacctgctgaagctgaacagcgagctgaacatcgagtggaagcaggccatcagcagcacagtgctgggcaaggtgattgtgcagcctgaccagaacttcaccggcctgattgctggggtggtgtccatcagcacagccctgctgctgctgctgggcttcttcctgtggctgaagaagaggaagcagatcaaggacctgggcagcgagctggtgcgctatgatgcccgggtgcacaccccccacctggaccggctggtgtctgcccggtctgtgagccccaccacagagatggtgtccaatgaatctgtggactaccgggccaccttccctgaggaccagttccccaacagcagccagaatggcagctgccggcaggtgcagtaccccctgacagacatgagccccatcctgaccagcggggacagcgacatcagcagccccctgctgcagaacacagtgcacatcgacctgagcgccctgaaccctgagctggtgcaggccgtgcagcacgtggtgattggccccagcagcctgattgtgcacttcaatgaagtcatcggccggggccacttcggctgtgtgtaccacggcaccctgctggacaatgatggcaagaagatccactgtgctgtgaagagcctgaaccgcatcacagacatcggggaggtgtcccagttcctgacagagggcatcatcatgaaggacttcagccaccccaacgtgctgagcctgctgggcatctgcctgcggtctgagggcagccccctggtggtgctgccctacatgaagcacggggacctgaggaacttcatcagaaatgagacccacaaccccaccgtgaaggacctgattggcttcggcctgcaggtggccaagggcatgaagtacctggccagcaagaagtttgtgcaccgggacctggccgccaggaactgcatgctggatgagaagttcaccgtgaaggtggccgactttggcctggcccgggacatgtatgacaaggagtactacagcgtgcacaacaagacaggagccaagctgcctgtgaagtggatggccctggagagcctgcagacccagaagttcaccaccaagagtgatgtgtggagctttggagtgctgctgtgggagctgatgaccaggggggccccaccctacccagatgtgaacacctttgacatcaccgtgtacctgctgcagggccggcggctgctgcagcctgagtactgcccagaccccctgtatgaggtgatgctgaagtgctggcaccccaaggccgagatgaggcccagcttcagcgagctggtgagccgcatcagcgccatcttcagcaccttcatcggggagcactacgtgcacgtgaatgccacctacgtgaatgtgaagtgtgtggccccctaccccagcctgctgagcagcgaggacaatgctgatgatgaggtggacaccaggcctgccagcttctgggagaccagctag

SEQ ID NO: 5319 - DNA, 4173 bp, Artificial Sequence
  derived and/or modified sequence
atgaaggcccccgccgtgctggcccccggcatcctggtgctgctgttcactctggttcagcgctcaaacggcgagtgcaaggaagcactagcaaagtctgagatgaatgtcaacatgaagtaccagttgcccaatttcacagccgagactcccatccagaatgtgatcttgcacgagcaccacatcttcctcggcgctacaaactatatttacgtgcttaacgaagaggacctgcagaaggtcgcggaatataagactggaccggttctcgaacaccccgattgctttccctgccaagattgctcatccaaagcaaatctgtctggcggagtttggaaagacaacatcaatatggctctcgtcgtggacacgtactatgatgaccagctgatctcttgtggcagcgtgaatcggggcacatgtcagcggcacgtgttccctcacaaccacactgctgacattcaatctgaagtgcattgcattttttcaccgcagatcgaggagccatcccagtgtcctgactgtgttgtgtctgcactgggggccaaggtcttgtcctctgttaaggatagattcatcaactttttcgtcggcaacactattaactcctcatactttcctgatcatcctctgcacagtatcagcgtgcgtcggcttaaggagacaaaggatggattcatgttcttgacagaccaatcttacattgatgtgctccctgagttccgtgactcttacccgataaagtacgtccacgcattcgaatcaaataacttcatatatttccttacagtccagagagagactctcgacgcccaaactttccacaccagaattataagattctgcagcattaattcaggtctgcatagctacatggaaatgcccctcgaatgcatcttgaccgagaagcgtaagaaaagatctacgaagaaagaggtgttcaacattctgcaggcagcatatgtgtctaagccaggcgcgcagttagctaggcagattggcgctagtctaaacgatgacatcctttttggcgtgtttgctcagtccaaacctgacagtgccgaacccatggacagatcagcgatgtgtgcatttcctattaaatacgtaaatgacttctttaataagattgttaataaaaacaacgtgaggtgcttgcagcacttttatggccctaatcacgaacattgtttcaaccgcactctcctccgtaactccagtgggtgcgaggcccgtagagatgagtatcggaccgagttcaccaccgctctccagcgggttgatctctttatgggccagttctcagaggtcctgcttacctctatctctacctttattaaaggagatttaaccattgccaacctcggaacctctgaggggagattcatgcaagttgtagtgtctcgctctggaccctctacgcctcatgtgaactttttactggattcccatcctgtttcaccagaagtgatcgttgaacacaccttgaatcagaacggctacaccctagtgataacaggcaagaaaatcacaaagatccctctcaatgggctgggttgtcgccactttcaatcctgctcgcaatgtctttctgccccccctttcgttcagtgcggttggtgccatgataagtgcgtgcgttccgaggaatgcctgtccggaacctggacacagcaaatatgtttgcctgccatctataaggtcttccccaactccgccccgttggagggtggaacgcgattaacaatttgtggctgggacttcggctttaggcgcaataataaattcgaccttaaaaagacccgggtgctgctcggcaacgaatcctgcacacttactctgtccgagagtaccatgaacacactgaagtgcacagttggacccgcgatgaataaacacttcaacatgagcataattatcagcaatgggcatggaaccacgcagtacagtacattcagctatgtggatcccgtgattacgagtatctcgccgaaatatgggcctatggccggcggaactctgctaactttaacaggcaactacttaaattcaggcaatagtcgccacataagcatcggaggaaagacctgcaccctgaagagtgtcagtaattcaatcctcgaatgttacacgcccgcgcagacaatatcgacagaatttgccgttaaactcaagattgatcttgccaatcgtgagactagcatctttagttatcgggaggatcccattgtttacgaaattcaccccactaaaagcttcatttctggcggaagcacaattacaggagtcggcaagaatttaaattccgtatctgtaccgcgtatggttatcaacgtgcacgaggccgggcgtaactttaccgtagcttgccagcatcggtctaactccgagataatctgctgcacaaccccatcactgcaacagctcaacctgcagctgccgcttaagaccaaggcattctttatgctggatggaattctgtctaaatattttgacctgatctatgtgcataaccctgtgttcaaaccattcgagaagcccgtgatgatctccatggggaatgagaacgtcctggagatcaagggcaatgacattgaccctgaagcggtcaagggcgaggtgctgaaagtgggaaataagagctgcgaaaacattcatctccactctgaagctgtgctctgcacagttcccaatgatctgttgaagcttaattcagaactgaacatcgagtggaagcaggcgatctcctctaccgtgctgggaaaagtcatcgttcagcccgatcagaactttaccgggttaatcgctggcgtggttagcattagcaccgcactactgctcttgctcgggttctttctctggctcaaaaaaagaaagcaaatcaaggatctgggctcagagctcgtgagatatgatgcgagagtccatacgccccatctggacaggctggttagtgcgcggtcagtgtcacccaccacagaaatggtttccaatgaaagcgttgactatagagcgacgtttccagaagatcagtttcccaattcgagccagaatggttcctgtcgacaagtgcagtaccccctcactgacatgtcacccattctgacctcgggagattcagacatttccagcccactgctccagaacactgtgcacatcgatctaagcgcactgaatccagagctggtgcaagccgtgcagcacgttgttatcgggcccagttctcttatcgtgcattttaacgaggttataggaaggggtcacttcggatgcgtgtaccatggaactttgttggataatgatgggaagaaaatccactgcgctgtgaaaagtctgaataggattaccgacatcggagaggtctctcaattcctgaccgaaggaatcattatgaaggactttagtcatcccaacgttctatcgttgctaggcatctgtttgcggtcagaagggtcccctctggtagtattgccttacatgaagcacggagacctcagaaactttatacgtaatgaaacccataacccaacagtgaaagaccttattggcttcgggttgcaagtagctaaaggcatgaagtatctggcatctaaaaagttcgtccacagggatctggccgctagaaattgcatgctggacgagaagtttacagtgaaggtagccgatttcggactagctcgggacatgtacgataaagagtactactctgtacacaacaaaactggggcaaaactgcccgtcaagtggatggccctcgagagcctccagacccagaagtttaccactaagagtgatgtgtggagtttcggcgtcctcctgtgggagctgatgacaaggggagcaccaccataccccgatgtaaatacgttcgatataactgtttacctgcttcaaggtaggcggctcttgcaacccgaatactgccctgacccactttacgaagtgatgcttaaatgctggcaccccaaggccgagatgcggcctagcttttctgaactggtgtcgaggatctccgccatttttagcacatttataggcgagcactacgtgcacgtgaacgctacttatgtgaacgtgaaatgcgtggcaccctatcctagcttgcttagtagcgaggacaacgccgacgacgaggtggacactcgcccagcaagcttttgggaaacttcgtag

SEQ ID NO: 5320 - DNA, 4173 bp, Artificial Sequence
  derived and/or modified sequence
atgaaggcccctgctgtgcttgcacctggaatactcgtcttactgtttacactcgttcagcgcagcaatggtgaatgtaaggaggcactggctaagtcagagatgaacgtaaacatgaagtaccagttaccaaacttcacggctgaaacccctattcagaacgtgattctacatgaacaccatatctttctaggtgctacgaactacatttatgtcctgaatgaagaggacctacaaaaggttgctgagtacaagaccggcccagtgctggaacaccctgattgtttcccgtgtcaggattgctcaagtaaggccaacttatccggcggtgtttggaaagataacataaacatggcattagtggttgatacctactacgacgatcagctgatatcatgcgggagtgtgaatcgcggtacctgccaacggcatgtgttcccacacaatcatacagcggacatccaatcagaagttcactgcatcttcagcccacagattgaagagccctcccagtgtccagactgcgtggtgtcagcactgggcgcaaaggtgctttcgtccgtcaaggaccgattcatcaatttcttcgttggtaatacaatcaatagcagctactttcctgaccatccccttcactctataagcgttcgcaggttgaaggaaactaaagatgggttcatgttcctgaccgaccagtcatatatcgacgtactgcccgagttccgagacagttaccctataaagtacgtacacgccttcgagagtaacaactttatctactttctgactgtacagagggaaacccttgacgctcaaaccttccataccagaattattcgattttgttctatcaacagcggcttgcacagctatatggaaatgccactggaatgtatcctcacggagaaacgtaaaaagagatcaaccaagaaagaagtattcaatattcttcaagccgcatacgtttctaagccaggtgctcaattagcaagacagatcggggctagtctgaacgatgacatcctatttggggtgttcgcacagtcgaaacccgattccgctgaaccgatggatcggtccgctatgtgtgccttcccaatcaagtatgttaacgacttctttaataagatcgttaacaaaaacaatgtgaggtgtctccagcacttctacgggcctaaccacgagcattgtttcaacaggactctgcttcgcaattccagcggctgcgaggcgcgacgggatgagtacaggaccgaattcaccaccgctctacagagggtggacttgttcatgggacagttttctgaggttctccttacctctatctctacttttatcaaaggcgatctgacaattgcgaatctgggaaccagtgaaggtaggtttatgcaggtggtggttagtcgatcagggccatctaccccacacgttaattttctcttggattctcatcctgtctcacccgaggtgattgtggagcacaccttgaatcagaatgggtatacgcttgtgatcaccggcaagaaaattacaaaaatccctttaaacgggctgggatgtaggcatttccagtcttgttcccagtgtctgtccgctccgccattcgtgcagtgtgggtggtgtcacgacaagtgtgtgagatctgaggagtgtctgtcaggcacctggacacagcagatctgcctcccagcgatctataaggttttccccaattctgctccattggaaggaggcacccgactcactatttgcggatgggactttggcttccgcagaaataacaaatttgatttaaaaaagacccgggttctcctggggaatgagtcctgcactctgactctgtctgagagcacaatgaacactctgaaatgcactgttggcccagctatgaataagcactttaatatgagcatcatcattagcaacggacacggaactactcaatattctactttctcctatgtggatcctgtgatcacatccatctccccaaaatacggtcccatggccggtggtaccctactgacactgaccggaaactacttgaatagcggaaacagccgacatatctccattggtgggaagacatgcactctgaagtcggtgtcaaacagtattttggagtgctacactcctgcacagacgatcagtactgaattcgctgttaagctgaaaatagatctggccaatagagagacctctattttctcatacagagaagaccccattgtttatgagattcaccctactaaatcattcatctccgggggtagcactatcacgggagttggcaagaacctcaactctgtcagtgtgccacgtatggtgatcaatgtgcacgaggctggtagaaacttcaccgtggcgtgccagcatcgctccaattctgaaattatttgctgtacaacacctagtctccagcagctcaacctgcagctaccactaaaaaccaaggcatttttcatgttagacggaatcctcagcaaatattttgacctgatctacgtgcacaaccccgtgtttaagccgttcgagaagccagttatgatttccatgggaaacgagaacgtgctggagattaaaggcaacgacatcgacccggaggctgtgaaaggggaagtgctgaaagttggaaataaaagctgcgagaacattcatttacacagcgaagccgtgctttgcaccgtgcccaatgatctccttaagctgaacagtgagctgaacatcgagtggaagcaggcgattagtagcactgttttggggaaggtcatcgtgcaacccgaccagaacttcaccggcttgattgctggcgtcgtatcgatctctacagccctgctgctgctgctcggattctttctgtggctcaaaaagcggaaacagattaaggatttaggctcggagttggtacggtatgatgcacgggtgcataccccccatcttgaccgactggtcagcgcacgtagcgtgagccccaccactgagatggtgtctaatgaaagtgttgattatagagcaacctttcccgaagaccagtttcctaattcaagccagaatggctcctgtcggcaggttcagtaccccctcacggacatgtctcctatccttacttccggggatagcgacataagctccccgttgctgcagaacactgttcacattgatctgagtgcccttaacccagagctagtacaggcagttcagcacgtagttatcggcccaagctctctcattgtccattttaacgaggtaattgggagaggtcatttcggttgtgtctatcatggcaccttactggataatgacggaaagaagatacactgcgccgtaaaatcactgaacagaattaccgacatcggggaagtatctcagtttttgacggaggggattatcatgaaagactttagtcatccaaatgttttgagcttacttggaatatgcttgaggagtgaaggttcccctctggttgtcctcccatacatgaagcatggcgatctcaggaattttattcgaaatgaaacccataaccctacagtgaaggacttgataggcttcggtctgcaagttgccaagggaatgaaatatttagcaagcaaaaagttcgtgcacagggatcttgccgctcgtaactgtatgctggatgaaaagttcaccgtgaaagtggcggactttggcctggccagggacatgtatgacaaagagtactactccgttcacaacaaaacaggggctaaactgccagtcaagtggatggctctggaatcactccaaacccagaagtttacaactaaaagtgacgtttggtcttttggcgttctgctgtgggagttgatgacccgcggagccccaccatatccagatgtgaatactttcgacatcacagtctacctgctacaggggaggagactgctgcaacccgagtattgccccgatccactctacgaggtgatgcttaagtgttggcaccccaaggcagaaatgaggccatctttttctgaattagtctcccgcatatccgctattttctcaacattcattggggagcactatgtacacgtcaatgccacctatgtcaatgtgaaatgcgttgctccgtaccccagtttattgagctccgaggacaatgctgacgacgaggtggacacccggcctgccagcttctgggaaacaagctag

SEQ ID NO: 5321 - protein, 1130 aa, Artificial Sequence
  derived and/or modified sequence
MRCLAPRPAGSYLSEPQGSSQCATMELGPLEGGYLELLNSDADPLCLYHFYDQMDLAGEEEIELYSEPDTDTINCDQFSRLLCDMEGDEETREAYANIAELDQYVFQDSQLEGLSKDIFKHIGPDEVIGESMEMPAEVGQKSQKRPFPEELPADLKHWKPAEPPTVVTGSLLVRPVSDCSTLPCLPLPALFNQEPASGQMRLEKTDQIPMPFSSSSLSCLNLPEGPIQFVPTISTLPHGLWQISEAGTGVSSIFIYHGEVPQASQVPPPSGFTVHGLPTSPDRPGSTSPFAPSATDLPSMPEPALTSRANMTEHKTSPTQCPAAGEVSNKLPKWPEPVEQFYRSLQDTYGAEPAGPDGILVEVDLVQARLERSSSKSLERELATPDWAERQLAQGGLAEVLLAAKEHRRPRETRVIAVLGKAGQGKSYWAGAVSRAWACGRLPQYDFVFSVPCHCLNRPGDAYGLQDLLFSLGPQPLVAADEVFSHILKRPDRVLLILDGFEELEAQDGFLHSTCGPAPAEPCSLRGLLAGLFQKKLLRGCTLLLTARPRGRLVQSLSKADALFELSGFSMEQAQAYVMRYFESSGMTEHQDRALTLLRDRPLLLSHSHSPTLCRAVCQLSEALLELGEDAKLPSTLTGLYVGLLGRAALDSPPGALAELAKLAWELGRRHQSTLQEDQFPSADVRTWAMAKGLVQHPPRAAESELAFPSFLLQCFLGALWLALSGEIKDKELPQYLALTPRKKRPYDNWLEGVPRFLAGLIFQPPARCLGALLGPSAAASVDRKQKVLARYLKRLQPGTLRARQLLELLHCAHEAEEAGIWQHVVQELPGRLSFLGTRLTPPDAHVLGKALEAAGQDFSLDLRSTGICPSGLGSLVGLSCVTRFRAALSDTVALWESLQQHGETKLLQAAEEKFTIEPFKAKSLKDVEDLGKLVQTQRTRSSSEDTAGELPAVRDLKKLEFALGPVSGPQAFPKLVRILTAFSSLQHLDLDALSENKIGDEGVSQLSATFPQLKSLETLNLSQNNITDLGAYKLAEALPSLAASLLRLSLYNNCICDVGAESLARVLPDMVSLRVMDVQYNKFTAAGAQQLAASLRRCPHVETLAMWTPTIPFSVQEHLQQQDSRISLR

SEQ ID NO: 5322 - protein, 353 aa, Artificial Sequence
  derived and/or modified sequence
MRCLAPRPAGSYLSEPQGSSQCATMELGPLEGGYLELLNSDADPLCLYHFYDQMDLAGEEEIELYSEPDTDTINCDQFSRLLCDMEGDEETREAYANIAELDQYVFQDSQLEGLSKDIFKHIGPDEVIGESMEMPAEVGQKSQKRPFPEELPADLKHWKPAEPPTVVTGSLLVRPVSDCSTLPCLPLPALFNQEPASGQMRLEKTDQIPMPFSSSSLSCLNLPEGPIQFVPTISTLPHGLWQISEAGTGVSSIFIYHGEVPQASQVPPPSGFTVHGLPTSPDRPGSTSPFAPSATDLPSMPEPALTSRANMTEHKTSPTQCPAAGEVSNKLPKWPGREVPRKTQLGSSLLFGT

SEQ ID NO: 5323 - DNA, 4654 bp, Artificial Sequence
  derived and/or modified sequence
ggttagtgatgaggctagtgatgaggctgtgtgcttctgagctgggcatccgaaggcatccttggggaagctgagggcacgaggaggggctgccagactccgggagctgctgcctggctgggattcctacacaatgcgttgcctggctccacgccctgctgggtcctacctgtcagagccccaaggcagctcacagtgtgccaccatggagttggggcccctagaaggtggctacctggagcttcttaacagcgatgctgaccccctgtgcctctaccacttctatgaccagatggacctggctggagaagaagagattgagctctactcagaacccgacacagacaccatcaactgcgaccagttcagcaggctgttgtgtgacatggaaggtgatgaagagaccagggaggcttatgccaatatcgcggaactggaccagtatgtcttccaggactcccagctggagggcctgagcaaggacattttcaagcacataggaccagatgaagtgatcggtgagagtatggagatgccagcagaagttgggcagaaaagtcagaaaagacccttcccagaggagcttccggcagacctgaagcactggaagccagctgagccccccactgtggtgactggcagtctcctagtgggaccagtgagcgactgctccaccctgccctgcctgccactgcctgcgctgttcaaccaggagccagcctccggccagatgcgcctggagaaaaccgaccagattcccatgcctttctccagttcctcgttgagctgcctgaatctccctgagggacccatccagtttgtccccaccatctccactctgccccatgggctctggcaaatctctgaggctggaacaggggtctccagtatattcatctaccatggtgaggtgccccaggccagccaagtaccccctcccagtggattcactgtccacggcctcccaacatctccagaccggccaggctccaccagccccttcgctccatcagccactgacctgcccagcatgcctgaacctgccctgacctcccgagcaaacatgacagagcacaagacgtcccccacccaatgcccggcagctggagaggtctccaacaagcttccaaaatggcctgagccggtggagcagttctaccgctcactgcaggacacgtatggtgccgagcccgcaggcccggatggcatcctagtggaggtggatctggtgcaggccaggctggagaggagcagcagcaagagcctggagcgggaactggccaccccggactgggcagaacggcagctggcccaaggaggcctggctgaggtgctgttggctgccaaggagcaccggcggccgcgtgagacacgagtgattgctgtgctgggcaaagctggtcagggcaagagctattgggctggggcagtgagccgggcctgggcttgtggccggcttccccagtacgactttgtcttctctgtcccctgccattgcttgaaccgtccgggggatgcctatggcctgcaggatctgctcttctccctgggcccacagccactcgtggcggccgatgaggttttcagccacatcttgaagagacctgaccgcgttctgctcatcctagacggcttcgaggagctggaagcgcaagatggcttcctgcacagcacgtgcggaccggcaccggcggagccctgctccctccgggggctgctggccggccttttccagaagaagctgctccgaggttgcaccctcctcctcacagcccggccccggggccgcctggtccagagcctgagcaaggccgacgccctatttgagctgtccggcttctccatggagcaggcccaggcatacgtgatgcgctactttgagagctcagggatgacagagcaccaagacagagccctgacgctcctccgggaccggccacttcttctcagtcacagccacagccctactttgtgccgggcagtgtgccagctctcagaggccctgctggagcttggggaggacgccaagctgccctccacgctcacgggactctatgtcggcctgctgggccgtgcagccctcgacagcccccccggggccctggcagagctggccaagctggcctgggagctgggccgcagacatcaaagtaccctacaggaggaccagttcccatccgcagacgtgaggacctgggcgatggccaaaggcttagtccaacacccaccgcgggccgcagagtccgagctggccttccccagcttcctcctgcaatgcttcctgggggccctgtggctggctctgagtggcgaaatcaaggacaaggagctcccgcagtacctagcattgaccccaaggaagaagaggccctatgacaactggctggagggcgtgccacgctttctggctgggctgatcttccagcctcccgcccgctgcctgggagccctactcgggccatcggcggctgcctcggtggacaggaagcagaaggtgcttgcgaggtacctgaagcggctgcagccggggacactgcgggcgcggcagctgctggagctgctgcactgcgcccacgaggccgaggaggctggaatttggcagcacgtggtacaggagctccccggccgcctctcttttctgggcacccgcctcacgcctcctgatgcacatgtactgggcaaggccttggaggcggcgggccaagacttctccctggacctccgcagcactggcatttgcccctctggattggggagcctcgtgggactcagctgtgtcacccgtttcagggctgccttgagcgacacggtggcgctgtgggagtccctgcagcagcatggggagaccaagctacttcaggcagcagaggagaagttcaccatcgagcctttcaaagccaagtccctgaaggatgtggaagacctgggaaagcttgtgcagactcagaggacgagaagttcctcggaagacacagctggggagctccctgctgttcgggacctaaagaaactggagtttgcgctgggccctgtctcaggcccccaggctttccccaaactggtgcggatcctcacggccttttcctccctgcagcatctggacctggatgcgctgagtgagaacaagatcggggacgagggtgtctcgcagctctcagccaccttcccccagctgaagtccttggaaaccctcaatctgtcccagaacaacatcactgacctgggtgcctacaaactcgccgaggccctgccttcgctcgctgcatccctgctcaggctaagcttgtacaataactgcatctgcgacgtgggagccgagagcttggctcgtgtgcttccggacatggtgtccctccgggtgatggacgtccagtacaacaagttcacggctgccggggcccagcagctcgctgccagccttcggaggtgtcctcatgtggagacgctggcgatgtggacgcccaccatcccattcagtgtccaggaacacctgcaacaacaggattcacggatcagcctgagatgatcccagctgtgctctggacaggcatgttctctgaggacactaaccacgctggaccttgaactgggtacttgtggacacagctcttctccaggctgtatcccatgagcctcagcatcctggcacccggcccctgctggttcagggttggcccctgcccggctgcggaatgaaccacatcttgctctgctgacagacacaggcccggctccaggctcctttagcgcccagttgggtggatgcctggtggcagctgcggtccacccaggagccccgaggccttctctgaaggacattgcggacagccacggccaggccagagggagtgacagaggcagccccattctgcctgcccaggcccctgccaccctggggagaaagtacttctttttttttatttttagacagagtctcactgttgcccaggctggcgtgcagtggtgcgatctgggttcactgcaacctccgcctcttgggttcaagcgattcttctgcttcagcctcccgagtagctgggactacaggcacccaccatcatgtctggctaatttttcatttttagtagagacagggttttgccatgttggccaggctggtctcaaactcttgacctcaggtgatccacccacctcagcctcccaaagtgctgggattacaagcgtgagccactgcaccgggccacagagaaagtacttctccaccctgctctccgaccagacaccttgacagggcacaccgggcactcagaagacactgatgggcaacccccagcctgctaattccccagattgcaacaggctgggcttcagtggcagctgcttttgtctatgggactcaatgcactgacattgttggccaaagccaaagctaggcctggccagatgcaccagcccttagcagggaaacagctaatgggacactaatggggcggtgagaggggaacagactggaagcacagcttcatttcctgtgtcttttttcactacattataaatgtctctttaatgtcacaggcaggtccagggtttgagttcataccctgttaccattttggggtacccactgctctggttatctaatatgtaacaagccaccccaaatcatagtggcttaaaacaacactcacattta

SEQ ID NO: 5324 - DNA, 3393 bp, Artificial Sequence
  derived and/or modified sequence
atgaggtgtctggccccccggccagcgggtagctatctttcagagccccagggaagcagccagtgcgccacaatggagttaggacccctcgagggtgggtatctggagctacttaatagcgacgcagacccgctctgtttgtatcatttttacgaccagatggacctggctggcgaagaagaaattgaactgtattccgaacctgacactgatacaattaactgcgaccaattctctcgtctgctgtgcgatatggagggggatgaagaaaccagagaagcatacgccaacatcgcggagctggatcaatacgtgtttcaggacagccaattagaagggttgtcaaaggacatcttcaagcatatcgggccagatgaagtgattggagagagcatggagatgccggctgaagtcggccaaaaatcccagaagcgcccattcccagaggagcttcccgcagacctgaagcattggaagccagctgagccaccaaccgtcgtgacaggcagtctactggtgcggcccgtgtccgattgttcgacccttccttgtcttccactgccagctctatttaaccaggagcccgcttcaggccagatgagactggagaagacagaccagatccctatgcctttttccagctcctccctgtcttgcctgaatctgcccgagggtcccatccagttcgtcccaacaatatcaacactgccgcacggcctgtggcagatctccgaggccgggacaggcgtcagttctatttttatataccatggcgaggtcccccaagcctcccaagtgcctccaccatcagggtttacagtgcacgggttgcctactagccctgaccggccaggaagtacgtccccattcgctccatccgctacagatctaccttccatgcctgagcccgccctgacctcaagagcgaacatgactgagcacaaaaccagtccaacacagtgccctgcggctggcgaggtatctaacaagctgccgaagtggccagagcctgtggagcagttttaccggtcacttcaggatacctacggcgctgagccagccggcccagacgggatcctcgttgaggtggatcttgttcaggcccgcttggagagatcatcatctaaatcactcgagagagagcttgctaccccagactgggccgaacgtcaactcgctcaaggtgggctggccgaggttcttctagcggctaaagagcaccgacgcccccgtgagacgagggtcatagccgttctcgggaaagcaggacagggaaagagctactgggctggcgcggtctctagggcctgggcatgcggtaggttgccccaatacgatttcgtgttttctgtgccttgtcattgtcttaatcgacccggcgacgcttatggcctgcaggatttgctcttctccttggggcctcagccccttgtggcagcagacgaagtgttcagccacatccttaaaaggccagatagggtcctcctcattctcgatggattcgaggaactggaagcacaggacgggttcctccacagcacctgcggaccagcccccgctgagccctgctccctgcgtgggctgctggccgggctgtttcagaagaagctgctgagggggtgtacgttacttctgactgcacgcccaaggggacgcctggtgcagtcactcagcaaggctgatgcgctctttgagctctccggtttttcaatggaacaagcccaggcgtatgtgatgcgctatttcgagtcgtcaggaatgaccgagcatcaggaccgggccctaaccctcctgagagatcgcccgcttttactctcgcactctcacagtcctaccctttgccgagcagtctgtcagctgtcagaggcactcctggaattaggtgaagatgccaaactcccatctactctgacagggttatacgtcggcttgctaggtagagcggcactcgatagtcctcccggcgccttggccgaactcgccaagcttgcgtgggagttaggacgccggcaccagagcacactgcaggaggatcagttccccagcgcagatgtccgaacatgggccatggccaaaggcctcgttcagcaccctccacgagctgctgaaagcgaactagcttttccatcattcctgttacagtgttttctgggagctctgtggttggccttgtccggagagatcaaagataaagaactgccccagtatttggccctgacccccaggaaaaagagaccctatgacaattggttggagggggttcctcgatttctagctggcctgatattccagcccccagctaggtgcttaggggccctgctaggaccgtccgcggccgctagcgtggatcgcaagcagaaggtgttggctcgttacttaaagagacttcagcctggtacacttagagcacggcagttgcttgagctcctccattgcgctcacgaggccgaggaggccgggatttggcagcacgtggtccaggagctcccaggaagacttagcttcctgggcacgcgcttgaccccaccagatgcccacgtcctggggaaagcacttgaggcggccggtcaggacttttccctcgacctgcgttccactggcatctgcccttccggtttaggctcgctggtaggattaagctgcgtgactaggttccgagccgcgctctctgacacggtggccctgtgggagagcctccagcagcatggggagaccaaacttctccaggcagccgaagagaagttcaccattgagccatttaaggccaaatcgttgaaggacgtagaagatttgggaaagctggtgcagactcagaggacccgatcttcaagcgaagacaccgctggggagcttcctgccgtgagggatctgaaaaaactcgagttcgccctgggcccagtgtctggacctcaggccttccccaagttggttcggatcctcactgcctttagtagcttacagcatctggacttggatgctctcagcgagaacaagataggtgacgaaggggtctcacagctctctgcgaccttccctcagctgaagagtctggaaacactcaaccttagccagaacaacataaccgatctgggggcgtataagcttgcagaagctctgccctctctggctgctagcctcttgcgactttccctctataataactgcatatgcgacgtgggggccgaaagtctggccagggtgcttcctgatatggtctcgctcagggtgatggacgtgcagtataacaaatttactgctgcgggagcgcagcagctcgctgcctctctgcgacggtgcccccacgtggagacacttgcaatgtggactccgactataccattctccgtgcaggaacatctgcagcaacaggattctcggatctcgcttcgatag

SEQ ID NO: 5325 - DNA, 1062 bp, Artificial Sequence
  derived and/or modified sequence
atgaggtgcctggctccccgccccgcaggctcttacctatccgagccacagggaagctcccagtgcgctactatggagctgggtcctttggagggagggtacctagagttgctcaattcagatgccgaccctctttgcctctatcacttttacgaccagatggatctcgccggagaggaggagatcgaactgtactccgagcctgatactgacaccatcaattgcgaccaattttcgaggcttttgtgtgatatggaaggcgacgaggaaaccagagaagcctacgcgaacattgccgagctggaccaatacgtgtttcaggactcccagctggaaggtctgagcaaagacatttttaaacatataggtccagacgaggttattggtgagtctatggagatgcccgctgaggtgggacaaaagtcacagaagaggccatttcctgaggagctgcctgcagacttaaagcactggaagccagcagagccccccaccgtggttacggggtccctcctggtgcgccctgtgtcagactgcagcacactcccatgcctgcctttaccagccttgttcaatcaagaacccgctagcggccaaatgagactggaaaagacggaccagatccctatgccattttcttctagttcattgtcctgcttgaatttgccagaaggacctatacagtttgtgccaactatatccacactgccccatggcctttggcagatctcagaagccgggacaggagtgagttcaatatttatctatcatggtgaagttcctcaagccagccaggttccacccccgtctggctttactgtgcacggactgccaactagccctgatcgcccaggttctactagccctttcgctccttccgccacagatctgccatcgatgccggagcctgcgctgactagcagagctaatatgacggaacataagacctcacctacacagtgccctgcagccggggaggtgagtaacaaactgcctaagtggcctggaagagaagtcccgcggaaaactcaactggggtccagtctgctgtttggaacatag

SEQ ID NO: 5326 - DNA, 3393 bp, Artificial Sequence
  derived and/or modified sequence
atgcgctgcctggcccccaggcctgctggcagctacctgtctgagccccagggcagcagccagtgtgccaccatggagctgggccccctggagggcggctacctggagctgctgaacagtgatgctgaccccctgtgcctgtaccacttctatgaccagatggacctggccggggaggaggagattgagctgtacagcgagccagacacagacaccatcaactgtgaccagttcagccggctgctgtgtgacatggagggagatgaggagacccgggaggcctatgccaacattgctgagctggaccagtatgtgttccaggacagccagctggagggcctgagcaaggacatcttcaagcacatcggcccagatgaagtcatcggggagagcatggagatgcctgctgaggtgggccagaagagccagaagaggcccttccctgaggagctgcctgctgacctgaagcactggaagccagctgagcccccaacagtggtgacaggcagcctgctggtgcggcctgtgtctgactgcagcaccctgccctgcctgcccctgcctgccctcttcaaccaggagcccgccagcggccagatgaggctggagaagacagaccagatccccatgcccttcagcagcagcagcctgagctgcctgaacctgcctgagggccccatccagtttgtgcccaccatcagcaccctgccccacggcctgtggcagatcagcgaggccggcaccggggtgagcagcatcttcatctaccatggagaggtgccccaggccagccaggtgcccccacccagcggcttcaccgtgcacggcctgcccaccagcccagaccggcccggcagcaccagcccctttgcccccagcgccacagacctgcccagcatgcctgagcccgccctgaccagccgggccaacatgacagagcacaagaccagccccacccagtgcccagctgctggggaggtgagcaacaagctgcccaagtggccagagcctgtggagcagttctaccgcagcctgcaggacacctatggagctgagcccgccggcccagatggcatcctggtggaggtggacctggtgcaggcccggctggagaggagcagcagcaagagcctggagcgggagctggccaccccagactgggccgagcggcagctggcccagggcggcctggccgaggtgctgctggccgccaaggagcaccggcggccccgggagaccagggtgattgctgtgctgggcaaggccggccagggcaagagctactgggccggggctgtgtcccgggcctgggcctgtggccgcctgccccagtatgactttgtgttttctgtgccctgccactgcctgaacagacctggagatgcctacggcctgcaggacctgctcttcagcctgggcccccagcccctggtggccgcagatgaggtgttcagccacatcctgaagaggccagacagagtgctgctgatcctggatggctttgaggagctggaggcccaggacggcttcctgcacagcacctgtggccctgccccagctgagccctgcagcctgcggggcctgctggccggcctcttccagaagaagctgctgcggggctgcaccctgctgctgacagcccggccccggggccgcctggtgcagagcctgagcaaggcagatgccctgtttgagctgagcggcttctccatggagcaggcccaggcctacgtgatgagatactttgagagcagcggcatgacagagcaccaggaccgggccctgaccctgctgcgggaccggcccctgctgctgagccacagccacagccccaccctgtgcagagctgtgtgccagctgtctgaggccctgctggagctgggagaagatgccaagctgcccagcaccctgaccggcctgtatgtgggcctgctgggccgggccgccctggacagccccccaggggccctggccgagctggccaagctggcctgggagctgggcagaagacaccagagcaccctgcaggaggaccagttccccagcgcagatgtgaggacctgggccatggccaagggcctggtgcagcacccccccagggctgctgagagcgagctggccttccccagcttcctgctgcagtgcttcctgggcgccctgtggctggccctgtctggagagatcaaggacaaggagctgccccagtacctggccctgacccccaggaagaagaggccctatgacaactggctggagggcgtgccccgcttcctggccggcctcatcttccagcccccagcccgctgcctgggcgccctgctgggccccagcgctgctgcctctgtggacaggaagcagaaggtgctggcccgctacctgaagaggctgcagcccggcaccctgcgggcccggcagctgctggagctgctgcactgtgcccacgaggccgaggaggccggcatctggcagcacgtggtgcaggagctgcccggccgcctgtccttcctgggcacccggctgaccccaccagatgcccacgtgctgggcaaggccctggaggccgccggccaggacttcagcctggacctgcggagcacaggcatctgccccagcggcctgggcagcctggtgggcctgagctgtgtgacccgcttccgggccgccctgagtgacacagtggccctgtgggagagcctgcagcagcacggggagaccaagctgctgcaggccgctgaggagaagttcaccatcgagcccttcaaggccaagagcctgaaggatgtggaggacctgggcaagctggtgcagacccagaggaccaggagcagcagcgaggacacagctggggagctgcctgctgtgcgggacctgaagaagctggagtttgccctgggccctgtgtctggcccccaggccttccccaagctggtgcgcatcctgacagccttcagcagcctgcagcacctggacctggatgccctgtctgagaacaagattggagatgaaggagtgtcccagctgagcgccaccttcccccagctgaagagcctggagaccctgaacctgagccagaacaacatcacagacctgggcgcctacaagctggccgaggccctgcccagcctggccgccagcctgctgcggctgagcctgtacaacaactgcatctgtgatgtgggcgctgagagcctggcccgggtgctgcctgacatggtgtccctgcgggtgatggatgtgcagtacaacaagttcaccgctgctggggcccagcagctggccgccagcctgcggcgctgcccccacgtggagaccctggccatgtggacccccaccatccccttctctgtgcaggagcacctgcagcagcaggacagccgcatcagcctgaggtag

SEQ ID NO: 5327 - DNA, 1062 bp, Artificial Sequence
  derived and/or modified sequence
atgcgctgcctggcccccaggcctgctggcagctacctgtctgagccccagggcagcagccagtgtgccaccatggagctgggccccctggagggcggctacctggagctgctgaacagtgatgctgaccccctgtgcctgtaccacttctatgaccagatggacctggccggggaggaggagattgagctgtacagcgagccagacacagacaccatcaactgtgaccagttcagccggctgctgtgtgacatggagggagatgaggagacccgggaggcctatgccaacattgctgagctggaccagtatgtgttccaggacagccagctggagggcctgagcaaggacatcttcaagcacatcggcccagatgaagtcatcggggagagcatggagatgcctgctgaggtgggccagaagagccagaagaggcccttccctgaggagctgcctgctgacctgaagcactggaagccagctgagcccccaacagtggtgacaggcagcctgctggtgcggcctgtgtctgactgcagcaccctgccctgcctgcccctgcctgccctcttcaaccaggagcccgccagcggccagatgaggctggagaagacagaccagatccccatgcccttcagcagcagcagcctgagctgcctgaacctgcctgagggccccatccagtttgtgcccaccatcagcaccctgccccacggcctgtggcagatcagcgaggccggcaccggggtgagcagcatcttcatctaccatggagaggtgccccaggccagccaggtgcccccacccagcggcttcaccgtgcacggcctgcccaccagcccagaccggcccggcagcaccagcccctttgcccccagcgccacagacctgcccagcatgcctgagcccgccctgaccagccgggccaacatgacagagcacaagaccagccccacccagtgcccagctgctggggaggtgagcaacaagctgcccaagtggccaggccgggaggtgcccaggaagacccagctgggcagcagcctgctgtttggcacctag

SEQ ID NO: 5328 - DNA, 3393 bp, Artificial Sequence
  derived and/or modified sequence
atgcggtgcctggccccccggcccgccggcagctacctgagcgagccccaaggctcatcccaatgcgctacaatggagcttggccctctggaaggagggtacctggagttgctgaattcggacgcggaccctctctgcctctaccacttttacgaccaaatggacctggcaggggaggaagaaatcgaactttacagtgaacctgacactgacacaataaattgtgatcagttttcgcgcctcctgtgtgatatggaaggcgatgaggagactcgtgaagcctatgcgaatatagccgagttggaccaatatgtgtttcaagactcccagctggaaggcctgagtaaggacatcttcaagcacattggtccagacgaggtcatcggcgagtccatggagatgccggccgaggtgggccagaagtcccaaaagcggccctttcctgaagagttgcctgcagatctgaagcactggaaaccagcggaaccaccgaccgtggttacaggttctcttctggttcgccctgtaagcgactgctcaacacttccatgcctgcctctgcccgccctcttcaaccaagagcctgctagcggtcaaatgcgccttgagaaaacagaccagatccctatgcccttttcaagcagctccctctcatgcctcaatctgccagagggtcccatccagttcgtgccaaccatatcgactcttcctcatgggctgtggcagatctctgaggcggggaccggggtctcttccatcttcatttaccatggtgaggtgccccaggcttcccaggttcccccaccttcaggctttacagttcacggtctgccaacctcaccggaccgtcctggctcaaccagtcccttcgcaccatccgccaccgatctgccatccatgcccgaacccgccttaacgtcgagagccaacatgaccgagcacaaaacatcaccaacgcagtgcccagccgcaggcgaggtctctaacaagctgcccaaatggcccgaacccgtcgagcagttctataggtcgctgcaggatacctacggcgctgagccagctggaccagacggcatcctggtagaggtcgatctcgtgcaggccaggctggaaagatcctccagcaaatctctagaacgcgagctcgccactcccgattgggcggaaaggcagttggctcagggaggcttggccgaggtgctactggccgctaaggagcaccgcagacccagagagacgcgcgtgattgccgttttgggtaaggctggccagggcaaatcctattgggctggcgccgtgtcccgtgcctgggcctgtggtcgattaccacagtacgacttcgtgttctctgtgccttgccattgtctgaatcggccaggcgatgcctacggtttgcaagacctgttgttctctctgggcccacagccgctcgtagctgctgatgaagtgttttctcacatcttgaagagacccgatagagtcctgttaattctggatggctttgaagagctcgaggcacaggacggctttctgcattcgacctgtggtcctgccccagctgagccatgttcactccggggcttactggcgggcctgtttcagaagaagctgttgcgcgggtgcactctgctgctgactgctaggccgcggggtcggcttgtgcaaagtctgagcaaggctgacgcactgtttgaactgagcggattcagcatggagcaggcacaggcttatgtgatgcgctatttcgaaagtagcggcatgaccgagcatcaggatagagccctaacactgttgcgagatagacctctgctgctgtcacatagccacagtcctacattgtgccgagcggtgtgtcaacttagtgaggcactgctcgagctgggggaagacgccaaactgcccagtaccctcaccggactctacgttggacttctggggagggccgcactcgactctccaccaggtgcactggccgaactggcgaagctggcatgggagctagggcggcgccaccaatccacactccaggaggatcagtttcctagtgctgacgtcagaacttgggcaatggctaaaggactcgttcagcatccgccacgcgccgcggaatcagagcttgctttcccttcgttcctgttacagtgctttttgggggccctatggctggcgctctccggggagattaaggataaagaattgcctcaatacttggccctcacaccacggaaaaaaagaccgtacgataattggctcgagggtgtcccccggtttctcgccggcctaatcttccagccacctgcgcggtgtctaggagctctgctgggaccctctgctgccgcgagcgtggacaggaaacagaaagtgctggccaggtatctgaaaagactgcagcctgggacgctgcgtgccaggcaactgctggagctcctccactgcgctcatgaagcggaggaggccggcatttggcagcacgtcgtccaagagctccctgggcgccttagctttctcggaacaagactgaccccgccagatgcccatgtgctcggcaaggcactggaagcggcaggccaggatttcagcctagacctgcggtccacgggtatctgcccctctgggttgggatctttggtcggcttgagctgtgtcacccgctttcgagccgctttatctgatacagtcgctctgtgggagtccttgcagcagcacggcgagaccaaacttctccaggccgcggaagagaagttcacaattgagcccttcaaagctaagtctctcaaagacgtggaggacctgggcaaactcgtgcagactcagcgtacacggagcagcagcgaagacaccgctggtgagctgcccgccgtcagagacttgaagaaactcgaattcgcattagggccggtgtcggggccgcaggcctttcccaagcttgtgaggattcttactgccttctctagcctacaacacctcgacctcgacgccctctcagaaaacaaaatcggagacgaaggagtgtcacaactttccgcaacttttccacaactgaagtccttggagacgctgaatctgtcccagaataatattacggatctcggggcttataagttggcagaagcattgcccagtctggccgcttccctcctgaggctctctctgtacaataactgcatttgtgacgtgggagccgagagtcttgctcgggtgctgcctgacatggtgtcccttagagtcatggacgtgcagtataataagtttacagctgcaggagctcagcaacttgctgcaagcctgaggaggtgcccgcacgtagagactttggctatgtggacccccacaattcctttttcagtgcaggaacatctgcagcagcaggactccagaatctctttacgttag

SEQ ID NO: 5329 - DNA, 1062 bp, Artificial Sequence
  derived and/or modified sequence
atgcggtgcctggccccccggcccgccggcagctacctgagcgagccgcagggcagtagccaatgtgctaccatggagcttggacctctagaggggggctacttggagctactgaacagtgacgcagacccactatgcctctatcacttttatgatcagatggatttggctggtgaggaggagatagagctgtacagcgagcctgacactgatactattaactgcgatcagttctcccggcttctttgtgacatggaaggtgacgaagaaacaagagaggcatacgccaacatcgccgaactagaccagtatgtcttccaggacagccaactggaagggctcagcaaggatatctttaagcatataggaccagacgaggtcatcggcgagtccatggaaatgcctgcagaggttggccagaagtctcagaagagacctttcccagaggagctgcccgccgaccttaagcattggaagcctgctgaaccacctaccgtggtaacaggatctctgttggtgagacccgtgtccgattgctctacactgccttgcctcccccttcccgccctgttcaaccaggaaccggccagtggacaaatgcggctggagaaaaccgatcagatacctatgccttttagttcttcttccctgtcttgcctgaacctgccagagggacccatccaattcgtgccaaccatttctaccctacctcacggactgtggcagataagtgaagccggaactggggtctcgagtatcttcatataccatggagaggtgccgcaggcctctcaagtaccccctccctccgggttcacagtgcatggtctgcctacttctccagatcggcctggatccactagtccctttgcaccatcggccaccgaccttccaagcatgcccgaacctgccctgacttcacgggctaacatgacagaacacaaaacctctcctacacagtgccccgccgcaggtgaggtctccaacaagctgcctaaatggccaggcagggaggtgccgagaaagacccaactcggctcaagtctgctatttggaacctag

SEQ ID NO: 5330 - DNA, 3393 bp, Artificial Sequence
  derived and/or modified sequence
atgaggtgcctagccccaagacccgctggttcgtatctgtcagaaccccagggtagttctcagtgtgccaccatggagcttgggccacttgaaggtgggtacttagagctcctgaatagtgatgccgaccctttatgtctgtatcatttttatgaccagatggatctggcaggagaagaggaaatcgagctgtactccgaacctgacacagataccattaactgcgaccagttctcacgccttctctgcgatatggagggcgatgaggagactagagaagcatatgccaatatcgcagagttggatcagtacgtttttcaagactctcagttagaagggcttagtaaagacatttttaagcatatcggcccagacgaggttattggggagagcatggaaatgcccgctgaggtgggccagaagtcacaaaagcggccatttcccgaagagctgcctgccgacctaaaacactggaaaccggctgagccacctactgtcgtcactggatccctgctcgtgcggcctgtaagcgattgctcaacactcccctgcctgccgctgccagccttattcaatcaggaacccgcttcaggccagatgcgccttgaaaaaaccgaccagatcccaatgccgttctctagcagctcactgagctgcttgaatctccctgagggacctattcaatttgtgccgaccatctccaccttgcctcacgggctgtggcaaatctccgaagcagggacaggtgtgtccagcatctttatctaccacggtgaggtgccacaggcctctcaagtacctcccccttcaggcttcactgtgcatggcctgcctacctcccctgacagacctggctctaccagtccttttgcccctagtgccactgacctgccatccatgccagaaccagccttaacctctcgggctaacatgactgagcacaaaacaagcccaacacagtgtcctgccgctggcgaggtatcaaataagctaccaaagtggcccgaacctgtcgagcagttttaccgatccctgcaggatacatacggagctgagccagcaggacccgacggaatactcgtggaagtcgatctcgtgcaggcaaggctggaacgctcctcatccaaaagcctcgaacgcgaattggcaacccctgactgggctgaacggcaacttgctcaggggggtttagcggaggtgttactagccgctaaggagcatcgcagacctagggagacccgcgtgattgccgtgttgggaaaagcaggccaggggaagtcatattgggccggtgcggtgtcccgggcttgggcttgcggtaggctgccacagtatgacttcgtgttcagcgtgccttgccattgcctaaacaggcctggcgacgcgtacgggctgcaggaccttcttttttccctgggcccacagcccctggttgcagcagacgaagtattctcgcatattcttaagagaccagacagagtgctgctgatcctcgatggtttcgaagaattagaggcgcaggatggtttcctgcacagcacttgcgggccagcccctgcggagccctgcagtctgagggggctcctggcgggtctgttccagaagaaactgcttcgaggctgcaccctgctgctgacagcgagacccaggggaagactagtgcagagtctgagcaaggctgatgctctcttcgagctctctggatttagtatggagcaggcccaggcctatgtgatgcgctatttcgaaagctctggtatgacagaacaccaagatcgagcgctgactttattgcgagaccgtccacttctgctctcccatagccactcccccacgctgtgccgcgcagtttgtcagctgtctgaggccctcctggagctgggggaggacgctaagctgccgtccactctgaccggactctacgtgggcctactggggcgagcggcacttgactctccgcctggagcccttgcagagctggccaaattagcctgggagctcggcagaagacaccaatccacactccaagaagatcagtttccgagtgccgatgtgaggacctgggctatggcgaaaggcctggttcagcacccccctcgggcagctgaaagtgaactagcattcccgagcttcctgctccaatgcttcctcggtgcactgtggctcgccctttcaggagagatcaaagataaagagttgccccagtatctcgccctaacacccagaaaaaagcgcccttatgacaactggctggagggcgtcccacggtttctggcaggcctgatttttcagcctccagcgagatgcttaggagcactgctggggccatctgcagccgctagcgtagataggaagcagaaggtgctggcaaggtatctgaaacggctgcagcctggaacactcagggccaggcagttactagagctgctgcattgcgctcacgaggccgaggaggcaggcatctggcagcacgtggtgcaggagttacccggtaggctgtccttcctgggcacacggttgacaccccctgatgcgcacgtgctgggcaaggccctcgaggccgctgggcaggatttttctcttgacttgcgatccacaggcatatgcccttcaggacttggctcactcgtgggcctgtcttgtgtcaccaggtttagggccgctctgtccgacacagtggccctgtgggaatctctacagcagcatggagaaacaaagttactgcaagctgcggaagaaaaatttactatcgagccatttaaggcaaagtcgctgaaagatgtcgaggacttgggaaaacttgtacagacacaacgcactcgctcctcctcggaagacacagccggtgagctgcccgcagttcgcgacttaaaaaaactcgaatttgccttaggcccagtgtcggggcctcaagccttccctaaactggtcaggatcctcacagcgttctccagcttgcagcaccttgacttggacgcgctctccgaaaataagatcggtgacgagggggtatctcagctttcagcaactttcccgcagctgaaaagtttggagacacttaacctatcccaaaacaatatcactgatctcggcgcatataaactggcagaggctcttcctagcctcgccgcatccctattgcgtctgtccttgtacaataactgtatctgcgacgtgggggcagaatccctcgctcgcgttctgccggacatggtctctctgagagtgatggatgtgcagtacaataagtttacggcggcaggagctcaacagctggccgcatcattgaggagatgcccccacgtcgagacattagctatgtggacccccacaatcccattctccgtgcaggagcaccttcaacagcaggatagtagaatctcgctgagatag

SEQ ID NO: 5331 - DNA, 1062 bp, Artificial Sequence
  derived and/or modified sequence
atgaggtgtctggctcctcgcccagctggatcctacctttcagagccccaaggcagttcacagtgcgccacaatggaactaggaccactcgaggggggttacctggaactcctgaacagtgatgccgatcctctgtgtctttaccatttttacgatcagatggacctggctggcgaggaagagatcgaactgtattcagaacccgacaccgatacaatcaactgtgatcagttctcacggcttctttgtgacatggaaggggatgaggaaacccgggaggcctatgccaatatcgctgaattggaccagtatgtctttcaggattctcaactcgaagggctgagtaaagatattttcaagcatatcgggccagacgaagtcatcggcgaaagcatggaaatgcccgctgaagtgggtcagaaatctcagaagcgcccattccctgaggaactccctgccgacttgaagcactggaaaccggcagagcccccaaccgtggtgactggatcgttgctggtccgacctgtctccgactgcagtaccttaccttgtctgcccttaccggcattattcaatcaggagccggctagcggccagatgagattggagaagactgatcagattccaatgcctttctctagtagctccttaagttgtctgaacctgcctgagggacccatccagtttgttcctactatcagcacactgccacacggtctgtggcagatctcagaggcaggcactggggtctctagtatcttcatctaccatggcgaggttcctcaggcctctcaagtgccacctccctccggttttaccgtgcacgggctccccacctcccccgatcggcctggaagcacatcccctttcgcacccagtgccactgatctaccttccatgccagagcctgccctgacctcccgagccaacatgacagagcataagacctccccaacacagtgccctgctgccggtgaggtgagcaacaagctgccgaaatggccaggacgggaggtccctcgaaagactcagttaggaagcagcctcttattcggaacctag

SEQ ID NO: 5332 - DNA, 9454 bp, Artificial Sequence
  derived and/or modified sequence
ctcccaactggtgactggttagtgatgaggctagtgatgaggctgtgtgcttctgagctgggcatccgaaggcatccttggggaagctgagggcacgaggaggggctgccagactccgggagctgctgcctggctgggattcctacacaatgcgttgcctggctccacgccctgctgggtcctacctgtcagagccccaaggcagctcacagtgtgccaccatggagttggggcccctagaaggtggctacctggagcttcttaacagcgatgctgaccccctgtgcctctaccacttctatgaccagatggacctggctggagaagaagagattgagctctactcagaacccgacacagacaccatcaactgcgaccagttcagcaggctgttgtgtgacatggaaggtgatgaagagaccagggaggcttatgccaatatcgcggaactggaccagtatgtcttccaggactcccagctggagggcctgagcaaggacattttcaagcacataggaccagatgaagtgatcggtgagagtatggagatgccagcagaagttgggcagaaaagtcagaaaagacccttcccagaggagcttccggcagacctgaagcactggaagccagctgagccccccactgtggtgactggcagtctcctagtgagaccagtgagcgactgctccaccctgccctgcctgccactgcctgcgctgttcaaccaggagccagcctccggccagatgcgcctggagaaaaccgaccagattcccatgcctttctccagttcctcgttgagctgcctgaatctccctgagggacccatccagtttgtccccaccatctccactctgccccatgggctctggcaaatctctgaggctggaacaggggtctccagtatattcatctaccatggtgaggtgccccaggccagccaagtaccccctcccagtggattcactgtccacggcctcccaacatctccagaccggccaggctccaccagccccttcgctccatcagccactgacctgcccagcatgcctgaacctgccctgacctcccgagcaaacatgacagagcacaagacgtcccccacccaatgcccggcagctggagaggtctccaacaagcttccaaaatggcctgagccggtggagcagttctaccgctcactgcaggacacgtatggtgccgagcccgcaggcccggatggcatcctagtggaggtggatctggtgcaggccaggctggagaggagcagcagcaagagcctggagcgggaactggccaccccggactgggcagaacggcagctggcccaaggaggcctggctgaggtgctgttggctgccaaggagcaccggcggccgcgtgagacacgagtgattgctgtgctgggcaaagctggtcagggcaagagctattgggctggggcagtgagccgggcctgggcttgtggccggcttccccagtacgactttgtcttctctgtcccctgccattgcttgaaccgtccgggggatgcctatggcctgcaggatctgctcttctccctgggcccacagccactcgtggcggccgatgaggttttcagccacatcttgaagagacctgaccgcgttctgctcatcctagacggcttcgaggagctggaagcgcaagatggcttcctgcacagcacgtgcggaccggcaccggcggagccctgctccctccgggggctgctggccggccttttccagaagaagctgctccgaggttgcaccctcctcctcacagcccggccccggggccgcctggtccagagcctgagcaaggccgacgccctatttgagctgtccggcttctccatggagcaggcccaggcatacgtgatgcgctactttgagagctcagggatgacagagcaccaagacagagccctgacgctcctccgggaccggccacttcttctcagtcacagccacagccctactttgtgccgggcagtgtgccagctctcagaggccctgctggagcttggggaggacgccaagctgccctccacgctcacgggactctatgtcggcctgctgggccgtgcagccctcgacagcccccccggggccctggcagagctggccaagctggcctgggagctgggccgcagacatcaaagtaccctacaggaggaccagttcccatccgcagacgtgaggacctgggcgatggccaaaggcttagtccaacacccaccgcgggccgcagagtccgagctggccttccccagcttcctcctgcaatgcttcctgggggccctgtggctggctctgagtggcgaaatcaaggacaaggagctcccgcagtacctagcattgaccccaaggaagaagaggccctatgacaactggctggagggcgtgccacgctttctggctgggctgatcttccagcctcccgcccgctgcctgggagccctactcgggccatcggcggctgcctcggtggacaggaagcagaaggtgcttgcgaggtacctgaagcggctgcagccggggacactgcgggcgcggcagctgctggagctgctgcactgcgcccacgaggccgaggaggctggaatttggcagcacgtggtacaggagctccccggccgcctctcttttctgggcacccgcctcacgcctcctgatgcacatgtactgggcaaggccttggaggcggcgggccaagacttctccctggacctccgcagcactggcatttgcccctctggattggggagcctcgtgggactcagctgtgtcacccgtttcagggctgccttgagcgacacggtggcgctgtgggagtccctgcagcagcatggggagaccaagctacttcaggcagcagaggagaagttcaccatcgagcctttcaaagccaagtccctgaaggatgtggaagacctgggaaagcttgtgcagactcagaggacgagaagttcctcggaagacacagctggggagctccctgctgttcgggacctaaagaaactggagtttgcgctgggccctgtctcaggcccccaggctttccccaaactggtgcggatcctcacggccttttcctccctgcagcatctggacctggatgcgctgagtgagaacaagatcggggacgagggtgtctcgcagctctcagccaccttcccccagctgaagtccttggaaaccctcaatctgtcccagaacaacatcactgacctgggtgcctacaaactcgccgaggccctgccttcgctcgctgcatccctgctcaggctaagcttgtacaataactgcatctgcgacgtgggagccgagagcttggctcgtgtgcttccggacatggtgtccctccgggtgatggacgtccagtacaacaagttcacggctgccggggcccagcagctcgctgccagccttcggaggtgtcctcatgtggagacgctggcgatgtggacgcccaccatcccattcagtgtccaggaacacctgcaacaacaggattcacggatcagcctgagatgatcccagctgtgctctggacaggcatgttctctgaggacactaaccacgctggaccttgaactgggtacttgtggacacagctcttctccaggctgtatcccatgagcctcagcatcctggcacccggcccctgctggttcagggttggcccctgcccggctgcggaatgaaccacatcttgctctgctgacagacacaggcccggctccaggctcctttagcgcccagttgggtggatgcctggtggcagctgcggtccacccaggagccccgaggccttctctgaaggacattgcggacagccacggccaggccagagggagtgacagaggcagccccattctgcctgcccaggcccctgccaccctggggagaaagtacttctttttttttatttttagacagagtctcactgttgcccaggctggcgtgcagtggtgcgatctgggttcactgcaacctccgcctcttgggttcaagcgattcttctgcttcagcctcccgagtagctgggactacaggcacccaccatcatgtctggctaatttttcatttttagtagagacagggttttgccatgttggccaggctggtctcaaactcttgacctcaggtgatccacccacctcagcctcccaaagtgctgggattacaagcgtgagccactgcaccgggccacagagaaagtacttctccaccctgctctccgaccagacaccttgacagggcacaccgggcactcagaagacactgatgggcaacccccagcctgctaattccccagattgcaacaggctgggcttcagtggcagctgcttttgtctatgggactcaatgcactgacattgttggccaaagccaaagctaggcctggccagatgcaccagcccttagcagggaaacagctaatgggacactaatggggcggtgagaggggaacagactggaagcacagcttcatttcctgtgtcttttttcactacattataaatgtctctttaatgtcacaggcaggtccagggtttgagttcataccctgttaccattttggggtacccactgctctggttatctaatatgtaacaagccaccccaaatcatagtggcttaaaacaacactcacatttattctgctcacatatctgtcatttgagcagggctcagcggggacagctccttctgtcctactctgtgtcaggtggggcagcttgagggttgggctggtgtcacctgaagactcattcttctgtacgtctgacaggcaatgctggctgttggctgggggcctcagtgccactacggaatagttggctaggacccctccatgtgggctagttgggcttcctcatagtatggtggctgggttggagggtgtcccaaaaagaaaggaggggatagagagagaccacttttcataacctagccttagaagtcacacagtattacttctgctacatatatatgttttaagaggcagggtctcactctgtcgcccagtctggaatgcagtggtatgatcacggctcactgcagcctcaacctcctgggctaagtgatcctcccacctcagcctcccgaatagctgggactacaggtgtgagtcaccaagcccagttaatctttagttttatttttgtagagccagggtctcactatgttgcccaggcaggtcttgaactcctggcctcaagtgattctcctgcctcagcctcccaaagtgctgggattacaggtgtgaaccaccacacccagcccacttctgccatattctgttggccagtgtgacaaggattgctactgtcctacccaccctcctttcaccacatgtgcacatgcacgtgtgtgcacgtacacacacatacacacacacgcgtgcacacaccagagcccaccttggctcaagtcctcttttctgagaggacttttctttgtggcttcctaaaattcagtggaaaattaattgtttggggatgagaaaggttgaagcaccaaaagcttaccaaggggaatgtttgcctctgcctctgacacacagctctgtcctgggagtgagctggtttttagcggagacggagtcccaccttggctgcagggagtccgaaagggacttggaagctccgctttctacccagcgagctgccggcacgactgttgcttttcactcgggcatagtctgctcagaagccccaattcaagacatcttagcttactcctggtggcagtgggagctgcctgttcagctccagctcaccagccccagtgcccacaggatcagtctgattcccaagctctgctcctctccccagcaagtgagagctgggtgtcaagagggtctgaggaatccagacccggctgcgtggttgatgatctttgcagacaggcaagcacctcctgcctcgaactggctgcaaagggtatcaggtgctgccatccaggttcagcttgtaaatagctcaggtgtcaccctgcaagggatccctgcacttgcagactctacagaggccatgggcctcctgtgtgtgcgcctacaggagtgagcactaaggtgtgctctgatcatccactgtgccatgtgccaggtttttggtctgacccactgcttttggtctgtgtgatgatgaaatgaggtcagagcctgcagttattaacactaacgatttgttaatgatagctactgtttattattttatttaatttttttgagacagagttttcactcttattgcccacgctggagtgcagtggcatgatctcggctcactgcaacctctgcctcctgggttcaagcaattctcccacctcagcctcccaagtagctgggattacaggcatgcaccaccacgcctggctaatttttgtatttttagtagagatggagtttcaccatgttggccaggctggtaatctgcctgccttggcctcccaaagtgctgggattacaggggtgagccaccgcacccggccactactgtttatttaatgagcagatacatgcaaagcccttatcacagtgcaagggaaattcaaagcgctcagaaagtattagctcaataagtgatgactgtgtgccagacactgtgctaaactcctactcaagagggataagagtctaggggcaagtggcagagactctagaacgagattgcctgggctcaacgcccacctcaccacttacttatgcaagctagttctctgtgcctcagtctcctcatttgtaaaatgggcataaccacagcaccttctttataggattatgtgaaggtgtggtgagctaatacgttaagaattggagctcaataacatgttggctgtcattattacatatatctgtgtttcattcttgcctctggctggaatgttcttcccagctctccatatggctgatttctcatccttcgggacttgccccattctccaaccccatcactagttttatctttttcacttatttatgcagtctgctcttgtcctaggacatgagctccaggagggcgggaaacatctcgctttgtacactgctgtgccctctgtacccagcaaggcgcctgtgtataataggtgctcaataacataaaatgaacaaataatcctcacctaacggtttcattcattctgcaaatacatactgacagcacagtcatgaataagatgttcctgccctggtgagtcttatattttagcaaattaaaaaaactctttggacagggctgccaggtgaggttggccagtctgtacactgcacaaaggcacctgggacaagggggaacatgggggctgcaaaccagtctgggttctgcttgccaaactgggagtcctggtgtggagccttttaacccagaggggcatcttttcgtagttaacgcacagtcatcgtaagatgtggataaattactgtctccgtgtcacagatctaagtgatacttatagtcacactcctataaaggaatggacttctgacttctttggaggacctctctgcagggacaggcacagtgtgccggaagtgcccctgaaccccatttgtcaggtggtaaagcgctgctcggaggaatcagggcatgatagtgcaattccatgtccagtggattgtaagtccacgcaccttccaaatggtcactcttcctcgcaggcctctctctgcatacaaatgtctccctcctgacgctcacctttttccctggggctctcaaatgtcttcttttcagatttcgtagcttttctttctttagcatcacttgagggcaagtggtgctccaactgtctccccccagagttctgccgcctgtactctcccacacctcagtctcctcgcctgtagaaaggggtcaatcgtttgaaccctgcttcacttggtgtgtatgtgaaggtgctttgaaatcaagtgctctgcaaactggagagaattactgcttgtattccgtgaaactacaagctcccaattccactcatttaatccctctcttgctctgttgcccaggctggaatgcagtggcatgatctcaactcactgcaacctctgcctccctggtttcaagcaattctcctgcctcagcctcccgagtagctgggactataagtgtgcgccactatgcctggctaatttttttgtatttttagtagagatggggtttcaccgtggtggccaggctggtctcgaactcctaacctcaagtgatctgcccgcctcggccttccaaagtgctgggattacaggcatgagccaccatgccaagcccttcccccctatctttaatgaaggtctaccatgtgcctgacacaggggatacccacccccacttctatgggattcaggcctggtttccagcttggccttcaggcttttcccaccacaccccaaatgctgtccctggcttgtggagtggggcagggggccagcctgggactttcacgccagcccgactggggcagactctctcaaccccactggatcttctgctgtttgtcagccacaaggttctgcctagaactcctttcccgaatctcaaagttaaaaaaaaaggcagggccccaggggttggagttgcatacatttttttttaatccaaagaagtaagcctcctaagtattgcttagacaggtttatcagaattaagtaggcacaacactcatactttcagaaaagcatttccagccaggggagtaacgtggcactcaccagcatgatgtctgttttgccaacttgctgaagaacgagtaacctgaaatgaaggagcgagaatcccaccctcagccccccaacagcttcctcagcttctttttcttctgagtcacccctgaaacagtcgctgcatctaagaccagcctcgggctaaacccagctggcctgaaggctcaactcacatcaaacggagctgggagtcgcttttgcgtgtgtccgcagtttgaagtgtcctctccgaaggtgaagtgggggaagcaggtgcgctccgggatgaagtgcagggaggcaaactctggctgggttcctgtaaacatccatcgcagctgcaaataatcagaagccaaggccaggccatcgatttgacactgcaggcagatgaggtcttgggatgcctcttgcgttcccccttctgtgggagcaggtgccttcccaacctcagcactcagtcccaatctctcttccactctcctgggttcaaacaggaacctctctgttggcacgaagcttttgaggggagcaggtctaacaagaaggaaaaaggggggttattagcacggaagccccaccctgccaccaggttggctggggacagggaccaatccaccaggctcgggaggcttggggtggggcagggaagtcttcctccatccctcaaatttagggaaccactgggagccccagactcaggctgaaaatgtctttctgcaaatataaaactctttttaatgaa

SEQ ID NO: 5333 - DNA, 1062 bp, Artificial Sequence
  derived and/or modified sequence
atgcgttgcctggctccacgccctgctgggtcctacctgtcagagccccaaggcagctcacagtgtgccaccatggagttggggcccctagaaggtggctacctggagcttcttaacagcgatgctgaccccctgtgcctctaccacttctatgaccagatggacctggctggagaagaagagattgagctctactcagaacccgacacagacaccatcaactgcgaccagttcagcaggctgttgtgtgacatggaaggtgatgaagagaccagggaggcttatgccaatatcgcggaactggaccagtatgtcttccaggactcccagctggagggcctgagcaaggacattttcaagcacataggaccagatgaagtgatcggtgagagtatggagatgccagcagaagttgggcagaaaagtcagaaaagacccttcccagaggagcttccggcagacctgaagcactggaagccagctgagccccccactgtggtgactggcagtctcctagtgagaccagtgagcgactgctccaccctgccctgcctgccactgcctgcgctgttcaaccaggagccagcctccggccagatgcgcctggagaaaaccgaccagattcccatgcctttctccagttcctcgttgagctgcctgaatctccctgagggacccatccagtttgtccccaccatctccactctgccccatgggctctggcaaatctctgaggctggaacaggggtctccagtatattcatctaccatggtgaggtgccccaggccagccaagtaccccctcccagtggattcactgtccacggcctcccaacatctccagaccggccaggctccaccagccccttcgctccatcagccactgacctgcccagcatgcctgaacctgccctgacctcccgagcaaacatgacagagcacaagacgtcccccacccaatgcccggcagctggagaggtctccaacaagcttccaaaatggcctggacgagaagttcctcggaagacacagctggggagctccctgctgttcgggacctaa

SEQ ID NO: 5334 - DNA, 3393 bp, Artificial Sequence
  derived and/or modified sequence
atgagatgcctggcccccagacccgccggcagctacctgagcgagccccagggcagcagccagtgcgccaccatggagctgggccccctggagggcggctacctggagctgctgaacagcgacgccgaccccctgtgcctgtaccacttctacgaccagatggacctggccggcgaggaggagatcgagctgtacagcgagcccgacaccgacaccatcaactgcgaccagttcagcagactgctgtgcgacatggagggcgacgaggagaccagagaggcctacgccaacatcgccgagctggaccagtacgtgttccaggacagccagctggagggcctgagcaaggacatcttcaagcacatcggccccgacgaggtgatcggcgagagcatggagatgcccgccgaggtgggccagaagagccagaagagacccttccccgaggagctgcccgccgacctgaagcactggaagcccgccgagccccccaccgtggtgaccggcagcctgctggtgagacccgtgagcgactgcagcaccctgccctgcctgcccctgcccgccctgttcaaccaggagcccgccagcggccagatgagactggagaagaccgaccagatccccatgcccttcagcagcagcagcctgagctgcctgaacctgcccgagggccccatccagttcgtgcccaccatcagcaccctgccccacggcctgtggcagatcagcgaggccggcaccggcgtgagcagcatcttcatctaccacggcgaggtgccccaggccagccaggtgcccccccccagcggcttcaccgtgcacggcctgcccaccagccccgacagacccggcagcaccagccccttcgcccccagcgccaccgacctgcccagcatgcccgagcccgccctgaccagcagagccaacatgaccgagcacaagaccagccccacccagtgccccgccgccggcgaggtgagcaacaagctgcccaagtggcccgagcccgtggagcagttctacagaagcctgcaggacacctacggcgccgagcccgccggccccgacggcatcctggtggaggtggacctggtgcaggccagactggagagaagcagcagcaagagcctggagagagagctggccacccccgactgggccgagagacagctggcccagggcggcctggccgaggtgctgctggccgccaaggagcacagaagacccagagagaccagagtgatcgccgtgctgggcaaggccggccagggcaagagctactgggccggcgccgtgagcagagcctgggcctgcggcagactgccccagtacgacttcgtgttcagcgtgccctgccactgcctgaacagacccggcgacgcctacggcctgcaggacctgctgttcagcctgggcccccagcccctggtggccgccgacgaggtgttcagccacatcctgaagagacccgacagagtgctgctgatcctggacggcttcgaggagctggaggcccaggacggcttcctgcacagcacctgcggccccgcccccgccgagccctgcagcctgagaggcctgctggccggcctgttccagaagaagctgctgagaggctgcaccctgctgctgaccgccagacccagaggcagactggtgcagagcctgagcaaggccgacgccctgttcgagctgagcggcttcagcatggagcaggcccaggcctacgtgatgagatacttcgagagcagcggcatgaccgagcaccaggacagagccctgaccctgctgagagacagacccctgctgctgagccacagccacagccccaccctgtgcagagccgtgtgccagctgagcgaggccctgctggagctgggcgaggacgccaagctgcccagcaccctgaccggcctgtacgtgggcctgctgggcagagccgccctggacagcccccccggcgccctggccgagctggccaagctggcctgggagctgggcagaagacaccagagcaccctgcaggaggaccagttccccagcgccgacgtgagaacctgggccatggccaagggcctggtgcagcacccccccagagccgccgagagcgagctggccttccccagcttcctgctgcagtgcttcctgggcgccctgtggctggccctgagcggcgagatcaaggacaaggagctgccccagtacctggccctgacccccagaaagaagagaccctacgacaactggctggagggcgtgcccagattcctggccggcctgatcttccagccccccgccagatgcctgggcgccctgctgggccccagcgccgccgccagcgtggacagaaagcagaaggtgctggccagatacctgaagagactgcagcccggcaccctgagagccagacagctgctggagctgctgcactgcgcccacgaggccgaggaggccggcatctggcagcacgtggtgcaggagctgcccggcagactgagcttcctgggcaccagactgaccccccccgacgcccacgtgctgggcaaggccctggaggccgccggccaggacttcagcctggacctgagaagcaccggcatctgccccagcggcctgggcagcctggtgggcctgagctgcgtgaccagattcagagccgccctgagcgacaccgtggccctgtgggagagcctgcagcagcacggcgagaccaagctgctgcaggccgccgaggagaagttcaccatcgagcccttcaaggccaagagcctgaaggacgtggaggacctgggcaagctggtgcagacccagagaaccagaagcagcagcgaggacaccgccggcgagctgcccgccgtgagagacctgaagaagctggagttcgccctgggccccgtgagcggcccccaggccttccccaagctggtgagaatcctgaccgccttcagcagcctgcagcacctggacctggacgccctgagcgagaacaagatcggcgacgagggcgtgagccagctgagcgccaccttcccccagctgaagagcctggagaccctgaacctgagccagaacaacatcaccgacctgggcgcctacaagctggccgaggccctgcccagcctggccgccagcctgctgagactgagcctgtacaacaactgcatctgcgacgtgggcgccgagagcctggccagagtgctgcccgacatggtgagcctgagagtgatggacgtgcagtacaacaagttcaccgccgccggcgcccagcagctggccgccagcctgagaagatgcccccacgtggagaccctggccatgtggacccccaccatccccttcagcgtgcaggagcacctgcagcagcaggacagcagaatcagcctgagatag

SEQ ID NO: 5335 - DNA, 1062 bp, Artificial Sequence
  derived and/or modified sequence
atgagatgcctggcccccagacccgccggcagctacctgagcgagccccagggcagcagccagtgcgccaccatggagctgggccccctggagggcggctacctggagctgctgaacagcgacgccgaccccctgtgcctgtaccacttctacgaccagatggacctggccggcgaggaggagatcgagctgtacagcgagcccgacaccgacaccatcaactgcgaccagttcagcagactgctgtgcgacatggagggcgacgaggagaccagagaggcctacgccaacatcgccgagctggaccagtacgtgttccaggacagccagctggagggcctgagcaaggacatcttcaagcacatcggccccgacgaggtgatcggcgagagcatggagatgcccgccgaggtgggccagaagagccagaagagacccttccccgaggagctgcccgccgacctgaagcactggaagcccgccgagccccccaccgtggtgaccggcagcctgctggtgagacccgtgagcgactgcagcaccctgccctgcctgcccctgcccgccctgttcaaccaggagcccgccagcggccagatgagactggagaagaccgaccagatccccatgcccttcagcagcagcagcctgagctgcctgaacctgcccgagggccccatccagttcgtgcccaccatcagcaccctgccccacggcctgtggcagatcagcgaggccggcaccggcgtgagcagcatcttcatctaccacggcgaggtgccccaggccagccaggtgcccccccccagcggcttcaccgtgcacggcctgcccaccagccccgacagacccggcagcaccagccccttcgcccccagcgccaccgacctgcccagcatgcccgagcccgccctgaccagcagagccaacatgaccgagcacaagaccagccccacccagtgccccgccgccggcgaggtgagcaacaagctgcccaagtggcccggcagagaggtgcccagaaagacccagctgggcagcagcctgctgttcggcacctag

SEQ ID NO: 5336 - protein, 245 aa, Artificial Sequence
  derived and/or modified sequence
MGQRDQRLDRERKGPQDDPGSYQGPERRNFLKEDAMKTKTHYHAMHADCLQELRRYLKSGVVLRRTVPPMVNVTRSEASEGNITVTCRASGFYPWNITLSWRQDGVSLSHDTQQWGDVLPDGNGTYQTWVATRICQGEEQRFTCYMEHSGNHSTHPVPSGKVLVLQSHWQTFHVSAVAAAAIFVIIIFYVRCCKKKTSAAEGPELVSLQVLDQHPVGTSDHRDATQLGFQPLMSDLGSTGSTEGA

SEQ ID NO: 5337 - protein, 383 aa, Artificial Sequence
  derived and/or modified sequence
MGLGPVFLLLAGIFPFAPPGAAAEPHSLRYNLTVLSWDGSVQSGFLTEVHLDGQPFLRCDRQKCRAKPQGQWAEDVLGNKTWDRETRDLTGNGKDLRMTLAHIKDQKEGLHSLQEIRVCEIHEDNSTRSSQHFYYDGELFLSQNLETKEWTMPQSSRAQTLAMNVRNFLKEDAMKTKTHYHAMHADCLQELRRYLKSGVVLRRTVPPMVNVTRSEASEGNITVTCRASGFYPWNITLSWRQDGVSLSHDTQQWGDVLPDGNGTYQTWVATRICQGEEQRFTCYMEHSGNHSTHPVPSGKVLVLQSHWQTFHVSAVAAAAIFVIIIFYVRCCKKKTSAAEGPELVSLQVLDQHPVGTSDHRDATQLGFQPLMSDLGSTGSTEGA

SEQ ID NO: 5338 - protein, 385 aa, Artificial Sequence
  derived and/or modified sequence
MGLGPVFLLLAGIFPFAPPGAAAEPHSLRYNLTVLSWDGSVQSGFLAEVHLDGQPFLRYDRQKCRAKPQGQWAEDVLGNKTWDRETRDLTGNGKDLRMTLAHIKDQKEGLHSLQEIRVCEIHEDNSTRSSQHFYYDGELFLSQNVETEEWTVPQSSRAQTLAMNVRNFLKEDAMKTKTHYHAMHADCLQELRRYLESSVVLRRRVPPMVNVTRSEASEGNITVTCRASSFYPRNITLTWRQDGVSLSHDTQQWGDVLPDGNGTYQTWVATRICQGEEQRFTCYMEHSGNHSTHPVPSGKVLVLQSHWQTFHVSAVAAAAAAIFVIIIFYVRCCKKKTSAAEGPELVSLQVLDQHPVGTSDHRDATQLGFQPLMSALGSTGSTEGA

SEQ ID NO: 5339 - protein, 247 aa, Artificial Sequence
  derived and/or modified sequence
MGQRDQGLDRERKGPQDDPGSYQGPERRNFLKEDAMKTKTHYHAMHADCLQELRRYLESSVVLRRRVPPMVNVTRSEASEGNITVTCRASSFYPRNITLTWRQDGVSLSHDTQQWGDVLPDGNGTYQTWVATRICQGEEQRFTCYMEHSGNHSTHPVPSGKVLVLQSHWQTFHVSAVAAAAAAIFVIIIFYVRCCKKKTSAAEGPELVSLQVLDQHPVGTSDHRDATQLGFQPLMSALGSTGSTEGA

SEQ ID NO: 5340 - protein, 342 aa, Artificial Sequence
  derived and/or modified sequence
MGLGPVFLLLAGIFPFAPPGAAAEPHSLRYNLTVLSWDGSVQSGFLAEVHLDGQPFLRYDRQKCRAKPQGQWAEDVLGNKTWDRETRDLTGNGKDLRMTLAHIKDQKEVPQSSRAQTLAMNVRNFLKEDAMKTKTHYHAMHADCLQELRRYLESSVVLRRRVPPMVNVTRSEASEGNITVTCRASSFYPRNITLTWRQDGVSLSHDTQQWGDVLPDGNGTYQTWVATRICQGEEQRFTCYMEHSGNHSTHPVPSGKVLVLQSHWQTFHVSAVAAAAAAIFVIIIFYVRCCKKKTSAAEGPELVSLQVLDQHPVGTSDHRDATQLGFQPLMSALGSTGSTEGA

SEQ ID NO: 5341 - DNA, 738 bp, Artificial Sequence
  derived and/or modified sequence
atgggtcagcgtgatcagagactcgatcgggaacggaagggcccacaggacgatcccggcagctatcagggccctgagaggcgaaatttccttaaagaagatgccatgaagacgaagacacactaccatgcaatgcacgccgattgcctgcaggaattgaggcggtatcttaaaagtggagtggttttgcgccgcacagttccccccatggtgaatgtaacacggtccgaggcatccgaggggaatataacagtcacgtgtcgcgcatctggtttctatccatggaatatcaccctctcgtggcggcaagatggggtatctctctcccacgacactcagcagtggggcgacgtcctgccagacggaaacggaacttaccaaacgtgggtggctactcgaatatgccagggtgaggagcagcggttcacatgctatatggagcacagcggcaatcatagtacacaccccgtgccatctgggaaggtactggtgctgcaatcccattggcagacattccacgtgtcagctgttgccgccgccgccatcttcgtgattatcatcttctacgtgcggtgttgcaaaaaaaagacctcagctgcagagggtcctgagcttgtgtccctccaggtgttagatcagcatcccgttggtactagtgaccacagagacgctacccagcttggcttccaacctcttatgtcggatttaggcagtaccggaagcaccgagggagcctag

SEQ ID NO: 5342 - DNA, 1152 bp, Artificial Sequence
  derived and/or modified sequence
atgggcctgggccccgtgtttctattactagccggcatctttccttttgcacctcctggagctgccgccgaaccccattccctgcggtacaacctgaccgtgctaagctgggacggcagcgtgcaatctgggttcctgaccgaggtgcaccttgatggtcagcccttcctgcggtgcgatcggcaaaagtgcagggcgaagccccagggacaatgggccgaggatgtgctgggaaataaaacttgggaccgtgagacaagggacctgacaggcaacggtaaggacctgcgcatgacccttgcacacatcaaggatcaaaaagaggggcttcactctctgcaggaaataagagtatgcgagatacacgaagacaattctaccaggtcctcccaacacttttattacgatggcgagttgttcctgagccagaatttggagacaaaggaatggaccatgccccagagctcacgcgctcaaacccttgcgatgaacgtgcgtaactttctgaaggaggatgccatgaagactaagacacactaccacgcgatgcacgccgactgcctccaggaactcaggcgataccttaaaagcggagtggtcctgcggcggacagttcctccaatggtcaatgttactagatctgaagcttcagagggcaacataacagtcacttgcagggccagcggtttttatccctggaacatcaccttgagctggaggcaagatggagtcagcctgtctcatgatactcagcagtggggggacgtgctccccgatggcaacgggacctatcaaacttgggtggccactcggatttgccaaggagaggaacagagattcacctgctatatggagcatagcggaaaccactccacccatccagtgccgtctggaaaggttctggtgttacagtcacactggcaaaccttccatgtgagcgccgtggcagccgcggccatcttcgtgatcatcatcttctatgtccggtgttgcaagaagaaaacgagcgcagcagagggccccgaacttgtctctctgcaggtgctggaccagcacccagtcggaacaagtgatcaccgcgatgcaactcagcttgggttccagcccttaatgagcgacctgggatccacaggcagcacggaaggagcttag

SEQ ID NO: 5343 - DNA, 1158 bp, Artificial Sequence
  derived and/or modified sequence
atggggctcggtccagtgtttttgttactcgcagggatcttcccttttgctccgccaggcgccgcagccgaaccacactctctgcgttataatttaacagtgctgtcctgggacggctccgtgcagagtgggttcctggccgaggtgcacctggacggacaaccttttctacgctacgatcgccagaaatgtcgtgcaaaaccccaaggtcagtgggcggaagacgtgctggggaacaaaacctgggacagggagacacgtgatctgaccggcaatggaaaggatctgcggatgactctggcacacatcaaggatcagaaagaggggctgcactctctgcaagaaataagagtctgtgaaattcacgaggataacagcactcgcagctctcagcacttctactacgacggcgagctgtttctatcacaaaacgtggagacggaggagtggacagttcctcaatctagcagagcacagactttagcaatgaacgtgagaaattttctgaaggaagatgcaatgaaaacaaagacccattaccacgccatgcatgccgattgtctgcaggagttgcggcgctaccttgagtccagtgttgtcctcaggaggcgagtaccacccatggtgaacgtgacgaggagtgaagcttcagagggcaatataaccgtgacatgtagggctagctcgttctacccaaggaacatcacattaacatggcggcaggacggcgtctccctaagtcacgacacccagcagtggggagacgttttgcccgacggcaacggcacctaccagacatgggtcgccactagaatctgtcagggggaagagcaaagatttacgtgttacatggagcactctggcaaccatagtacccacccggtgccttcagggaaggtgcttgtcctgcagagtcactggcagactttccatgtcagcgccgtggcagctgccgccgccgccatctttgttatcatcatcttctacgtgaggtgctgtaaaaaaaaaacttctgccgcagagggacccgagttggtgtcactacaggtactggaccagcaccctgtgggaacttccgaccacagggatgcaacgcagctgggctttcaacccctcatgtcagctttggggagcaccgggtcaaccgaaggcgcgtag

SEQ ID NO: 5344 - DNA, 744 bp, Artificial Sequence
  derived and/or modified sequence
atgggacagcgcgatcagggcctagaccgggagagaaagggaccacaggatgatccaggcagttatcagggcccagagagaaggaatttcttgaaggaggatgcaatgaagacaaagactcactaccacgctatgcacgcggactgcctgcaggagctcagaagatatctggagagcagcgttgtcttgcggaggagagttcctccgatggtcaatgtcacccgctccgaggccagcgagggcaacattaccgtgacttgccgagcaagctcattttatccacgcaatatcacccttacttggagacaggacggcgtgtctctatcccacgatactcagcagtggggggacgtcctgcctgacggcaatggcacataccagacgtgggtcgcaacccggatctgccagggcgaggagcaacgcttcacctgctacatggagcattccggaaaccactcaactcatcctgtccccagtggcaaggtgttagttctccagagccactggcaaacgttccatgtgtccgctgtcgccgcagctgcggccgctatattcgtgattataatcttttatgttcgctgttgtaagaagaaaacttcagccgccgaaggtccggaacttgtcagtctgcaggttttggatcagcacccagtcggcacctctgatcaccgcgatgccactcagttggggttccaacccctgatgtctgcccttggcagtacaggatctaccgagggggcctag

SEQ ID NO: 5345 - DNA, 1029 bp, Artificial Sequence
  derived and/or modified sequence
atgggactcggccccgtctttctactgctcgccggcatttttccatttgccccaccaggagcagctgcggagccacatagcctaagatataacctgacggtgctgtcttgggacggatctgtgcagtcaggttttctcgctgaagttcacctagacggacagccctttctgaggtatgaccggcagaagtgccgggccaagcctcaaggccaatgggctgaggacgtcttgggcaacaaaacttgggaccgggaaacgagggatcttaccggcaacgggaaagatcttaggatgaccttggcccatattaaggaccagaaagaggttccccaatctagcagagcacaaaccctcgcgatgaacgtgagaaattttcttaaggaagacgcgatgaaaactaagactcattaccacgctatgcacgcggattgtctgcaagaactgcgacgctaccttgaatcttcagtcgtactgaggaggcgcgtgccccccatggtgaatgtgactaggtccgaggcaagcgaaggcaatatcaccgtgacttgtagagccagctcgttctaccctcgcaatattacacttacctggaggcaggatggggttagcctctctcacgacacacaacagtggggggatgtcctgcctgacggtaatggaacatatcagacttgggtggcaactagaatctgtcagggtgaggaacagcggtttacttgctatatggagcacagcggaaaccatagcactcatccagtgccctccggaaaagtgctggtgctgcaaagtcactggcagacgttccatgtctccgctgtggctgccgctgccgctgccattttcgtgatcatcattttctacgtgcgctgctgcaaaaaaaaaaccagcgccgcggagggaccagaactagtgtcactgcaggtcctggaccagcatcccgtggggaccagtgatcaccgcgatgctacgcagctcggatttcaacctctgatgagtgccctcgggagcactggctctacagagggcgcatag

SEQ ID NO: 5346 - DNA, 1152 bp, Artificial Sequence
  derived and/or modified sequence
atgggtttggggccagtgttcctcctgctggccggcatcttcccattcgcaccgcccggggccgctgccgagccacattcccttcggtataacttgacggtgctgtcttgggatggatccgtccagtccgggttcctgacagaagttcacttagacggacagcccttcttacgctgcgaccgccagaagtgcagagccaaacctcagggacagtgggctgaagatgtactagggaacaaaacctgggaccgagagacccgcgatctgaccggcaacgggaaggacctccgcatgacgctggcacacatcaaggatcagaaagagggtctgcacagtctccaggaaattagagtgtgtgagattcacgaagacaactctactagatctagtcagcatttttattacgatggagaactgttcctgtctcagaacctagagacgaaagaatggacaatgccgcagtcctcaagagcgcagaccttagccatgaacgtgcgaaactttttgaaggaggatgcaatgaagacgaagacccactatcacgccatgcacgccgactgtctgcaggagcttcggcgatacctgaaatccggagtagtgctcagaagaactgtgccgcctatggtaaacgtgaccaggagcgaggcttctgaaggaaacatcacggtcacttgtcgcgccagtggcttttacccatggaacattaccctgtcctggcgacaggatggggtgtccctttcacatgacacacaacagtggggggacgtcttgccggacgggaatggaacgtatcagacctgggtcgcaaccaggatttgccagggggaggagcaacgattcacctgttacatggagcattctggtaatcattcaactcaccccgtgccgtccggtaaggtcctggtcctgcagagtcactggcagacgttccacgtctccgccgtggctgcagctgccattttcgtgattatcatattctacgtgcgctgctgtaagaagaagacaagcgctgcggaagggccagaactcgtatcactccaagtgctggatcagcaccccgtcggcacatctgaccatcgtgatgcaacacagctaggtttccagccgctgatgtctgacctcgggagcactgggagcacggagggagcttag

SEQ ID NO: 5347 - DNA, 738 bp, Artificial Sequence
  derived and/or modified sequence
atgggccagagggaccagaggctggaccgggagaggaagggcccccaggatgatcctggcagctaccagggccctgagaggaggaacttcctgaaggaggatgccatgaagaccaagacccactaccacgccatgcatgctgactgcctgcaggagctgcggcgctacctgaagtctggagtggtgctgcggaggacagtgccccccatggtgaatgtgaccaggtctgaggccagcgagggcaacatcaccgtgacctgccgggccagcggcttctacccctggaacatcaccctgtcctggaggcaggatggagtgtccctgagccatgacacccagcagtggggagatgtgctgcctgatggaaatggcacctaccagacctgggtggccacccgcatctgccagggcgaggagcagcgcttcacctgctacatggagcacagcggcaaccacagcacccaccctgtgcccagcggcaaggtgctggtgctgcagagccactggcagaccttccacgtgtctgctgtggccgccgccgccatctttgtgatcatcatcttctacgtgcgctgctgcaagaagaagaccagcgctgctgagggccctgagctggtgtccctgcaggtgctggaccagcaccctgtgggcaccagtgaccacagagatgccacccagctgggcttccagcccctgatgtctgacctgggcagcacaggcagcacagagggcgcctag

SEQ ID NO: 5348 - DNA, 1152 bp, Artificial Sequence
  derived and/or modified sequence
atgggcctgggccctgtgttcctgctgctggccggcatcttcccctttgcccctcctggagctgctgctgagccccacagcctgcgctacaacctgactgtgctgtcctgggatggctctgtgcagagcggcttcctgacagaggtgcacctggatggccagcccttcctgcgctgtgaccggcagaagtgccgggccaagccccagggccagtgggccgaggatgtgctgggcaacaagacctgggaccgggagacccgggacctgactggaaatggcaaggacctgaggatgaccctggcccacatcaaggaccagaaggagggcctgcacagcctgcaggagatccgggtgtgtgagatccacgaggacaacagcaccaggagcagccagcacttctactatgatggagagctgttcctgagccagaacctggagaccaaggagtggaccatgccccagagcagccgggcccagaccctggccatgaatgtgaggaacttcctgaaggaggatgccatgaagaccaagacccactaccacgccatgcatgctgactgcctgcaggagctgcggcgctacctgaagtctggagtggtgctgcggaggacagtgccccccatggtgaatgtgaccaggtctgaggccagcgagggcaacatcaccgtgacctgccgggccagcggcttctacccctggaacatcaccctgtcctggaggcaggatggagtgtccctgagccatgacacccagcagtggggagatgtgctgcctgatggaaatggcacctaccagacctgggtggccacccgcatctgccagggcgaggagcagcgcttcacctgctacatggagcacagcggcaaccacagcacccaccctgtgcccagcggcaaggtgctggtgctgcagagccactggcagaccttccacgtgtctgctgtggccgccgccgccatctttgtgatcatcatcttctacgtgcgctgctgcaagaagaagaccagcgctgctgagggccctgagctggtgtccctgcaggtgctggaccagcaccctgtgggcaccagtgaccacagagatgccacccagctgggcttccagcccctgatgtctgacctgggcagcacaggcagcacagagggcgcctag

SEQ ID NO: 5349 - DNA, 1158 bp, Artificial Sequence
  derived and/or modified sequence
atgggcctgggccctgtgttcctgctgctggccggcatcttcccctttgcccctcctggagctgctgctgagccccacagcctgcgctacaacctgactgtgctgtcctgggatggctctgtgcagagcggcttcctggccgaggtgcacctggatggccagcccttcctgcgctatgaccggcagaagtgccgggccaagccccagggccagtgggccgaggatgtgctgggcaacaagacctgggaccgggagacccgggacctgactggaaatggcaaggacctgaggatgaccctggcccacatcaaggaccagaaggagggcctgcacagcctgcaggagatccgggtgtgtgagatccacgaggacaacagcaccaggagcagccagcacttctactatgatggagagctgttcctgagccagaatgtggagacagaggagtggacagtgccccagagcagccgggcccagaccctggccatgaatgtgaggaacttcctgaaggaggatgccatgaagaccaagacccactaccacgccatgcatgctgactgcctgcaggagctgcggcgctacctggagagctctgtggtgctgcggaggagagtgccccccatggtgaatgtgaccaggtctgaggccagcgagggcaacatcaccgtgacctgccgggccagcagcttctaccccaggaacatcaccctgacctggaggcaggatggagtgtccctgagccatgacacccagcagtggggagatgtgctgcctgatggaaatggcacctaccagacctgggtggccacccgcatctgccagggcgaggagcagcgcttcacctgctacatggagcacagcggcaaccacagcacccaccctgtgcccagcggcaaggtgctggtgctgcagagccactggcagaccttccacgtgtctgctgtggccgctgctgctgctgccatctttgtgatcatcatcttctacgtgcgctgctgcaagaagaagaccagcgctgctgagggccctgagctggtgtccctgcaggtgctggaccagcaccctgtgggcaccagtgaccacagagatgccacccagctgggcttccagcccctgatgtctgccctgggcagcacaggcagcacagagggcgcctag

SEQ ID NO: 5350 - DNA, 744 bp, Artificial Sequence
  derived and/or modified sequence
atgggccagagggaccagggcctggaccgggagaggaagggcccccaggatgatcctggcagctaccagggccctgagaggaggaacttcctgaaggaggatgccatgaagaccaagacccactaccacgccatgcatgctgactgcctgcaggagctgcggcgctacctggagagctctgtggtgctgcggaggagagtgccccccatggtgaatgtgaccaggtctgaggccagcgagggcaacatcaccgtgacctgccgggccagcagcttctaccccaggaacatcaccctgacctggaggcaggatggagtgtccctgagccatgacacccagcagtggggagatgtgctgcctgatggaaatggcacctaccagacctgggtggccacccgcatctgccagggcgaggagcagcgcttcacctgctacatggagcacagcggcaaccacagcacccaccctgtgcccagcggcaaggtgctggtgctgcagagccactggcagaccttccacgtgtctgctgtggccgctgctgctgctgccatctttgtgatcatcatcttctacgtgcgctgctgcaagaagaagaccagcgctgctgagggccctgagctggtgtccctgcaggtgctggaccagcaccctgtgggcaccagtgaccacagagatgccacccagctgggcttccagcccctgatgtctgccctgggcagcacaggcagcacagagggcgcctag

SEQ ID NO: 5351 - DNA, 1029 bp, Artificial Sequence
  derived and/or modified sequence
atgggcctgggccctgtgttcctgctgctggccggcatcttcccctttgcccctcctggagctgctgctgagccccacagcctgcgctacaacctgactgtgctgtcctgggatggctctgtgcagagcggcttcctggccgaggtgcacctggatggccagcccttcctgcgctatgaccggcagaagtgccgggccaagccccagggccagtgggccgaggatgtgctgggcaacaagacctgggaccgggagacccgggacctgactggaaatggcaaggacctgaggatgaccctggcccacatcaaggaccagaaggaggtgccccagagcagccgggcccagaccctggccatgaatgtgaggaacttcctgaaggaggatgccatgaagaccaagacccactaccacgccatgcacgccgactgcctgcaggagctgcggcgctacctggagagctctgtggtgctgcggcggcgggtgccccccatggtgaatgtgaccaggtctgaggccagcgagggcaacatcaccgtgacctgccgggccagcagcttctaccccaggaacatcaccctgacctggaggcaggatggagtgtccctgagccatgacacccagcagtggggagatgtgctgcctgatggaaatggcacctaccagacctgggtggccacccgcatctgccagggcgaggagcagcgcttcacctgctacatggagcacagcggcaaccacagcacccaccctgtgcccagcggcaaggtgctggtgctgcagagccactggcagaccttccacgtgtctgctgtggccgctgctgctgctgccatcttcgtcatcatcatcttctacgtgcgctgctgcaagaagaagaccagcgctgctgagggccctgagctggtgtccctgcaggtgctggaccagcaccctgtgggcaccagtgaccacagagatgccacccagctgggcttccagcccctgatgtctgccctgggcagcacaggcagcacagaaggagcctag

SEQ ID NO: 5352 - DNA, 2010 bp, Artificial Sequence
  derived and/or modified sequence
gtatcatttcagtgaaggtcactccagtctttcatggaggccaaactaagggtgtaaattaggatcctcactgaagtggcgggaccctaagaggctttttcctggccccttagttgtgggttttcctgcgggcggcgcagccggtttccatcagaaccgcccagaggcggacgctgccttcctggggtgacggagcagcaggaagcgttttcggatcctggaatacgtgggcggcccgtgggaggggctgaggcgcagtttcctactcacccggatccgaatcctccgcggtgctgtttcaagagagccggattccagatcgcgctccagcccggactcggaattcctgccctgcgggtctgcattttcataacgggcaggtgtgagtgccctgcagctggagaccagaagcctgaaggcagctcggccctccccagcccacagcgccgttattccgtttctatatcagtaaacacatttcattttccgtagaccagggcggggtgacgggtgatcccagtcctcgcagtgaattccgggcagcaaaattcaaaacacatgcggccaaggccgggcacggtggttcacgcctgtaatcccagcactttgggaggtcgaggcgggcgatcacctgaggtcgggagctcgagaccaacctgaccaacatggggaaatcccgtctctactaaaaatataaaattagacgggcttggtggtgaatgcctgtaatcccagctagtcgggaggctgaggcaggagaatcgcttaaaccttggaggcggaggttgcggtgagccgagatcgcgccattgcacttcagcctgggcaacaagagggaaaactccgtcgcaaaaactttcgggggcggagcggagccccgccctgggttatgtaagcgaccgcgctgggccgtttctctttcttttccggaccctgcagtggcgcctaaagtctgagagagggaagtcgcctctgtgctcagccccacagtcttcgttataacctcacggtgctgtcctgggatggatctgtgcagtcagggtttctcactgaggtacatctggatggtcagcccttcctgcgctgtgacaggcagaaatgcagggcaaagccccagggacagtgggcagaagatgtcctgggaaataagacatgggacagagagaccagagacttgacagggaacggaaaggacctcaggatgaccctggctcatatcaaggaccagaaagaaggaatttcttgaaggaagatgccatgaagaccaagacacactatcacgctatgcatgcagactgcctgcaggaactacggcgatatctaaaatccggcgtagtcctgaggagaacagtgccccccatggtgaatgtcacccgcagcgaggcctcagagggcaacattaccgtgacatgcagggcttctggcttctatccctggaatatcacactgagctggcgtcaggatggggtatctttgagccacgacacccagcagtggggggatgtcctgcctgatgggaatggaacctaccagacctgggtggccaccaggatttgccaaggagaggagcagaggttcacctgctacatggaacacagcgggaatcacagcactcaccctgtgccctctgggaaagtgctggtgcttcagagtcattggcagacattccatgtttctgctgttgctgctgctgctatttttgttattattattttctatgtccgttgttgtaagaagaaaacatcagctgcagagggtccagagctcgtgagcctgcaggtcctggatcaacacccagttgggacgagtgaccacagggatgccacacagctcggatttcagcctctgatgtcagatcttgggtccactggctccactgagggcgcctagactctacagccaggcagctgggattcaattccctgcctggatctcacgagcactttccctcttggtgcctcagtttcctgacctatgaaacagagaaaataaaagcacttatttattgtt

SEQ ID NO: 5353 - DNA, 1675 bp, Artificial Sequence
  derived and/or modified sequence
gtcgcctctgtgctcgctagtcaagtgaaacagtgggagtgaagaagaaacaaagacatctataactggttgtgatcaattagttgtaaacactgcactcagaccagcctgggaagattttaaggatatggtgtggtctgatgggttccaaggcagaggttacaatagcctggaagagggagactgcttaggcagtggcatcctggtgggatagggtctccagcccactggaattttctcttccaagcgtggccccgccctctccgctcgtgattggccctaagttccgggccccagtttcattggatgagcggtcgggggaccgggccaggtgactaagtttccgcggcgccttctccccggccactgcttgagccgctgagagggtggcgacgtcggggccatggggctgggcccggtcttcctgcttctggctggcatcttcccttttgcacctccgggagctgctgctgagccccacagtcttcgttataacctcacggtgctgtcctgggatggatctgtgcagtcagggtttctcactgaggtacatctggatggtcagcccttcctgcgctgtgacaggcagaaatgcagggcaaagccccagggacagtgggcagaagatgtcctgggaaataagacatgggacagagagaccagagacttgacagggaacggaaaggacctcaggatgaccctggctcatatcaaggaccagaaagaaggcttgcattccctccaggagattagggtctgtgagatccatgaagacaacagcaccaggagctcccagcatttctactacgatggggagctcttcctctcccaaaacctggagactaaggaatggacaatgccccagtcctccagagctcagaccttggccatgaacgtcaggaatttcttgaaggaagatgccatgaagaccaagacacactatcacgctatgcatgcagactgcctgcaggaactacggcgatatctaaaatccggcgtagtcctgaggagaacagtgccccccatggtgaatgtcacccgcagcgaggcctcagagggcaacattaccgtgacatgcagggcttctggcttctatccctggaatatcacactgagctggcgtcaggatggggtatctttgagccacgacacccagcagtggggggatgtcctgcctgatgggaatggaacctaccagacctgggtggccaccaggatttgccaaggagaggagcagaggttcacctgctacatggaacacagcgggaatcacagcactcaccctgtgccctctgggaaagtgctggtgcttcagagtcattggcagacattccatgtttctgctgttgctgctgctgctatttttgttattattattttctatgtccgttgttgtaagaagaaaacatcagctgcagagggtccagagctcgtgagcctgcaggtcctggatcaacacccagttgggacgagtgaccacagggatgccacacagctcggatttcagcctctgatgtcagatcttgggtccactggctccactgagggcgcctagactctacagccaggcagctgggattcaattccctgcctggatctcacgagcactttccctcttggtgcctcagtttcctgacctatgaaacagagaaaataaaagcacttatttattgtt

SEQ ID NO: 5354 - DNA, 1737 bp, Artificial Sequence
  derived and/or modified sequence
gtcgcctctgtgctggctagtcaagtgaaacagtgggagtgaagaagaaacaaagacatctataactggttgtgatcaattagttgtacacactgcactcagaccagcctgggaagattttaaggatatggtgtggtctgatgggttccaaggcagaggttacaatagcctggaagagggagactgcttaggcagtggcatcctggtgggatagggtctccagcccactggaattttctcttccaagcgtggccccgccctctccgctcgtgattggccctaagttccgggccccagtttcattggatgagcggtcgggggaccgggccaggtgactaagtttccgcggcgccttctccccggccactgcttgagccgctgagagggtggcgacgtcggggccatggggctgggcccggtcttcctgcttctggctggcatcttcccttttgcacctccgggagctgctgctgagccccacagtcttcgttataacctcacggtgctgtcctgggatggatctgtgcagtcagggtttcttgctgaggtacatctggatggtcagcccttcctgcgctatgacaggcagaaatgcagggcaaagccccagggacagtgggcagaagatgtcctgggaaataagacatgggacagagagaccagggacttgacagggaacggaaaggacctcaggatgaccctggctcatatcaaggaccagaaagaaggcttgcattccctccaggagattagggtctgtgagatccatgaagacaacagcaccaggagctcccagcatttctactacgatggggagctcttcctctcccaaaacgtggagactgaggaatggacagtgccccagtcctccagagctcagaccttggccatgaacgtcaggaatttcttgaaggaagatgccatgaagaccaagacacactatcacgctatgcatgcagactgcctgcaggaactacggcgatatctagaatccagcgtagtcctgaggagaagagtgccccccatggtgaatgtcacccgcagcgaggcctcagagggcaacatcaccgtgacatgcagggcttccagcttctatccccggaatatcacactgacctggcgtcaggatggggtatctttgagccacgacacccagcagtggggggatgtcctgcctgatgggaatggaacctaccagacctgggtggccaccaggatttgccaaggagaggagcagaggttcacctgctacatggaacacagcgggaatcacagcactcaccctgtgccctctgggaaagtgctggtgcttcagagtcattggcagacattccatgtttctgctgttgctgctgctgctgctgctatttttgttattattattttctatgtccgttgttgtaagaagaaaacatcagctgcagagggtccagagctcgtgagcctgcaggtcctggatcaacacccagttgggacgagtgaccacagggatgccacacagctcggatttcagcctctgatgtcagctcttgggtccactggctccactgagggcgcctagactctacagccaggcggctggaattgaattccctgcctggatctcacaagcactttccctcttggtgcctcagtttcctgacctatgaaacagagaaaataaaagcacttatttattgttgttggaggctgcaaaatgttagtagatatgaggcatttgcagctgtgccatattaa

SEQ ID NO: 5355 - DNA, 2072 bp, Artificial Sequence
  derived and/or modified sequence
gtatcatttcagtgaaggtcactccagtctttcatggaggccaaactaagggtgtaaattaggatcctcactgaagtggcgggaccctaagaggctttttcctggccccttagttgtgggttttcctgcgggcggcgcagccggttcccatcagaaccgcccagaggcggacgctgccttcctggggtgacggagcagcaggaagcgttttcggatcctggaatacgtgggcggcccgtgggaggggctgaggcgcagtttcctactcacccggatcagaatcctccgcggtgctgtttcaagagagccggattccagatcgcgctccagcccggactcggaattcctgccctgcgggtctgcattttcataacgggcaggtgtgagtgccctgcagctggagaccagaagcctgaaggcagctcggccctccccagcccacagcgccgttattccgtttctatatcagtaaacacatttcattttccgtagaccagggcggggtgacgggtgatcccagtcctcgcagtgaattccgggcagcaaaattcaaaacacatgcgggcaaggccgggcacggtggttcacgcctgcaatcccagcactttgggaggtcgaggcgggcgatcacctgaggtcgggagctcgagaccaacctgaccaacatggggaaatcccgtctctactaaaaatataaaattagacgggcttggtggtgaatgcctgtaatcccagctagtcgggaggctgaggcaggagaatcgcttaaaccttggaggcggaggttgcggtgagccgagatcgcgccactgcacttcagcctgggcaacaagagggaaaactccgtcgcaaaaactttcgggggcggagcggagccccgccctgggttatgtaagcgaccgcgctgggccgtttctctttcttttccggaccctgcagtggcgcctaaagtctgagagagggaagtcgcctctgtgctgagccccacagtcttcgttataacctcacggtgctgtcctgggatggatctgtgcagtcagggtttcttgctgaggtacatctggatggtcagcccttcctgcgctatgacaggcagaaatgcagggcaaagccccagggacagtgggcagaagatgtcctgggaaataagacatgggacagagagaccagggacttgacagggaacggaaaggacctcaggatgaccctggctcatatcaaggaccagaaagaaggaatttcttgaaggaagatgccatgaagaccaagacacactatcacgctatgcatgcagactgcctgcaggaactacggcgatatctagaatccagcgtagtcctgaggagaagagtgccccccatggtgaatgtcacccgcagcgaggcctcagagggcaacatcaccgtgacatgcagggcttccagcttctatccccggaatatcacactgacctggcgtcaggatggggtatctttgagccacgacacccagcagtggggggatgtcctgcctgatgggaatggaacctaccagacctgggtggccaccaggatttgccaaggagaggagcagaggttcacctgctacatggaacacagcgggaatcacagcactcaccctgtgccctctgggaaagtgctggtgcttcagagtcattggcagacattccatgtttctgctgttgctgctgctgctgctgctatttttgttattattattttctatgtccgttgttgtaagaagaaaacatcagctgcagagggtccagagctcgtgagcctgcaggtcctggatcaacacccagttgggacgagtgaccacagggatgccacacagctcggatttcagcctctgatgtcagctcttgggtccactggctccactgagggcgcctagactctacagccaggcggctggaattgaattccctgcctggatctcacaagcactttccctcttggtgcctcagtttcctgacctatgaaacagagaaaataaaagcacttatttattgttgttggaggctgcaaaatgttagtagatatgaggcatttgcagctgtgccatattaa

SEQ ID NO: 5356 - DNA, 2223 bp, Artificial Sequence
  derived and/or modified sequence
agcggtcgggggaccgggccaggtgactaagtttccgcggcgccttctccccggccactgcttgagccgctgagagggtggcgacgtcggggccatggggctgggcccggtcttcctgcttctggctggcatcttcccttttgcacctccgggagctgctgctgagccccacagtcttcgttataacctcacggtgctgtcctgggatggatctgtgcagtcagggtttcttgctgaggtacatctggatggtcagcccttcctgcgctatgacaggcagaaatgcagggcaaagccccagggacagtgggcagaagatgtcctgggaaataagacatgggacagagagaccagggacttgacagggaacggaaaggacctcaggatgaccctggctcatatcaaggaccagaaagaagtgccccagtcctccagagctcagaccttggccatgaacgtcaggaatttcttgaaggaagatgccatgaagaccaagacacactatcacgctatgcatgcagactgcctgcaggaactacggcgatatctagaatccagcgtagtcctgaggagaagagtgccccccatggtgaatgtcacccgcagcgaggcctcagagggcaacatcaccgtgacatgcagggcttccagcttctatccccggaatatcacactgacctggcgtcaggatggggtatctttgagccacgacacccagcagtggggggatgtcctgcctgatgggaatggaacctaccagacctgggtggccaccaggatttgccaaggagaggagcagaggttcacctgctacatggaacacagcgggaatcacagcactcaccctgtgccctctgggaaagtgctggtgcttcagagtcattggcagacattccatgtttctgctgttgctgctgctgctgctgctatttttgttattattattttctatgtccgttgttgtaagaagaaaacatcagctgcagagggtccagagctcgtgagcctgcaggtcctggatcaacacccagttgggacgagtgaccacagggatgccacacagctcggatttcagcctctgatgtcagctcttgggtccactggctccactgagggcgcctagactctacagccaggcggctggaattgaattccctgcctggatctcacaagcactttccctcttggtgcctcagtttcctgacctatgaaacagagaaaataaaagcacttatttattgttgttggaggctgcaaaatgttagtagatatgaggcatttgcagctgtgccatattaattggtgtcattgtttttgttgttttcgtattattattttttttttttaagacagagtctcaggccaggcacggtggctcacgcctgtaatcccaacactttgggaggccgaggcgggcggatcacaaggtcaagagatcgagaccatcctgatcaacatggtgaaaccctgtctctactaaaaatacaaaaaattagctgggcctggtggcgtgtgcctgtagtcccagctactcaggagctgaggcaggaaaatcacttgaacctgggaggtggaggttgcagtgagctgagatcacaccactgcactccagcctggcgacagagcgagactctgtctcaaaaaaaaaaaaaaaaaaggacagagtctcactctgtcacccaggctgcagttcagtgacatgatctcagctcgttgcagcctccgcctcccgggttcaagcacttctcttgcctcagcctcccgagtagctggggttacagacatgcaccaccatacccggctaatttttgcatttttcatagagacaggattttgccatgttggccaggctggtctcaaactcctgacctcaggtgatctgcctgcctcaggctcccaaagtgctgggattacaagcatgagccaccatacccggcctattttattacattttaatttattttattttattatatcatccaccatgtctggcctattttattatattttaagatattttaatatattacgtgtgttgtaattggattatcatcagtgagctttgtgagtgagtgtcttggagatgactcctcctgaccagcccaggaccagctttcttgtcaccttgaggtcccctcgccccatcacactcttacgcattactctatgtctactgttatgggtgtgtaattttataccatagatgtttactctttaaacaga

SEQ ID NO: 5357 - DNA, 1365 bp, Artificial Sequence
  derived and/or modified sequence
cactgcttgagccgctgagagggtggcgacgtcggggccatggggctgggcccggtcttcctgcttctggctggcatcttcccttttgcacctccgggagctgctgctgagccccacagtcttcgttataacctcacggtgctgtcctgggatggatctgtgcagtcagggtttctcactgaggtacatctggatggtcagcccttcctgcgctgtgacaggcagaaatgcagggcaaagccccagggacagtgggcagaagatgtcctgggaaataagacatgggacagagagaccagagacttgacagggaacggaaaggacctcaggatgaccctggctcatatcaaggaccagaaagaaggcttgcattccctccaggagattagggtctgtgagatccatgaagacaacagcaccaggagctcccagcatttctactacgatggggagctcttcctctcccaaaacctggagactaaggaatggacaatgccccagtcctccagagctcagaccttggccatgaacgtcaggaatttcttgaaggaagatgccatgaagaccaagacacactatcacgctatgcatgcagactgcctgcaggaactacggcgatatctaaaatccggcgtagtcctgaggagaacagtgccccccatggtgaatgtcacccgcagcgaggcctcagagggcaacattaccgtgacatgcagggcttctggcttctatccctggaatatcacactgagctggcgtcaggatggggtatctttgagccacgacacccagcagtggggggatgtcctgcctgatgggaatggaacctaccagacctgggtggccaccaggatttgccaaggagaggagcagaggttcacctgctacatggaacacagcgggaatcacagcactcaccctgtgccctctgggaaagtgctggtgcttcagagtcattggcagacattccatgtttctgctgttgctgctgctgctatttttgttattattattttctatgtccgttgttgtaagaagaaaacatcagctgcagagggtccagagctcgtgagcctgcaggtcctggatcaacacccagttgggacgagtgaccacagggatgccacacagctcggatttcagcctctgatgtcagatcttgggtccactggctccactgagggcgcctagactctacagccaggcagctgggattcaattccctgcctggatctcacgagcactttccctcttggtgcctcagtttcctgacctatgaaacagagaaaataaaagcacttatttattgttgttggaggctgcaaaatgttagtagatatgaggcgtttgcagctgtaccatatt

SEQ ID NO: 5358 - DNA, 738 bp, Artificial Sequence
  derived and/or modified sequence
atgggccagcgggaccagcggctggaccgggagcggaagggcccccaagatgatcccggcagctaccagggaccagaaaggagaaacttcctgaaggaagatgctatgaagaccaaaacccattatcatgctatgcatgccgattgcctgcaggaattaagaagatacctcaaatccggcgtggtgttaaggagaaccgttcctccaatggtgaacgtgacacgctctgaggcctctgaaggcaacatcaccgtaacatgtcgggccagcggtttctatccatggaacatcactctttcctggcggcaagacggagtgagccttagccatgacactcagcaatggggcgatgtattgcctgacggtaacggaacgtatcagacctgggtggcgacgagaatttgccaaggagaggagcagagattcacttgctacatggaacactctggcaatcacagcacccaccccgtgccctcaggcaaggtgctcgtccttcaatctcactggcagacgtttcacgtatcagccgttgcggcagctgctatcttcgtgatcatcattttctatgtcagatgttgtaagaagaaaacaagcgccgccgaaggcccagaactggtgagtctccaagtgctggatcagcatccagtgggcacgagtgaccaccgtgatgccacgcagctcggctttcagcccctgatgagtgacttgggaagtacaggctccactgaaggggcctag

SEQ ID NO: 5359 - DNA, 1152 bp, Artificial Sequence
  derived and/or modified sequence
atgggcctgggccccgtgttcctgctgctggccggcatcttccccttcgctccacctggtgccgctgccgagccccattcccttcgttacaatctgaccgtgctgagttgggatggctccgtgcagtctgggttcctgacggaagttcacctggacggtcagccatttctgcgatgcgacaggcagaaatgtcgagcgaagccacagggccagtgggctgaggacgtcctgggcaacaaaacctgggaccgtgagacaagggatctgacagggaacggcaaggacctgagaatgacattggcacacatcaaagatcaaaaggagggcttgcacagtttgcaagagatacgtgtgtgcgaaatacatgaggataactccacccgcagctcccagcacttctactacgatggcgagctgtttttgagtcagaatcttgagaccaaggagtggaccatgcctcaatcatctagggcccagacactagctatgaatgtgagaaactttctgaaagaagacgctatgaaaactaaaacacattaccacgctatgcacgcggattgcttacaagagctccggcggtatctgaaatcgggcgtggtgctccggcggaccgtccccccaatggtcaatgttactaggagtgaggcctccgagggtaacataactgtgacttgtcgggcctccggcttctacccttggaatataaccctgtcctggcgccaggacggggttagcctcagccacgatacccagcaatggggggacgtgcttccagacgggaatggtacctatcagacatgggtggcaacccggatttgccaaggagaggagcaaagatttacttgctacatggagcactcaggcaatcactccacccaccccgtgcctagtgggaaggtgctggtgctgcagagccactggcagaccttccatgtgtcagcggtggcagcggcagcaatcttcgttatcattatcttttacgtgagatgttgtaagaaaaaaacttccgccgcagaaggaccagaacttgtgagtctgcaggtcttggatcagcaccctgtcggaacctccgaccatcgggatgccactcagctaggattccaacccctgatgtctgatctgggaagcacaggctccacagagggcgcatag

SEQ ID NO: 5360 - DNA, 1158 bp, Artificial Sequence
  derived and/or modified sequence
atgggcctgggccccgtgttcctgctgctggccggcatcttcccctttgctcctcccggtgcggcagccgagccgcatagtctgcgctataatctaaccgtgctgtcctgggacgggtctgtgcagagcggtttcctggcagaagttcaccttgacggtcaaccctttttacgatatgaccgacagaaatgtcgggccaaaccccagggccagtgggccgaggatgtcctaggtaacaaaacctgggaccgggagacccgggatctgactggaaatggaaaagatcttaggatgactttggcacatattaaggatcagaaagagggtctgcactctctgcaagaaattagagtttgtgaaatccatgaggacaactcaactagaagcagccagcacttctactacgacggggagttatttctatcacagaacgtggaaaccgaggaatggaccgtcccacagtccagcagggcacagacactggctatgaatgtgcgaaattttctgaaggaagacgctatgaaaacaaaaacccactaccatgcgatgcatgcggattgccttcaagaactgagacggtacttggagagctccgtggtgctgagacgccgcgtgcctcccatggtgaatgtcacacgatcagaagcctccgagggcaatatcactgtcacatgcagggcctcaagtttttatccacgcaatattacgctgacatggcggcaagacggcgtgagcctgtcccacgacactcagcagtggggagacgtgttacctgacggcaatggtacttatcagacttgggttgcgaccagaatttgccagggggaagagcagcgatttacctgttacatggagcatagtggcaatcattcaacccaccctgtgccttctggcaaggtgttggtgctccaatcgcattggcagacatttcacgtgagcgctgtagctgctgcggcagctgctattttcgtgattataatattttacgtcaggtgctgcaagaagaagacatctgcagccgaaggacccgagctggttagtctgcaggttttggaccagcatccggtgggaactagcgaccaccgagacgccactcagcttggctttcaacctttgatgtcagccctcggatccacagggtcgaccgagggcgcatag

SEQ ID NO: 5361 - DNA, 744 bp, Artificial Sequence
  derived and/or modified sequence
atgggccagcgggaccagggcctggaccgggagcggaagggcccccaggacgatcctggcagttatcagggacctgagcgcaggaatttcctcaaggaagatgccatgaaaaccaagacgcattaccacgcgatgcacgctgactgtctccaggagctgcgcagatatcttgagagctctgtcgttctacgccggagagtcccaccaatggtgaatgtcactcggagcgaagccagcgaaggcaatattacagtgacgtgccgcgcctcaagtttctacccacgcaatatcacgttgacttggagacaggacggtgttagcctgtctcatgatacacagcagtggggcgacgtccttccagacggcaatggaacatatcaaacctgggttgcaaccaggatatgtcagggcgaagagcagcggttcacctgttatatggagcactcaggcaaccactccacccatccggtccctagtggcaaagtcttggtgctgcagagccactggcaaacgttccatgtcagtgccgtggcggccgctgccgcagctattttcgttatcattatattctacgtgagatgttgcaagaaaaagacctccgccgctgagggccccgagctcgtaagcctccaggttctcgatcagcatcctgttggcacatctgatcaccgggacgcaacccaactgggattccagcctctgatgtcggcactgggctccacaggatcaacagagggtgcctag

SEQ ID NO: 5362 - DNA, 1029 bp, Artificial Sequence
  derived and/or modified sequence
atgggcctgggccccgtgttcctgctgctggccggcatcttcccctttgcccccccgggggcagctgctgaacctcactctctgaggtataatttgaccgtgcttagctgggatgggagcgtgcagtcagggttcctggcggaagtgcaccttgacggccagccattcctccgctatgaccggcagaagtgtcgggctaagccacaggggcagtgggccgaagacgtgcttggcaataagacatgggatagagagacccgcgacctaacaggcaacgggaaagatcttagaatgaccctggcacacatcaaggatcagaaagaggtcccccaaagtagtcgagctcaaactctggccatgaacgtaaggaacttcctgaaggaagacgctatgaaaacaaaaacccattaccacgcgatgcacgctgattgcctgcaggagctccgacgctacctagaatcgtctgtggttctgcggcgcagggtccctcccatggtgaatgtcacccgctcagaagcatccgagggcaacatcacggtgacgtgcagagcctcttccttttaccctagaaatatcacactgacatggaggcaagatggggtgtcgttatcccacgatacacagcagtggggggatgtgctccccgatggcaacgggacttatcagacgtgggtggcaacaaggatatgtcagggcgaagaacagcgctttacctgttatatggaacattcgggaaaccatagcactcaccctgtcccgagtgggaaggtgctggtactgcagtctcactggcaaactttccatgtcagcgcggtggccgccgcggcagccgccatcttcgtaatcatcatcttttatgtgcgatgttgcaagaagaagactagtgcggcagaaggccctgaactggtgtccttacaggtcctggatcaacatccagtgggcactagcgatcatcgcgatgccactcaactgggtttccagccactgatgagtgccctgggctccacaggatcaacggagggcgcatag

SEQ ID NO: 5363 - DNA, 1152 bp, Artificial Sequence
  derived and/or modified sequence
atgggcctgggccccgtgttcctgctgctggccggcatcttccccttcgcacctcctggggccgccgcggagcctcattctctcaggtataacttaaccgtgctttcttgggacggaagcgtgcagtccggatttctgacagaggtgcacctggatggacagccattcctgagatgcgacagacagaaatgtcgtgctaaaccccagggacagtgggccgaagacgtactcgggaacaaaacttgggacagagagacgagagatctgacagggaatggaaaggacctcagaatgacgctggctcacattaaggaccaaaaagagggcctgcattctctccaggagattcgtgtgtgcgagatacatgaggataacagtaccaggtcatctcaacacttttattacgacggagagctgttcctttcgcagaacctcgagacaaaggagtggaccatgccacagtcgagtagagcccagaccctggcgatgaacgtgcgaaattttctaaaggaagacgccatgaagaccaagacgcattaccacgccatgcatgccgactgtctgcaagagctcaggaggtaccttaaatccggggtggtcctgagaagaacggtcccgcctatggtgaacgttaccaggagtgaggcaagcgaaggcaacatcactgtaacttgcagggctagtggcttctatccttggaacattacactgtcctggaggcaggacggggtgagcctaagtcacgatacccagcagtggggcgacgttttgcccgacggcaatggaacatatcagacctgggtagccactagaatttgtcagggcgaagaacagaggtttacctgctatatggagcattctggcaaccactctacccatccagtaccatccgggaaagtcctggttctccagtctcattggcaaacctttcatgtctcagcggttgccgccgcagccatctttgtgataatcattttttatgtgcgatgttgtaaaaaaaagacctcagcagccgagggaccggaactcgtgagtcttcaggtcctggaccaacaccccgtggggaccagcgaccaccgcgacgcaactcaactgggattccagcctttgatgtctgacctgggtagcacaggctcaaccgagggagcctag

SEQ ID NO: 5364 - DNA, 738 bp, Artificial Sequence
  derived and/or modified sequence
atgggtcaaagagaccaacgtcttgatcgagaacgaaagggtccacaagatgatccagggtcttatcagggaccggagaggagaaacttcttgaaggaggatgccatgaagactaagacccactatcatgccatgcatgctgactgcttgcaggagttgcggagataccttaagagcggtgttgtattacgcagaaccgtgcccccaatggtaaatgtaacccgtagcgaggcaagtgagggcaatattacagtgacctgccgagcaagcggattttacccctggaacattaccctgtcctggcgccaagacggggtcagcctgtcgcacgacacccagcagtggggtgacgtgcttcctgatggcaatgggacctatcagacttgggtggcgacaaggatttgccaaggcgaggaacagaggttcacctgttatatggagcatagcggcaaccacagcactcaccccgtgccctcaggcaaggtgcttgtgctgcagtctcactggcagacattccacgtatccgccgtggccgctgctgccatcttcgtgatcattattttttatgttcgctgctgtaagaaaaagacatccgccgctgaggggccagagcttgtctctctccaggtcctggaccaacatccggtgggtacatccgatcacagagacgccacccaactggggtttcagcccctgatgtcagacctcggctcaacaggctctaccgagggcgcatag

SEQ ID NO: 5365 - DNA, 1152 bp, Artificial Sequence
  derived and/or modified sequence
atgggactgggacccgttttcttactcctggctggtatttttccgtttgccccacctggggcagccgcagaaccgcactctctcaggtacaaccttaccgttctctcctgggacggcagcgtgcagtctggctttctgacggaggtccatttggacggccagcctttccttcgatgcgaccgccaaaaatgtcgagctaaaccccaggggcagtgggccgaggacgtgctggggaacaagacttgggaccgggagaccagggacctgacgggaaacggaaaagatctccgtatgaccttggctcacatcaaggaccagaaagaaggacttcactctctccaggagatacgtgtctgcgagatccacgaggacaactcaactaggagctctcagcacttttactacgatggcgaattgtttcttagccagaacctggaaacaaaagagtggacaatgccccagtcttctagggctcagacacttgcaatgaacgttaggaactttctgaaggaagacgcaatgaagacgaagacacattatcacgccatgcatgctgactgtctgcaggaattgcgcagatacctgaagagcggcgtagttcttagaagaactgtccctcccatggtgaatgtgacacggtctgaggcttctgagggaaatattaccgttacttgtagggcctctgggttttatccctggaacatcactttgtcctggaggcaggacggcgtcagcctatcacacgatactcagcaatggggagacgtcctgcctgacggcaatggaacctaccagacatgggtggctacccgcatatgccagggcgaggagcagcggttcacctgctacatggagcatagtggtaaccactccacacaccccgtcccctccggcaaggttctggtgctacagtcccattggcaaacattccacgtgagtgccgtagcagcggcagctattttcgttataatcatcttttatgtacggtgttgcaagaagaaaacttctgctgcagagggaccggaacttgtatctttacaggtgctggaccagcaccccgtcggaacaagcgatcatcgcgatgctacccagctgggattccagcccctcatgtctgacctggggagcaccggatcaactgaaggggcttag

SEQ ID NO: 5366 - DNA, 1158 bp, Artificial Sequence
  derived and/or modified sequence
atgggcctcggccctgtatttctactgcttgctggtatttttccattcgcccctcctggagctgccgcagagccacactccttgcgatataatctgacggtgctgagctgggacggcagcgtccagtctgggttcttggcagaggtccatttggatgggcagccttttctaagatatgatagacagaaatgtcgagccaagcctcagggacagtgggcagaggatgtccttggcaataagacttgggatagggagacaagagatctgactggaaacggcaaggatctgcgaatgaccctcgcacatattaaagaccagaaggagggcctgcactcgctgcaggaaattcgggtgtgtgaaatccacgaggacaattctacccgatcttctcagcatttctactatgatggagaacttttcttaagtcaaaatgttgagaccgaagaatggacggtcccccaatcaagccgcgctcagactttggccatgaacgttcggaatttcttaaaagaagacgctatgaaaaccaaaacgcactatcacgccatgcacgccgattgtctgcaggagctcagacgctacttggagtccagcgttgtgcttcggaggagagtgccccctatggtgaatgtgacaagatcagaagcaagtgaggggaatatcactgtgacatgtcgggcttcgagcttctaccctaggaatattactctaacgtggcggcaagatggggtatcattgtcccatgacacacaacagtggggtgacgttctgccagacggcaatggcacgtaccagacatgggttgccaccaggatctgccagggtgaggagcagagattcacatgctacatggagcactcaggcaaccactcaactcacccggtgccctcggggaaagttttggtgctccagagccattggcaaacattccacgtgagcgcagttgccgcagctgcagcggcaatcttcgtaattattatattttatgtcaggtgctgtaaaaagaagactagtgcggcagagggccctgagttggtgtctcttcaggtcttggatcagcaccctgtaggaacctccgatcatcgcgatgccacccagctgggatttcagcctctgatgagtgctcttgggtccaccggcagtaccgaaggagcttag

SEQ ID NO: 5367 - DNA, 744 bp, Artificial Sequence
  derived and/or modified sequence
atgggacaaagagaccaagggctggatcgagaacgcaaaggcccacaggatgaccctgggagctaccagggtccagagaggagaaacttccttaaggaggatgctatgaaaacaaagacccattaccacgcaatgcacgccgattgcttacaagaattgcgcagatacctggaaagcagcgtggtcttgaggagaagagtgcccccaatggtcaatgtgacgcgcagtgaagcttcagaaggaaacatcacggtgacatgcagagctagctcattctaccccaggaacatcactctgacctggcgccaggacggtgtgtcattatcccacgatacccagcaatggggtgatgttctcccagacgggaacggaacctatcagacttgggttgctacacggatctgccaaggtgaagaacagcggttcacctgttatatggagcactcaggtaaccattctactcaccctgtgcctagtggcaaagtactggtattgcaaagccactggcagacttttcacgtgagcgcagttgcagccgcagcagcggctatttttgtgattatcattttttacgtgcgctgttgcaagaaaaaaacatcggctgctgagggaccagagctggtgagcttacaggttctcgatcagcaccctgttggcacctctgatcatagagacgccactcagctgggatttcagcctctaatgtcagcccttggatccacgggctccaccgagggcgcatag

SEQ ID NO: 5368 - DNA, 1029 bp, Artificial Sequence
  derived and/or modified sequence
atgggcctaggtccagtgttcctcttgctcgctgggattttcccattcgctccaccaggcgctgccgcagaaccccactctctgagatataacctcaccgttttgtcctgggatggatcggtgcagagcggatttcttgcagaggtccatcttgacggacagccctttctgagatacgaccggcagaaatgtcgtgctaaaccacaagggcagtgggcagaagacgttttgggcaataagacgtgggatcgggaaactagagacctcaccggaaatggcaaagaccttcggatgacactcgctcatatcaaagaccaaaaggaggtgccgcagagcagccgcgctcagactctggccatgaacgtgaggaacttccttaaggaagacgccatgaagaccaaaacacattaccacgctatgcatgcagactgcctgcaagaacttcgccgttaccttgaaagctctgtggttctccgacgtcgtgtacctccaatggtgaacgtcactagaagcgaggcttctgagggaaacattacagtgacatgcagagcatccagcttctaccccaggaatatcacactgacctggagacaggacggtgtgtctctctcacacgacacacaacagtggggggacgtcctaccagatggcaacggaacataccagacttgggttgccactagaatttgtcagggcgaggagcagcgattcacttgttatatggagcactccggcaaccattcaactcaccctgtccctagtggaaaagttctcgtgctgcaaagtcattggcagacgttccacgtaagcgccgtggcagctgcagccgctgccatctttgtcatcattatcttctacgtgaggtgttgcaaaaagaagaccagcgccgcagaaggacccgagctggtgagccttcaagtgctggatcaacaccctgtcggtacaagcgatcatcgcgatgcaacacagttagggtttcagccgttgatgtccgctctgggttctacaggcagtacagaaggggcttag

SEQ ID NO: 5369 - DNA, 1152 bp, Artificial Sequence
  derived and/or modified sequence
atgggcctaggtcccgtcttccttctgctcgctggcatcttcccatttgcccctccaggggcagctgcggaaccacatagtctcagatacaaccttaccgttctgagctgggatgggtcagtgcagtcagggttcctaaccgaggttcacttagatgggcagccgttcttaaggtgcgacaggcagaaatgtcgagccaagccccagggacagtgggccgaggatgtattggggaataaaacttgggacagagagactagagatctgaccggcaatggcaaagatctgaggatgacgcttgctcacattaaggaccagaaggaagggctccattccctacaggaaattagagtttgtgagatccacgaggacaattcgactcggtcctcccagcacttctattacgacggtgaactgttcctgtcccagaatcttgaaacaaaggagtggactatgcctcaaagcagccgcgctcaaactcttgcaatgaacgtcagaaacttcctgaaggaagatgcaatgaagaccaaaacacattaccatgctatgcatgcagactgtttgcaggagctgagacggtatctgaaatccggtgtcgttcttcgacgcactgtcccacccatggtgaatgtaactcgatctgaagcatccgaaggtaatatcactgtgacctgtcgcgcttccgggttttatccctggaatatcaccttaagctggcggcaggatggcgtttcgctgtcccatgatacccagcagtggggcgatgtgctccccgatggcaatggcacctatcagacatgggtggccacccgaatctgccagggggaggaacagaggttcacctgctatatggagcacagcgggaatcactccacacaccccgtgccaagtgggaaagtcctcgtgttacagtcccattggcaaactttccacgtgagcgccgtcgcagctgccgcaatttttgtaatcataattttttacgtgagatgctgcaagaaaaagacaagtgccgctgaagggcctgagctggtgtctttacaggtcctggatcagcaccccgtgggcacctctgatcatcgggacgccactcagctcggtttccagcctctgatgtcagatctgggcagcaccggctccacggagggcgcatag

SEQ ID NO: 5370 - DNA, 738 bp, Artificial Sequence
  derived and/or modified sequence
atgggccagagagaccagagactggacagagagagaaagggcccccaggacgaccccggcagctaccagggccccgagagaagaaacttcctgaaggaggacgccatgaagaccaagacccactaccacgccatgcacgccgactgcctgcaggagctgagaagatacctgaagagcggcgtggtgctgagaagaaccgtgccccccatggtgaacgtgaccagaagcgaggccagcgagggcaacatcaccgtgacctgcagagccagcggcttctacccctggaacatcaccctgagctggagacaggacggcgtgagcctgagccacgacacccagcagtggggcgacgtgctgcccgacggcaacggcacctaccagacctgggtggccaccagaatctgccagggcgaggagcagagattcacctgctacatggagcacagcggcaaccacagcacccaccccgtgcccagcggcaaggtgctggtgctgcagagccactggcagaccttccacgtgagcgccgtggccgccgccgccatcttcgtgatcatcatcttctacgtgagatgctgcaagaagaagaccagcgccgccgagggccccgagctggtgagcctgcaggtgctggaccagcaccccgtgggcaccagcgaccacagagacgccacccagctgggcttccagcccctgatgagcgacctgggcagcaccggcagcaccgagggcgcctag

SEQ ID NO: 5371 - DNA, 1152 bp, Artificial Sequence
  derived and/or modified sequence
atgggcctgggccccgtgttcctgctgctggccggcatcttccccttcgccccccccggcgccgccgccgagccccacagcctgagatacaacctgaccgtgctgagctgggacggcagcgtgcagagcggcttcctgaccgaggtgcacctggacggccagcccttcctgagatgcgacagacagaagtgcagagccaagccccagggccagtgggccgaggacgtgctgggcaacaagacctgggacagagagaccagagacctgaccggcaacggcaaggacctgagaatgaccctggcccacatcaaggaccagaaggagggcctgcacagcctgcaggagatcagagtgtgcgagatccacgaggacaacagcaccagaagcagccagcacttctactacgacggcgagctgttcctgagccagaacctggagaccaaggagtggaccatgccccagagcagcagagcccagaccctggccatgaacgtgagaaacttcctgaaggaggacgccatgaagaccaagacccactaccacgccatgcacgccgactgcctgcaggagctgagaagatacctgaagagcggcgtggtgctgagaagaaccgtgccccccatggtgaacgtgaccagaagcgaggccagcgagggcaacatcaccgtgacctgcagagccagcggcttctacccctggaacatcaccctgagctggagacaggacggcgtgagcctgagccacgacacccagcagtggggcgacgtgctgcccgacggcaacggcacctaccagacctgggtggccaccagaatctgccagggcgaggagcagagattcacctgctacatggagcacagcggcaaccacagcacccaccccgtgcccagcggcaaggtgctggtgctgcagagccactggcagaccttccacgtgagcgccgtggccgccgccgccatcttcgtgatcatcatcttctacgtgagatgctgcaagaagaagaccagcgccgccgagggccccgagctggtgagcctgcaggtgctggaccagcaccccgtgggcaccagcgaccacagagacgccacccagctgggcttccagcccctgatgagcgacctgggcagcaccggcagcaccgagggcgcctag

SEQ ID NO: 5372 - DNA, 1158 bp, Artificial Sequence
  derived and/or modified sequence
atgggcctgggccccgtgttcctgctgctggccggcatcttccccttcgccccccccggcgccgccgccgagccccacagcctgagatacaacctgaccgtgctgagctgggacggcagcgtgcagagcggcttcctggccgaggtgcacctggacggccagcccttcctgagatacgacagacagaagtgcagagccaagccccagggccagtgggccgaggacgtgctgggcaacaagacctgggacagagagaccagagacctgaccggcaacggcaaggacctgagaatgaccctggcccacatcaaggaccagaaggagggcctgcacagcctgcaggagatcagagtgtgcgagatccacgaggacaacagcaccagaagcagccagcacttctactacgacggcgagctgttcctgagccagaacgtggagaccgaggagtggaccgtgccccagagcagcagagcccagaccctggccatgaacgtgagaaacttcctgaaggaggacgccatgaagaccaagacccactaccacgccatgcacgccgactgcctgcaggagctgagaagatacctggagagcagcgtggtgctgagaagaagagtgccccccatggtgaacgtgaccagaagcgaggccagcgagggcaacatcaccgtgacctgcagagccagcagcttctaccccagaaacatcaccctgacctggagacaggacggcgtgagcctgagccacgacacccagcagtggggcgacgtgctgcccgacggcaacggcacctaccagacctgggtggccaccagaatctgccagggcgaggagcagagattcacctgctacatggagcacagcggcaaccacagcacccaccccgtgcccagcggcaaggtgctggtgctgcagagccactggcagaccttccacgtgagcgccgtggccgccgccgccgccgccatcttcgtgatcatcatcttctacgtgagatgctgcaagaagaagaccagcgccgccgagggccccgagctggtgagcctgcaggtgctggaccagcaccccgtgggcaccagcgaccacagagacgccacccagctgggcttccagcccctgatgagcgccctgggcagcaccggcagcaccgagggcgcctag

SEQ ID NO: 5373 - DNA, 744 bp, Artificial Sequence
  derived and/or modified sequence
atgggccagagagaccagggcctggacagagagagaaagggcccccaggacgaccccggcagctaccagggccccgagagaagaaacttcctgaaggaggacgccatgaagaccaagacccactaccacgccatgcacgccgactgcctgcaggagctgagaagatacctggagagcagcgtggtgctgagaagaagagtgccccccatggtgaacgtgaccagaagcgaggccagcgagggcaacatcaccgtgacctgcagagccagcagcttctaccccagaaacatcaccctgacctggagacaggacggcgtgagcctgagccacgacacccagcagtggggcgacgtgctgcccgacggcaacggcacctaccagacctgggtggccaccagaatctgccagggcgaggagcagagattcacctgctacatggagcacagcggcaaccacagcacccaccccgtgcccagcggcaaggtgctggtgctgcagagccactggcagaccttccacgtgagcgccgtggccgccgccgccgccgccatcttcgtgatcatcatcttctacgtgagatgctgcaagaagaagaccagcgccgccgagggccccgagctggtgagcctgcaggtgctggaccagcaccccgtgggcaccagcgaccacagagacgccacccagctgggcttccagcccctgatgagcgccctgggcagcaccggcagcaccgagggcgcctag

SEQ ID NO: 5374 - DNA, 1029 bp, Artificial Sequence
  derived and/or modified sequence
atgggcctgggccccgtgttcctgctgctggccggcatcttccccttcgccccccccggcgccgccgccgagccccacagcctgagatacaacctgaccgtgctgagctgggacggcagcgtgcagagcggcttcctggccgaggtgcacctggacggccagcccttcctgagatacgacagacagaagtgcagagccaagccccagggccagtgggccgaggacgtgctgggcaacaagacctgggacagagagaccagagacctgaccggcaacggcaaggacctgagaatgaccctggcccacatcaaggaccagaaggaggtgccccagagcagcagagcccagaccctggccatgaacgtgagaaacttcctgaaggaggacgccatgaagaccaagacccactaccacgccatgcacgccgactgcctgcaggagctgagaagatacctggagagcagcgtggtgctgagaagaagagtgccccccatggtgaacgtgaccagaagcgaggccagcgagggcaacatcaccgtgacctgcagagccagcagcttctaccccagaaacatcaccctgacctggagacaggacggcgtgagcctgagccacgacacccagcagtggggcgacgtgctgcccgacggcaacggcacctaccagacctgggtggccaccagaatctgccagggcgaggagcagagattcacctgctacatggagcacagcggcaaccacagcacccaccccgtgcccagcggcaaggtgctggtgctgcagagccactggcagaccttccacgtgagcgccgtggccgccgccgccgccgccatcttcgtgatcatcatcttctacgtgagatgctgcaagaagaagaccagcgccgccgagggccccgagctggtgagcctgcaggtgctggaccagcaccccgtgggcaccagcgaccacagagacgccacccagctgggcttccagcccctgatgagcgccctgggcagcaccggcagcaccgagggcgcctag

SEQ ID NO: 5375 - protein, 419 aa, Artificial Sequence
  derived and/or modified sequence
MLEMLEYNHYQVQTHLENPTKYHIQQAQRQQVKQYLSTTLANKHANQVLSLPCPNQPGDHVMPPVPGSSAPNSPMAMLTLNSNCEKEGFYKFEEQNRAESECPGMNTHSRASCMQMDDVIDDIISLESSYNEEILGLMDPALQMANTLPVSGNLIDLYGNQGLPPPGLTISNSCPANLPNIKRELTACIFPTESEARALAKERQKKDNHNLIERRRRFNINDRIKELGTLIPKSNDPDMRWNKGTILKASVDYIRKLQREQQRAKELENRQKKLEHANRHLLLRIQELEMQARAHGLSLIPSTGLCSPDLVNRIIKQEPVLENCSQDLLQHHADLTCTTTLDLTDGTITFNNNLGTGTEANQAYSVPTKMGSKLEDILMDDTLSPVGVTDPLLSSVSPGASKTSSRRSSMSMEETEHTC

SEQ ID NO: 5376 - DNA, 4490 bp, Artificial Sequence
  derived and/or modified sequence
cgggataccttgtttatagtaccttctctttgccagtccatcttcaaattggaattatagaaagtagagggagggatagtctaccgtctctcactggattggtgccacctaaaacattgttatgctggaaatgctagaatataatcactatcaggtgcagacccacctcgaaaaccccaccaagtaccacatacagcaagcccaacggcagcaggtaaagcagtacctttctaccactttagcaaataaacatgccaaccaagtcctgagcttgccatgtccaaaccagcctggcgatcatgtcatgccaccggtgccggggagcagcgcacccaacagccccatggctatgcttacgcttaactccaactgtgaaaaagagggattttataagtttgaagagcaaaacagggcagagagcgagtgcccaggcatgaacacacattcacgagcgtcctgtatgcagatggatgatgtaatcgatgacatcattagcctagaatcaagttataatgaggaaatcttgggcttgatggatcctgctttgcaaatggcaaatacgttgcctgtctcgggaaacttgattgatctttatggaaaccaaggtctgcccccaccaggcctcaccatcagcaactcctgtccagccaaccttcccaacataaaaagggagctcacagcgtgtatttttcccacagagtctgaagcaagagcactggccaaagagaggcagaaaaaggacaatcacaacctgattgaacgaagaagaagatttaacataaatgaccgcattaaagaactaggtactttgattcccaagtcaaatgatccagacatgcgctggaacaagggaaccatcttaaaagcatccgtggactatatccgaaagttgcaacgagaacagcaacgcgcaaaagaacttgaaaaccgacagaagaaactggagcacgccaaccggcatttgttgctcagaatacaggaacttgaaatgcaggctcgagctcatggactttcccttattccatccacgggtctctgctctccagatttggtgaatcggatcatcaagcaagaacccgttcttgagaactgcagccaagacctccttcagcatcatgcagacctaacctgtacaacaactctcgatctcacggatggcaccatcaccttcaacaacaacctcggaactgggactgaggccaaccaagcctatagtgtccccacaaaaatgggatccaaactggaagacatcctgatggacgacaccctttctcccgtcggtgtcactgatccactcctttcctcagtgtcccccggagcttccaaaacaagcagccggaggagcagtatgagcatggaagagacggagcacacttgttagcgaatcctccctgcactgcattcgcacaaactgcttcctttcttgattcgtagatttaataacttacctgaaggggttttcttgataattttcctttaatatgaaattttttttcatgctttatcaatagcccaggatatattttatttttagaattttgtgaaacagacttgtatattctattttacaactacaaatgcctccaaagtattgtacaaataagtgtgcagtatctgtgaactgaattcaccacagactttagctttctgagcaagaggattttgcgtcagagaaatgtctgtccatttttattcaggggaaacttgatttgagatttttatgcctgtgacttccttggaaatcaaatgtaaagtttaattgaaagaatgtaaagcaaccaaaaagaaaaaaaaaaagaaagaaagaggaaaagaaatccatactaacccttttccattttataaatgtattgattcattggtactgccttaaagatacagtacccctctagctttgtttagtctttatactgcaaactatttaaagaaatatgtattctgtaaaagaaaaaaaaaatgcggccttttcatgaggatcgtctggttagaaaacataactgataccaaccgaaactgaagggagttagaccaaggctctgaaatataaagtctaatcttgctctcttttattctgtgctgttacagttttcttcatcaatgagtgtgatccagtttttcataagatattttattttgaaatggaaattaatgtcctctcaaagtaaaatattgaggagcactgaaagtatgttttactttttttttattttatttttgcttttgataagaaaaccgaactgggcatatttctaattggctttactatttttatttttaaattatgttttactgttcatttgatttgtacagattctttattatcattgttcttttcaatatatttgtattaatttgtaagaatatgcatcttaaaatggcaagttttccatatttttacaactcactggtggttttccgcattctttgtacacccatgaaagaaaacttttatgcaaggtcttgcatttaaaagacagctttgcgaatattttgtaaattacagtctcactcagaactgtttttggacacatttaaggtgtagtattaataggttaaaaccaggctttctagaaagaataaacttacatatttatttttaggacatgaaaatagcaatattcttggagattgataaccatagcattaatacgcccattatggtcatttaaattggggtttatttcagcaaacttgttgaatttatttttaagaaagaaatactgtattgggaagttactgttacttgataacaatgttttaacaagaagcaatgttataaagttagtttcagtgcattatctacttgtgtagtcctatgcaataacagtagtgttacatgtatcaagcctagatgttttatacagatgccatatagtgttatgagccaggctgttgaatggaatttctcagtagcagcctacaactgaatagcaagtggcataaagcatatccattcagaatgaagtgccttaaatatagcagtagtcttttttggactagcactgactgaactgtaatgtaggggaaagtttcatgatggtatctatagtcaagacgaacatgtagcatggtgcctatgtagacaatataagagcttccaattttccttcagatatttttaatattaaatatattttagtgacagagtgccaacttctttcatcaggaaaccttattcaggagggtttttaaaaagtgtttaaatgtcaaatgtgaattggtgatgggtgatggagggttcagagaggagtgatcgtcagatgtgtgaatggacggtttaggtgaaaataatcaactgcatagttcccatgcacgctgggcaatgagaatccttggaaacattggtgatgctatcagttttatagctttatttcttaagggggtagggaaaattagttcccattctttcaacccccttaactgtatagctcttttcctagaatagtgacgcaaatctgcatgaacagctaattgtaccatagtgttcattgatacaatcatagcattgtctatttttctcttcatatttatatgggggggagggcgctggatgcaaaagttgaagatcgtgatgctatgatgttagttttccttagctgattttgagggtttttaaaaataaagcaaggttgactaacctacggccacgggaacaggaccatggttaagcaaccatatagaaagctttgttgaaagaaagtatggcatcttgtaccactgccctgactgtcacaactcctaaccttgccattgcctgcctccccctccccttctccttaagagacaatttctgcaggtggcaggtgagcaagcccaggagaatgctgcaatcttgggggtggttttatttatttcttttttgccaaatagagtgtggattcatttcaggggctagctaagccaagaggcagtggtttgggcttgttgtttgtaacaagaaaatgatccacaccactcccccgattcccgggtgcagaattgtaactcggggttgggcctctatatggagtgaccaaaatgccaaaattgtccatctgcctctgagtagggcaatggaaataccaaaccttctgactttgccaaaaagcatacaagcaacctggtcatacataggatgacaaaattctttctggttgtttttaaacaataaagcaataagaacaaatacaatacataggaagttaaaagcacaaaggaatgaacttattaatatttttgaaaaatgcactgggaaaaagttgatgtcaataacagtataaaacagccctatttcttgataaaaaatgacaaatgactgtctcttgcggatgcttggtactgtaatgttaataatagtcacctgctgttggatgcagcaataatttctgtatggtccatagcactgtatattatggatcgatattaatgtatccaatgaaataatcgacttgttcttgatagcctcattaaagcatttggtttttcacataaaaaaaaaaaaaaaaaaaaaa

SEQ ID NO: 5377 - DNA, 1260 bp, Artificial Sequence
  derived and/or modified sequence
atgctggagatgctggagtacaaccactaccaggtgcagacccacctggagaaccccaccaagtaccacatccagcaggcccagagacagcaggtgaagcagtacctgagcaccaccctggccaacaagcacgccaaccaggtgctgagcctgccctgccccaaccagcccggcgaccacgtgatgccccccgtgcccggcagcagcgcccccaacagccccatggccatgctgaccctgaacagcaactgcgagaaggagggcttctacaagttcgaggagcagaacagagccgagagcgagtgccccggcatgaacacccacagcagagccagctgcatgcagatggacgacgtgatcgacgacatcatcagcctggagagcagctacaacgaggagatcctgggcctgatggaccccgccctgcagatggccaacaccctgcccgtgagcggcaacctgatcgacctgtacggcaaccagggcctgcccccccccggcctgaccatcagcaacagctgccccgccaacctgcccaacatcaagagagagctgaccgcctgcatcttccccaccgagagcgaggccagagccctggccaaggagagacagaagaaggacaaccacaacctgatcgagagaagaagaagattcaacatcaacgacagaatcaaggagctgggcaccctgatccccaagagcaacgaccccgacatgagatggaacaagggcaccatcctgaaggccagcgtggactacatcagaaagctgcagagagagcagcagagagccaaggagctggagaacagacagaagaagctggagcacgccaacagacacctgctgctgagaatccaggagctggagatgcaggccagagcccacggcctgagcctgatccccagcaccggcctgtgcagccccgacctggtgaacagaatcatcaagcaggagcccgtgctggagaactgcagccaggacctgctgcagcaccacgccgacctgacctgcaccaccaccctggacctgaccgacggcaccatcaccttcaacaacaacctgggcaccggcaccgaggccaaccaggcctacagcgtgcccaccaagatgggcagcaagctggaggacatcctgatggacgacaccctgagccccgtgggcgtgaccgaccccctgctgagcagcgtgagccccggcgccagcaagaccagcagcagaagaagcagcatgagcatggaggagaccgagcacacctgctag

SEQ ID NO: 5378 - DNA, 1260 bp, Artificial Sequence
  derived and/or modified sequence
atgctcgagatgttagaatacaaccactaccaggtccagacacacctggaaaatcctaccaaataccacattcagcaggctcaaaggcaacaagtgaaacagtacctgagcactacccttgcgaataagcacgccaaccaggtcttatccctcccctgccctaaccagccaggagatcacgtgatgcccccagtgccaggttcctctgcccccaattcccctatggctatgctgactctcaactctaactgcgagaaggaaggcttctacaagtttgaagagcagaacagggcagagtcagaatgccctggaatgaatactcatagcagggccagctgcatgcagatggatgacgtgatagacgatatcatttccttagagtcttcatataacgaagagattctagggctgatggatcccgccctgcaaatggcaaacactttacccgtgtccggaaatctgatcgatctttacggcaaccagggactaccgccacctgggttgactatcagtaattcttgccccgctaatttacccaacattaaacgcgaattgacggcctgcatcttccccactgagtcagaagcacgcgcactcgccaaagagcgacagaaaaaggataaccacaatttgatagaaagaaggcggaggttcaacattaatgaccggattaaagaacttggaacccttatccctaagtctaatgatcccgacatgaggtggaataaaggcactatcctcaaagcatccgtcgactacatccgaaagctgcagcgcgaacagcaacgcgccaaagagttagaaaacaggcagaagaagctcgagcatgctaataggcacttactcctgcgtatacaggagcttgagatgcaggctcgcgcccatggcctgtccttaataccctccaccgggctatgttctccagacttagttaaccggatcatcaagcaagagcccgtgctggaaaattgcagccaagacctcctgcagcaccatgccgatctgacatgcactacaaccctggacctgacagatggcaccattacgttcaacaataacctggggacgggcaccgaggctaaccaggcatactccgtgcccactaagatgggaagcaagttagaagatattctcatggacgacacactatcccctgtgggcgtaaccgatcccctcctgtcctcagtttcccctggcgcttcaaagacttcatcacgccggagcagtatgtccatggaggaaacagagcatacttgttag

SEQ ID NO: 5379 - DNA, 1260 bp, Artificial Sequence
  derived and/or modified sequence
atgctggagatgctggagtacaaccactaccaggtgcagacccacctggagaaccccaccaagtaccacatccagcaggcccagaggcagcaggtgaagcagtacctgagcaccaccctggccaacaagcacgccaaccaggtgctgagcctgccctgccccaaccagcccggggaccacgtgatgcctcctgtgcccggcagcagcgcccccaacagccccatggccatgctgaccctgaacagcaactgtgagaaggagggcttctacaagtttgaggagcagaacagagctgagagtgaatgtcctggcatgaacacccacagccgggccagctgcatgcagatggatgatgtgattgatgacatcatcagcctggagagcagctacaatgaggagatcctgggcctgatggaccctgccctgcagatggccaacaccctgcctgtgtctggcaacctgattgacctgtatggcaaccagggcctgcccccacctggcctgaccatcagcaacagctgcccagccaacctgcccaacatcaagcgggagctgacagcctgcatcttccccacagagagcgaggcccgggccctggccaaggagcggcagaagaaggacaaccacaacctgattgaaagaagaagacgcttcaacatcaatgaccgcatcaaggagctgggcaccctcatccccaagagcaatgaccctgacatgcgctggaacaagggcaccatcctgaaggcctctgtggactacatcaggaagctgcagcgggagcagcagagggccaaggagctggagaaccggcagaagaagctggagcacgccaacagacacctgctgctgcgcatccaggagctggagatgcaggcccgggcccacggcctgagcctcatccccagcacaggcctgtgcagcccagacctggtgaaccgcatcatcaagcaggagcctgtgctggagaactgcagccaggacctgctgcagcaccacgccgacctgacctgcaccaccaccctggacctgacagatggcaccatcaccttcaacaacaacctgggcaccggcacagaggccaaccaggcctacagcgtgcccaccaagatgggcagcaagctggaggacatcctgatggatgacaccctgagccctgtgggcgtgacagaccccctgctgagctctgtgtcccctggggccagcaagaccagcagccgccgcagctccatgtccatggaggagacagagcacacctgctag

SEQ ID NO: 5380 - DNA, 1260 bp, Artificial Sequence
  derived and/or modified sequence
atgctggagatgctggagtacaaccactaccaggtgcagacccacctggaaaacccaaccaagtaccatatacaacaagcccagcgccagcaggttaaacagtacctttctactaccctcgcaaataaacacgctaaccaagtgctgagtctcccctgtcctaaccagcctggggaccatgtgatgccacctgtgccaggctcatccgcacccaattcccctatggcaatgcttactctgaatagcaattgcgagaaggagggattctacaagtttgaggagcagaatcgtgccgaaagcgagtgtcctggtatgaacacccatagtagggcatcatgcatgcaaatggacgatgttatcgacgacatcatatcactggaatcctcttataacgaagaaatcctaggccttatggatcctgcattgcagatggcaaatacactgcccgtgtcaggcaatctaatcgacctgtacggtaatcaggggctgccacccccaggactgacaatttcgaacagttgccccgctaatttgccaaacataaagcgggagctaacagcatgcatttttccaacggagtccgaggctcgtgcgttagccaaagagcggcagaagaaggacaatcacaatctgatcgagagaaggcggcgtttcaacatcaatgatcggatcaaggagcttgggacgttgattccaaaaagcaatgaccccgatatgcgctggaataaaggcacaattctgaaggcaagtgtagactatatccgcaagttgcaacgcgaacagcaacgcgctaaagagctggagaacaggcagaagaagctggaacacgctaaccgccatttgctgcttagaatccaggagttagaaatgcaagcccgagcacatggattgtcactgattccgtccaccggactttgcagccccgatctagttaatcggatcataaagcaggagcccgtgttagaaaattgctcccaggatctgctgcaacatcacgctgatttgacatgcacaacgactctggacctgaccgacgggactatcacttttaacaacaatctgggaacagggaccgaggctaatcaggcttatagcgtacccacaaaaatgggtagcaaactagaagatattcttatggacgataccctgagcccagtcggcgtcactgacccactgctatccagtgtcagcccaggagcctctaagacctcctcgcgacgcagttccatgagcatggaagaaacagaacacacctgctag

SEQ ID NO: 5381 - DNA, 1260 bp, Artificial Sequence
  derived and/or modified sequence
atgctggagatgctggaatacaatcattatcaggtccagacccacctcgaaaatcctacgaagtaccacattcaacaagcccagagacagcaggttaaacagtacctgtccaccaccctcgccaacaagcacgctaatcaggttctctccctcccctgtccaaatcagccaggggaccatgttatgccaccggtaccaggatcttccgcccctaactctcccatggcaatgctaactctcaacagtaattgcgagaaagagggcttttacaaatttgaagagcagaacagagcagagtccgaatgccctgggatgaatacccactcccgggcttcttgcatgcaaatggatgatgtgattgacgacattataagtctggaatcaagttacaacgaagagatcctggggttgatggacccggctctccaaatggccaataccctgcctgttagtggtaatttgatcgatctctacggcaatcaagggttgccacccccaggcctgacaatctccaatagctgtcctgcgaatttacccaacattaagagggagctgacagcctgtatttttcctacagagtccgaggctcgggctttggcaaaggaaagacagaagaaggacaaccacaatctgatagagagaaggcggagattcaacatcaatgacagaattaaggagctggggactcttatacccaaaagtaatgatccagacatgaggtggaacaagggcactatcctaaaagcctcggtcgattacatacggaaactccagagggaacagcaacgcgctaaggagcttgagaacaggcagaagaaattggagcacgctaaccgtcacctactgctgcgcatacaggagctggaaatgcaggcaagagcgcacggactgagccttattccatctaccgggctctgttctcccgatctggttaaccgcattataaaacaggaaccggtgttagagaactgctctcaggacctgttacaacaccatgcagatctcacatgtactaccacgctcgatcttactgacggaaccatcacattcaataataatttaggaacaggcacagaggccaatcaggcctacagtgtgccaaccaagatgggatctaagctggaggatatactcatggacgacactctaagccctgtgggcgtgactgacccactgcttagctctgttagtccgggtgctagtaaaacctccagtagacggagctctatgtccatggaggaaacagaacacacttgctag

SEQ ID NO: 5382 - DNA, 1956 bp, Artificial Sequence
  derived and/or modified sequence
gggataccttgtttatagtaccttctctttgccagtccatcttcaaattggaattatagaaagtagagggagggatagtctaccgtctctcactggattggtgccacctaaaacattgttatgctggaaatgctagaatataatcactatcaggtgcagacccacctcgaaaaccccaccaagtaccacatacagcaagcccaacggcagcaggtaaagcagtacctttctaccactttagcaaataaacatgccaaccaagtcctgagcttgccatgtccaaaccagcctggcgatcatgtcatgccaccggtgccggggagcagcgcacccaacagccccatggctatgcttacgcttaactccaactgtgaaaaagagggattttataagtttgaagagcaaaacagggcagagagcgagtgcccaggcatgaacacacattcacgagcgtcctgtatgcagatggatgatgtaatcgatgacatcattagcctagaatcaagttataatgaggaaatcttgggcttgatggatcctgctttgcaaatggcaaatacgttgcctgtctcgggaaacttgattgatctttatggaaaccaaggtctgcccccaccaggcctcaccatcagcaactcctgtccagccaaccttcccaacataaaaagggagctcacagcgtgtatttttcccacagagtctgaagcaagagcactggccaaagagaggcagaaaaaggacaatcacaacctgattgaacgaagaagaagatttaacataaatgaccgcattaaagaactaggtactttgattcccaagtcaaatgatccagacatgcgctggaacaagggaaccatcttaaaagcatccgtggactatatccgaaagttgcaacgagaacagcaacgcgcaaaagaacttgaaaaccgacagaagaaactggagcacgccaaccggcatttgttgctcagaatacaggaacttgaaatgcaggctcgagctcatggactttcccttattccatccacgggtctctgctctccagatttggtgaatcggatcatcaagcaagaacccgttcttgagaactgcagccaagacctccttcagcatcatgcagacctaacctgtacaacaactctcgatctcacggatggcaccatcaccttcaacaacaacctcggaactgggactgaggccaaccaagcctatagtgtccccacaaaaatgggatccaaactggaagacatcctgatggacgacaccctttctcccgtcggtgtcactgatccactcctttcctcagtgtcccccggagcttccaaaacaagcagccggaggagcagtatgagcatggaagagacggagcacacttgttagcgaatcctccctgcactgcattcgcacaaactgcttcctttcttgattcgtagatttaataacttacctgaaggggttttcttgataattttcctttaatatgaaattttttttcatgctttatcaatagcccaggatatattttatttttagaattttgtgaaacagacttgtatattctattttacaactacaaatgcctccaaagtattgtacaaataagtgtgcagtatctgtgaactgaattcaccacagactttagctttctgagcaagaggattttgcgtcagagaaatgtctgtccatttttattcaggggaaacttgatttgagatttttatgcctgtgacttccttggaaatcaaatgtaaagtttaattgaaagaatgtaaagcaaccaaaaagaaaaaaaaaaagaaagaaagaggaaaagaaatccatactaacccttttccattttataaatgtattgattcattggtactgccttaaagatacagtacccctctagctttgtttagtctttatactgcaaactatttaaagaaatatgtattctgtaaaagaaaaaaaaaa

SEQ ID NO: 5383 - protein, 756 aa, Artificial Sequence
  derived and/or modified sequence
MSFVAGVIRRLDETVVNRIAAGEVIQRPANAIKEMIENCLDAKSTSIQVIVKEGGLKLIQIQDNGTGIRKEDLDIVCERFTTSKLQSFEDLASISTYGFRGEALASISHVAHVTITTKTADGKCAYRASYSDGKLKAPPKPCAGNQGTQITVEDLFYNIATRRKALKNPSEEYGKILEVVGRYSVHNAGISFSVKKQGETVADVRTLPNASTVDNIRSIFGNAVSRELIEIGCEDKTLAFKMNGYISNANYSVKKCIFLLFINHRLVESTSLRKAIETVYAAYLPKNTHPFLYLSLEISPQNVDVNVHPTKHEVHFLHEESILERVQQHIESKLLGSNSSRMYFTQTLLPGLAGPSGEMVKSTTSLTSSSTSGSSDKVYAHQMVRTDSREQKLDAFLQPLSKPLSSQPQAIVTEDKTDISSGRARQQDEEMLELPAPAEVAAKNQSLEGDTTKGTSEMSEKRGPTSSNPRKRHREDSDVEMVEDDSRKEMTAACTPRRRIINLTSVLSLQEEINEQGHEVLREMLHNHSFVGCVNPQWALAQHQTKLYLLNTTKLSEELFYQILIYDFANFGVLRLSEPAPLFDLAMLALDSPESGWTEEDGPKEGLAEYIVEFLKKKAEMLADYFSLEIDEEGNLIGLPLLIDNYVPPLEGLPIFILRLATEVNWDEEKECFESLSKECAMFYSIRKQYISEESTLSGQQSEVPGSIPNSWKWTVEHIVYKALRSHILPPKHFTEDGNILQLANLPDLYKVFERC

SEQ ID NO: 5384 - protein, 515 aa, Artificial Sequence
  derived and/or modified sequence
MNGYISNANYSVKKCIFLLFINHRLVESTSLRKAIETVYAAYLPKNTHPFLYLSLEISPQNVDVNVHPTKHEVHFLHEESILERVQQHIESKLLGSNSSRMYFTQTLLPGLAGPSGEMVKSTTSLTSSSTSGSSDKVYAHQMVRTDSREQKLDAFLQPLSKPLSSQPQAIVTEDKTDISSGRARQQDEEMLELPAPAEVAAKNQSLEGDTTKGTSEMSEKRGPTSSNPRKRHREDSDVEMVEDDSRKEMTAACTPRRRIINLTSVLSLQEEINEQGHEVLREMLHNHSFVGCVNPQWALAQHQTKLYLLNTTKLSEELFYQILIYDFANFGVLRLSEPAPLFDLAMLALDSPESGWTEEDGPKEGLAEYIVEFLKKKAEMLADYFSLEIDEEGNLIGLPLLIDNYVPPLEGLPIFILRLATEVNWDEEKECFESLSKECAMFYSIRKQYISEESTLSGQQSEVPGSIPNSWKWTVEHIVYKALRSHILPPKHFTEDGNILQLANLPDLYKVFERC

SEQ ID NO: 5385 - protein, 460 aa, Artificial Sequence
  derived and/or modified sequence
MNGYISNANYSVKKCIFLLFINHRLVESTSLRKAIETVYAAYLPKNTHPFLYLSLEISPQNVDVNVHPTKHEVHFLHEESILERVQQHIESKLLGSNSSRMYFTQTLLPGLAGPSGEMVKSTTSLTSSSTSGSSDKVYAHQMVRTDSREQKLDAFLQPLSKPLSSQPQAIVTEDKTDISSGRARQQDEEMLELPAPAEVAAKNQSLEGDTTKGTSEMSEKRGPTSSNPRKRHREDSDVEMVEDDSRKEMTAACTPRRRIINLTSVLSLQEEINEQGHEVLREMLHNHSFVGCVNPQWALAQHQTKLYLLNTTKLSEELFYQILIYDFANFGVLRLSEPAPLFDLAMLALDSPESGWTEEDGPKEGLAEYIVEFLKKKAEMLADYFSLEIDEEGNLIGLPLLIDNYVPPLEGLPIFILRLATEVNWDEEKECFESLSKECAMFYSIRKQYISEESTLSGQQ

SEQ ID NO: 5386 - DNA, 2752 bp, Artificial Sequence
  derived and/or modified sequence
gccgcttcagggagggacgaagagacccagcaacccacagagttgagaaatttgactggcattcaagctgtccaatcaatagctgccgctgaagggtggggctggatggcgtaagctacagctgaaggaagaacgtgagcacgaggcactgaggtgattggctgaaggcacttccgttgagcatctagacgtttccttggctcttctggcgccaaaatgtcgttcgtggcaggggttattcggcggctggacgagacagtggtgaaccgcatcgcggcgggggaagttatccagcggccagctaatgctatcaaagagatgattgagaactgtttagatgcaaaatccacaagtattcaagtgattgttaaagagggaggcctgaagttgattcagatccaagacaatggcaccgggatcaggaaagaagatctggatattgtatgtgaaaggttcactactagtaaactgcagtcctttgaggatttagccagtatttctacctatggctttcgaggtgaggctttggccagcataagccatgtggctcatgttactattacaacgaaaacagctgatggaaagtgtgcatacagagcaagttactcagatggaaaactgaaagcccctcctaaaccatgtgctggcaatcaagggacccagatcacggtggaggaccttttttacaacatagccacgaggagaaaagctttaaaaaatccaagtgaagaatatgggaaaattttggaagttgttggcaggtattcagtacacaatgcaggcattagtttctcagttaaaaaacaaggagagacagtagctgatgttaggacactacccaatgcctcaaccgtggacaatattcgctccatctttggaaatgctgttagtcgagaactgatagaaattggatgtgaggataaaaccctagccttcaaaatgaatggttacatatccaatgcaaactactcagtgaagaagtgcatcttcttactcttcatcaaccatcgtctggtagaatcaacttccttgagaaaagccatagaaacagtgtatgcagcctatttgcccaaaaacacacacccattcctgtacctcagtttagaaatcagtccccagaatgtggatgttaatgtgcaccccacaaagcatgaagttcacttcctgcacgaggagagcatcctggagcgggtgcagcagcacatcgagagcaagctcctgggctccaattcctccaggatgtacttcacccagactttgctaccaggacttgctggcccctctggggagatggttaaatccacaacaagtctgacctcgtcttctacttctggaagtagtgataaggtctatgcccaccagatggttcgtacagattcccgggaacagaagcttgatgcatttctgcagcctctgagcaaacccctgtccagtcagccccaggccattgtcacagaggataagacagatatttctagtggcagggctaggcagcaagatgaggagatgcttgaactcccagcccctgctgaagtggctgccaaaaatcagagcttggagggggatacaacaaaggggacttcagaaatgtcagagaagagaggacctacttccagcaaccccagaaagagacatcgggaagattctgatgtggaaatggtggaagatgattcccgaaaggaaatgactgcagcttgtaccccccggagaaggatcattaacctcactagtgttttgagtctccaggaagaaattaatgagcagggacatgaggttctccgggagatgttgcataaccactccttcgtgggctgtgtgaatcctcagtgggccttggcacagcatcaaaccaagttataccttctcaacaccaccaagcttagtgaagaactgttctaccagatactcatttatgattttgccaattttggtgttctcaggttatcggagccagcaccgctctttgaccttgccatgcttgccttagatagtccagagagtggctggacagaggaagatggtcccaaagaaggacttgctgaatacattgttgagtttctgaagaagaaggctgagatgcttgcagactatttctctttggaaattgatgaggaagggaacctgattggattaccccttctgattgacaactatgtgccccctttggagggactgcctatcttcattcttcgactagccactgaggtgaattgggacgaagaaaaggaatgttttgaaagcctcagtaaagaatgcgctatgttctattccatccggaagcagtacatatctgaggagtcgaccctctcaggccagcagagtgaagtgcctggctccattccaaactcctggaagtggactgtggaacacattgtctataaagccttgcgctcacacattctgcctcctaaacatttcacagaagatggaaatatcctgcagcttgctaacctgcctgatctatacaaagtctttgagaggtgttaaatatggttatttatgcactgtgggatgtgttcttctttctctgtattccgatacaaagtgttgtatcaaagtgtgatatacaaagtgtaccaacataagtgttggtagcacttaagacttatacttgccttctgatagtattcctttatacacagtggattgattataaataaatagatgtgtcttaacataatttcttatttaattttattatgtatatattgtgtcagttcagatgccaaaaagaggtcttgaacatgtcaca

SEQ ID NO: 5387 - DNA, 2296 bp, Artificial Sequence
  derived and/or modified sequence
ttccctgacgtgccagtcaggccttctccttttccgcagaccgtgtgtttctttaccgctctcccccgagaccttttaagggttgtttggagtatgcaaaatccacaagtattcaagtgattgttaaagagggaggcctgaagttgattcagatccaagacaatggcaccgggatcaggaaagaagatctggatattgtatgtgaaaggttcactactagtaaactgcagtcctttgaggatttagccagtatttctacctatggctttcgaggtgaggctttggccagcataagccatgtggctcatgttactattacaacgaaaacagctgatggaaagtgtgcatacagagcaagttactcagatggaaaactgaaagcccctcctaaaccatgtgctggcaatcaagggacccagatcacggtggaggaccttttttacaacatagccacgaggagaaaagctttaaaaaatccaagtgaagaatatgggaaaattttggaagttgttggcaggtattcagtacacaatgcaggcattagtttctcagttaaaaaacaaggagagacagtagctgatgttaggacactacccaatgcctcaaccgtggacaatattcgctccatctttggaaatgctgttagtcgagaactgatagaaattggatgtgaggataaaaccctagccttcaaaatgaatggttacatatccaatgcaaactactcagtgaagaagtgcatcttcttactcttcatcaaccatcgtctggtagaatcaacttccttgagaaaagccatagaaacagtgtatgcagcctatttgcccaaaaacacacacccattcctgtacctcagtttagaaatcagtccccagaatgtggatgttaatgtgcaccccacaaagcatgaagttcacttcctgcacgaggagagcatcctggagcgggtgcagcagcacatcgagagcaagctcctgggctccaattcctccaggatgtacttcacccagactttgctaccaggacttgctggcccctctggggagatggttaaatccacaacaagtctgacctcgtcttctacttctggaagtagtgataaggtctatgcccaccagatggttcgtacagattcccgggaacagaagcttgatgcatttctgcagcctctgagcaaacccctgtccagtcagccccaggccattgtcacagaggataagacagatatttctagtggcagggctaggcagcaagatgaggagatgcttgaactcccagcccctgctgaagtggctgccaaaaatcagagcttggagggggatacaacaaaggggacttcagaaatgtcagagaagagaggacctacttccagcaaccccagaaagagacatcgggaagattctgatgtggaaatggtggaagatgattcccgaaaggaaatgactgcagcttgtaccccccggagaaggatcattaacctcactagtgttttgagtctccaggaagaaattaatgagcagggacatgaggttctccgggagatgttgcataaccactccttcgtgggctgtgtgaatcctcagtgggccttggcacagcatcaaaccaagttataccttctcaacaccaccaagcttagtgaagaactgttctaccagatactcatttatgattttgccaattttggtgttctcaggttatcggagccagcaccgctctttgaccttgccatgcttgccttagatagtccagagagtggctggacagaggaagatggtcccaaagaaggacttgctgaatacattgttgagtttctgaagaagaaggctgagatgcttgcagactatttctctttggaaattgatgaggaagggaacctgattggattaccccttctgattgacaactatgtgccccctttggagggactgcctatcttcattcttcgactagccactgaggtgaattgggacgaagaaaaggaatgttttgaaagcctcagtaaagaatgcgctatgttctattccatccggaagcagtacatatctgaggagtcgaccctctcaggccagcagagtgaagtgcctggctccattccaaactcctggaagtggactgtggaacacattgtctataaagccttgcgctcacacattctgcctcctaaacatttcacagaagatggaaatatcctgcagcttgctaacctgcctgatctatacaaagtctttgagaggtgttaaatatggttatttatgcactgtgggatgtgttcttctttctctgtattccgata

SEQ ID NO: 5388 - DNA, 2608 bp, Artificial Sequence
  derived and/or modified sequence
cacaacggcggaggccgccgggttccctgacgtgccagtcaggccttctccttttccgcagaccgtgtgtttctttaccgctctcccccgagaccttttaagggttgtttggagttttagatgcaaaatccacaagtattcaagtgattgttaaagagggaggcctgaagttgattcagatccaagacaatggcaccgggatcaggaacaatatacgcaaagactattaaatggaagcatacctgacatgttaaaggactatcaaggaggccagtttgtctagaggctgaaaaggaaagagtaataggagatgaggtctgagtgaaaacacgtaaatccttgtgggccaagaaagaagatctggatattgtatgtgaaaggttcactactagtaaactgcagtcctttgaggatttagccagtatttctacctatggctttcgaggtgaggctttggccagcataagccatgtggctcatgttactattacaacgaaaacagctgatggaaagtgtgcatacagagcaagttactcagatggaaaactgaaagcccctcctaaaccatgtgctggcaatcaagggacccagatcacggtggaggaccttttttacaacatagccacgaggagaaaagctttaaaaaatccaagtgaagaatatgggaaaattttggaagttgttggcaggtattcagtacacaatgcaggcattagtttctcagttaaaaaacaaggagagacagtagctgatgttaggacactacccaatgcctcaaccgtggacaatattcgctccatctttggaaatgctgttagtcgagaactgatagaaattggatgtgaggataaaaccctagccttcaaaatgaatggttacatatccaatgcaaactactcagtgaagaagtgcatcttcttactcttcatcaaccatcgtctggtagaatcaacttccttgagaaaagccatagaaacagtgtatgcagcctatttgcccaaaaacacacacccattcctgtacctcagtttagaaatcagtccccagaatgtggatgttaatgtgcaccccacaaagcatgaagttcacttcctgcacgaggagagcatcctggagcgggtgcagcagcacatcgagagcaagctcctgggctccaattcctccaggatgtacttcacccagactttgctaccaggacttgctggcccctctggggagatggttaaatccacaacaagtctgacctcgtcttctacttctggaagtagtgataaggtctatgcccaccagatggttcgtacagattcccgggaacagaagcttgatgcatttctgcagcctctgagcaaacccctgtccagtcagccccaggccattgtcacagaggataagacagatatttctagtggcagggctaggcagcaagatgaggagatgcttgaactcccagcccctgctgaagtggctgccaaaaatcagagcttggagggggatacaacaaaggggacttcagaaatgtcagagaagagaggacctacttccagcaaccccagaaagagacatcgggaagattctgatgtggaaatggtggaagatgattcccgaaaggaaatgactgcagcttgtaccccccggagaaggatcattaacctcactagtgttttgagtctccaggaagaaattaatgagcagggacatgaggttctccgggagatgttgcataaccactccttcgtgggctgtgtgaatcctcagtgggccttggcacagcatcaaaccaagttataccttctcaacaccaccaagcttagtgaagaactgttctaccagatactcatttatgattttgccaattttggtgttctcaggttatcggagccagcaccgctctttgaccttgccatgcttgccttagatagtccagagagtggctggacagaggaagatggtcccaaagaaggacttgctgaatacattgttgagtttctgaagaagaaggctgagatgcttgcagactatttctctttggaaattgatgaggaagggaacctgattggattaccccttctgattgacaactatgtgccccctttggagggactgcctatcttcattcttcgactagccactgaggtgaattgggacgaagaaaaggaatgttttgaaagcctcagtaaagaatgcgctatgttctattccatccggaagcagtacatatctgaggagtcgaccctctcaggccagcagagtgaagtgcctggctccattccaaactcctggaagtggactgtggaacacattgtctataaagccttgcgctcacacattctgcctcctaaacatttcacagaagatggaaatatcctgcagcttgctaacctgcctgatctatacaaagtctttgagaggtgttaaatatggttatttatgcactgtgggatgtgttcttctttctctgtattccgatacaaagtgttgtatcaaagtgtgatatacaaagtgtaccaacataagtgttggtagcacttaagacttatacttgccttctgatagtattcctttatacacagtggattgattataaataaatagatgtgtcttaacataa

SEQ ID NO: 5389 - DNA, 2303 bp, Artificial Sequence
  derived and/or modified sequence
ctttaccgctctcccccgagaccttttaagggttgtttggagttttagatgcaaaatccacaagtattcaagtgattgttaaagagggaggcctgaagttgattcagatccaagacaatggcaccgggatcaggaaagaagatctggatattgtatgtgaaaggttcactactagtaaactgcagtcctttgaggatttagccagtatttctacctatggctttcgaggtgaggctttggccagcataagccatgtggctcatgttactattacaacgaaaacagctgatggaaagtgtgcatacagagcaagttactcagatggaaaactgaaagcccctcctaaaccatgtgctggcaatcaagggacccagatcacggtggaggaccttttttacaacatagccacgaggagaaaagctttaaaaaatccaagtgaagaatatgggaaaattttggaagttgttggcaggtattcagtacacaatgcaggcattagtttctcagttaaaaaacaaggagagacagtagctgatgttaggacactacccaatgcctcaaccgtggacaatattcgctccatctttggaaatgctgttagtcgagaactgatagaaattggatgtgaggataaaaccctagccttcaaaatgaatggttacatatccaatgcaaactactcagtgaagaagtgcatcttcttactcttcatcaaccatcgtctggtagaatcaacttccttgagaaaagccatagaaacagtgtatgcagcctatttgcccaaaaacacacacccattcctgtacctcagtttagaaatcagtccccagaatgtggatgttaatgtgcaccccacaaagcatgaagttcacttcctgcacgaggagagcatcctggagcgggtgcagcagcacatcgagagcaagctcctgggctccaattcctccaggatgtacttcacccagactttgctaccaggacttgctggcccctctggggagatggttaaatccacaacaagtctgacctcgtcttctacttctggaagtagtgataaggtctatgcccaccagatggttcgtacagattcccgggaacagaagcttgatgcatttctgcagcctctgagcaaacccctgtccagtcagccccaggccattgtcacagaggataagacagatatttctagtggcagggctaggcagcaagatgaggagatgcttgaactcccagcccctgctgaagtggctgccaaaaatcagagcttggagggggatacaacaaaggggacttcagaaatgtcagagaagagaggacctacttccagcaaccccagaaagagacatcgggaagattctgatgtggaaatggtggaagatgattcccgaaaggaaatgactgcagcttgtaccccccggagaaggatcattaacctcactagtgttttgagtctccaggaagaaattaatgagcagggacatgaggttctccgggagatgttgcataaccactccttcgtgggctgtgtgaatcctcagtgggccttggcacagcatcaaaccaagttataccttctcaacaccaccaagcttagtgaagaactgttctaccagatactcatttatgattttgccaattttggtgttctcaggttatcggagccagcaccgctctttgaccttgccatgcttgccttagatagtccagagagtggctggacagaggaagatggtcccaaagaaggacttgctgaatacattgttgagtttctgaagaagaaggctgagatgcttgcagactatttctctttggaaattgatgaggaagggaacctgattggattaccccttctgattgacaactatgtgccccctttggagggactgcctatcttcattcttcgactagccactgaggtgaattgggacgaagaaaaggaatgttttgaaagcctcagtaaagaatgcgctatgttctattccatccggaagcagtacatatctgaggagtcgaccctctcaggccagcagtgacccagatgctgatttcccaaggtcaaggatgtctgaagacaatgtgccaatgtgcccagattcttctagttaaggatctacttgagtctcagcccttatgctgtttttgttttccaagctgggatatgaaaaagcagaaaacccaatagggtaacattaatccaagtcaacatagcaaccagtatcttacctaatggcccttctcctgctgactccaagacctgagcagcttcctgagacacaacagtgatggctccagccactggttca

SEQ ID NO: 5390 - DNA, 2271 bp, Artificial Sequence
  derived and/or modified sequence
atgtctttcgtggcaggtgttattcgaaggctggacgaaactgttgtgaaccggatcgccgcaggagaggtgatccagcgtcctgctaatgccattaaagagatgatcgaaaattgcctcgatgctaagtcgacatcgatccaagtcattgtgaaggaaggcggcctgaagctgattcagatacaggacaatggtacgggcatcaggaaggaagacctggatattgtctgcgagagatttacgacatccaaactgcaaagttttgaagatctcgccagcatttccacatatgggtttcggggtgaagccctggccagtatctctcatgtggcgcacgttaccattacaaccaagaccgcagatgggaagtgcgcctaccgggcctcgtattctgatggaaagctaaaggcaccaccaaaaccgtgtgcaggaaaccagggaacccaaatcacggtcgaagatctgttttataatatcgcaacgagaagaaaagccctgaagaacccttccgaagagtacgggaagatcctggaggttgtcggtaggtactctgtgcacaatgccggcatctccttttcagtgaaaaagcagggggaaaccgtcgcagacgtgcgcacattgccgaatgcatcaaccgtagataacatccgtagcatttttggcaacgccgtgagccgcgagctgattgagatcgggtgtgaggacaagacactggcctttaaaatgaacggctatatctcaaacgcaaattattccgtgaaaaagtgtattttccttctttttatcaatcaccgtctcgtcgaaagtacctcccttagaaaagctatcgaaacagtgtatgctgcctatttacccaagaacacccatcccttcctctacctgtccctggagatctccccacaaaacgttgatgtcaacgtccaccctacgaagcacgaagtccacttcctacatgaggaatcaatactggaacgagttcagcaacatatcgagtcgaagcttctcggatctaacagctcaaggatgtacttcacacagactctcctccccgggctggccggcccttccggtgagatggtgaaaagcacaacctccctaacttcaagtagcacttctggtagctctgataaagtctacgcccaccagatggtgagaaccgactcaagggagcagaaacttgacgcttttctgcagccacttagtaagcctctgagtagccagcctcaagcaatagtgaccgaagacaaaacggatatctcaagtggccgggcgcgacagcaggacgaggaaatgctggaacttcccgcacctgctgaggttgccgccaagaaccagagtctcgagggggacacgaccaaaggaaccagtgaaatgtccgagaagcgcggccccacctccagcaaccctagaaagcgccacagggaggatagcgatgtggagatggttgaagatgattcaaggaaagaaatgacagcggcctgcaccccgagacgcaggatcattaatctgacaagtgtcctcagcctgcaagaggagatcaatgagcagggacatgaggtgctgcgtgagatgctccacaaccattcttttgtcggctgcgttaatccccagtgggcactggcgcagcaccagaccaaactatatcttctcaatacaactaaattgagcgaggagcttttctaccaaatacttatctatgattttgcaaacttcggggtattacgtctcagtgagcccgcacccttgtttgatctggcaatgctggctctcgatagtccagaatccgggtggactgaggaggatggaccaaaggaggggttggcagagtatattgtggaattcctgaagaagaaggcagaaatgctagctgactacttcagtctagagatcgacgaagagggaaatttaattggcctccccctcttaattgacaattacgtccctcccctggaggggctccctattttcatcctgcgactcgccactgaggttaactgggacgaggagaaagaatgcttcgagtctctgagcaaagaatgtgctatgttttactctattcgcaaacagtacatctccgaggaatcaacactcagcgggcaacagtctgaggtgcctggttctatccccaacagctggaagtggactgtggaacacatcgtgtataaggcattgaggagtcacatcctcccaccaaagcacttcactgaagacggtaacattttgcagctcgccaacctgccagatctctataaagtctttgaacggtgttag

SEQ ID NO: 5391 - DNA, 2271 bp, Artificial Sequence
  derived and/or modified sequence
atgagctttgtggccggggtcatccggcggctggatgagaccgtggtgaacagaattgctgctggggaggtgatccagaggcctgccaatgccatcaaggagatgattgagaactgcctggatgccaagagcaccagcatccaggtgattgtgaaggagggcggcctgaagctgatccagatccaggacaatggcaccggcatcagaaaagaagacctggacatcgtgtgtgagcgcttcaccaccagcaagctgcagagctttgaggacctggccagcatcagcacctacggcttccggggggaggccctggccagcatcagccacgtggcccacgtgaccatcaccaccaagacagcagatggaaaatgtgcctaccgggccagctacagtgatggcaagctgaaggccccacccaagccctgtgccggcaaccagggcacccagatcaccgtggaggacctcttctacaacatcgccaccaggaggaaggccctgaagaaccccagcgaggagtatggcaagatcctggaggtggtgggccgctacagcgtgcacaatgccggcatctccttctctgtgaagaagcagggcgagaccgtggctgatgtgaggaccctgcccaatgccagcacagtggacaacatccgcagcatctttggaaatgctgtgtcccgggagctgattgaaattggctgtgaggacaagaccctggccttcaagatgaatggctacatcagcaatgccaactacagcgtgaagaagtgcatcttcctgctcttcatcaaccaccggctggtggagagcaccagcctgaggaaggccatcgagaccgtgtatgctgcctacctgcccaagaacacccaccccttcctgtacctgagcctggagatcagcccccagaatgtggatgtgaatgtgcaccccaccaagcatgaggtgcacttcctgcacgaggagagcatcctggagcgggtgcagcagcacatcgagagcaagctgctgggcagcaacagcagcaggatgtacttcacccagaccctgctgcccggcctggccggccccagcggggagatggtgaagagcaccaccagcctgaccagcagcagcaccagcggcagcagtgacaaggtgtatgcccaccagatggtgaggacagacagccgggagcagaagctggatgccttcctgcagcccctgagcaagcccctgagcagccagccccaggccatcgtgacagaggacaagacagacatcagcagcggccgggcccggcagcaggatgaggagatgctggagctgcctgccccagctgaggtggccgccaagaaccagagcctggagggggacaccaccaagggcaccagcgagatgtctgagaagaggggccccaccagcagcaaccccaggaagaggcacagagaagattctgatgtggagatggtggaggatgacagcaggaaggagatgacagctgcctgcaccccaagaagacgcatcatcaacctgacctctgtgctgagcctgcaggaggagatcaatgagcagggccacgaggtgctgcgggagatgctgcacaaccacagctttgtgggctgtgtgaacccccagtgggccctggcccagcaccagaccaagctgtacctgctgaacaccaccaagctgtctgaggagctgttctaccagatcctgatctatgactttgccaactttggagtgctgcggctgtctgagcccgcccccctgtttgacctggccatgctggccctggacagccctgagagcggctggacagaggaggatggccccaaggagggcctggccgagtacatcgtggagttcctgaagaagaaggccgagatgctggccgactacttcagcctggagattgatgaggagggcaacctgattggcctgcccctgctgattgacaactacgtgccccccctggagggcctgcccatcttcatcctgcggctggccacagaggtgaactgggatgaggagaaggaatgttttgagagcctgagcaaagaatgtgccatgttctacagcatcaggaagcagtacatcagcgaggagagcaccctgagcggccagcagagcgaggtgcccggcagcatccccaacagctggaagtggacagtggagcacatcgtgtacaaggccctgcggagccacatcctgccccccaagcacttcacagaagatggcaacatcctgcagctggccaacctgcctgacctgtacaaggtgtttgagcgctgctag

SEQ ID NO: 5392 - DNA, 2271 bp, Artificial Sequence
  derived and/or modified sequence
atgagcttcgtggccggcgtgatccggcggctggacgagaccgtggtgaacagaatcgctgctggtgaggtcattcagaggcccgcaaatgccatcaaggaaatgatcgaaaactgtctggacgccaagtcaactagcattcaggtcattgtgaaagaggggggactcaaattgatacaaatccaggacaatgggactgggattcggaaagaggatctagacatcgtatgcgagcggtttaccacaagcaagcttcaaagcttcgaagatttggcgagcatttccacctacggcttcagaggggaagcactcgcatcaatctctcatgtggctcatgtcaccattaccaccaagaccgccgacggcaagtgtgcatatcgggccagctatagtgacggcaagctcaaagcgcctccaaagccatgcgcaggaaatcagggcacgcagatcactgttgaagatcttttctacaacatcgccaccagacgaaaggcactgaagaacccatccgaggaatacggcaaaatactggaagtggtcggcaggtactcagtacataatgccggcatttcgtttagcgtcaagaagcagggagaaactgtagctgatgtgcgaacccttccgaacgcctcaaccgtggacaatattaggtccatcttcgggaatgctgtctcccgggagctgatcgagattgggtgtgaagataagacgctagcgttcaaaatgaacggttacattagtaacgcaaactacagcgtgaaaaaatgcatattccttctgtttattaaccacagactggtcgagagtacctcgctgcggaaggccattgaaaccgtatacgccgcgtatctgcctaagaatacacatcctttcttgtacctgagtctggagatcagtccccagaacgttgacgttaacgtgcaccccacaaaacatgaggttcattttctccacgaagagtccatcctggaaagagttcagcaacacatcgagtcaaaattgctcggaagtaattcgagccggatgtacttcactcagaccctgttgcccgggcttgcaggacccagcggtgagatggtcaaatctacaacttcattaactagcagttcgacttcgggtagttctgacaaagtgtatgcgcaccagatggtgaggaccgattccagggaacagaaactagatgcgtttctgcagccactgtctaagcccttgtccagtcagccacaagcgatcgtaaccgaagacaagacggacattagtagcgggcgagcaaggcagcaggacgaggaaatgcttgaattgccagctcctgccgaggtggcggccaagaaccaaagcctcgagggcgacaccacaaaagggacctccgagatgagcgaaaaacgcgggccaaccagctcaaacccccgaaaaaggcacagggaggactcagacgttgagatggttgaggacgatagccgcaaggagatgacagccgcctgtactccacgtaggaggatcattaatctcacaagcgtgctatcgctgcaagaagagattaacgaacaaggacatgaggtactacgagagatgttgcacaaccacagctttgttggatgcgtaaatccacagtgggcgttagcccagcaccaaactaaattgtacctgctaaatactactaagctcagcgaggaactattttaccagattctgatctacgacttcgccaacttcggcgtgcttaggctgtccgagcccgcaccactcttcgatctggctatgctggccctggacagccccgaaagtggatggaccgaagaggacgggccaaaggagggcctggccgaatacattgtcgagtttctgaaaaagaaagcagagatgctagcagattacttttcgctcgagatagacgaggagggcaacctgatcggcttgcccctgttaattgataattatgttccacctttggaaggcctccccatctttattctgcgcctagccactgaagtgaattgggatgaggagaaggaatgcttcgagtctttgtcaaaagaatgcgctatgttttactcaatccgcaagcaatacatcagtgaggaatctaccctgtcagggcagcagtccgaggttcctggaagcatcccaaactcatggaagtggaccgttgaacatatcgtttataaggcactccggagccatattctaccacctaagcactttacagaagatggaaacatattacagctggcaaatttgccagacctgtataaagtttttgagcggtgctag

SEQ ID NO: 5393 - DNA, 2271 bp, Artificial Sequence
  derived and/or modified sequence
atgtcgtttgtggctggggtgatacgcagactagatgagaccgttgtcaacaggattgcggctggggaggtgattcagaggcctgcaaacgcgattaaggagatgatcgagaactgtctggacgccaagagcaccagcatccaggtgattgtgaaagaaggaggcctcaagctcattcagattcaggataacgggaccgggattcgcaaggaggatctggacattgtctgtgagcgattcacaacatctaagctgcagtcattcgaagacctcgcttcaatctctacctacggattcagaggggaggctctggcctccatcagccatgtggcacacgttaccatcaccactaaaacagccgatggcaagtgcgcatatcgggcaagctactctgacgggaagctgaaagccccacccaaaccctgcgccggtaatcagggcactcagataactgtagaggaccttttctataacatcgccacaagacgaaaggctctgaagaacccgagcgaggagtatgggaaaatcctggaagtggtaggtcgctactccgtacacaacgccggtatctcattcagcgtgaaaaaacagggggagaccgttgcagacgtcaggacattgccaaacgccagcaccgtggataacatccggagcatcttcggtaacgcagtgagtcgcgagctcatagaaattggatgtgaggacaagaccctagcattcaagatgaatggctatatctctaatgccaactattccgtcaaaaagtgcatctttctgctctttattaaccacaggctcgtggaaagcacctcgttaagaaaagccattgaaactgtgtatgctgcatacctgcccaaaaatacccatccctttctttatctgtcactggagatttcaccgcaaaatgttgacgtgaatgtgcaccctacaaagcacgaggtgcattttctgcacgaggagtcaatcctggagagggtccagcaacatattgagtcaaaactgttgggttccaacagctcacggatgtatttcacacaaacattacttcccggactggcaggcccttctggcgagatggtgaaatctaccacaagcctgacatcctcttcgaccagtgggtcttccgataaggtctatgcacaccagatggtgcggaccgactctcgagagcaaaaacttgatgcattcctacagccactttcaaaacccttgagcagccagcctcaggcgatcgtgacagaagataaaacggatatctcatccggcagagcaaggcagcaagatgaggagatgctggagctgcccgctcccgctgaagtcgctgcaaagaatcagagtctggagggggacactaccaaaggcacttcagaaatgtccgagaagaggggaccgacttccagcaatccacgcaaacgacatagggaggactctgacgtggagatggtggaggatgatagccggaaagagatgaccgccgcttgcaccccaagacgccgtatcatcaacctcacaagcgtgctgtctctgcaagaagagatcaatgagcagggacacgaggtactccgcgagatgttgcacaatcatagcttcgttggctgtgtgaatccccagtgggccctggcccagcatcagactaaactctatttactgaacacgactaaacttagcgaagagctcttctaccagatccttatttatgacttcgctaattttggagtgctacggctgagtgagcccgctcctttatttgacctcgcgatgctggcactcgattctcctgagtctggctggaccgaagaagacggcccaaaagagggcttggccgagtacatcgtcgagttcctgaagaagaaagctgaaatgctggccgactatttcagtctggagattgatgaagaaggaaatctgatcggattgcctcttctcattgacaactacgtcccaccgctcgaaggactgccaatcttcatcctgaggttggcgacggaagtgaactgggacgaagaaaaggagtgtttcgagtcgctgtccaaagagtgtgccatgttctactcaattcgcaagcagtacatcagcgaagagtcaaccctgtctggacagcagtccgaggtacctggcagtatcccgaactcctggaagtggaccgtggaacacatcgtgtacaaggctcttcgctcccatatactccctcccaagcattttacagaagacgggaatattttgcagcttgcaaatctgccagatctgtataaagtttttgagagatgttag

SEQ ID NO: 5394 - DNA, 2271 bp, Artificial Sequence
  derived and/or modified sequence
atgagcttcgtggccggcgtgatcagaagactggacgagaccgtggtgaacagaatcgccgccggcgaggtgatccagagacccgccaacgccatcaaggagatgatcgagaactgcctggacgccaagagcaccagcatccaggtgatcgtgaaggagggcggcctgaagctgatccagatccaggacaacggcaccggcatcagaaaggaggacctggacatcgtgtgcgagagattcaccaccagcaagctgcagagcttcgaggacctggccagcatcagcacctacggcttcagaggcgaggccctggccagcatcagccacgtggcccacgtgaccatcaccaccaagaccgccgacggcaagtgcgcctacagagccagctacagcgacggcaagctgaaggccccccccaagccctgcgccggcaaccagggcacccagatcaccgtggaggacctgttctacaacatcgccaccagaagaaaggccctgaagaaccccagcgaggagtacggcaagatcctggaggtggtgggcagatacagcgtgcacaacgccggcatcagcttcagcgtgaagaagcagggcgagaccgtggccgacgtgagaaccctgcccaacgccagcaccgtggacaacatcagaagcatcttcggcaacgccgtgagcagagagctgatcgagatcggctgcgaggacaagaccctggccttcaagatgaacggctacatcagcaacgccaactacagcgtgaagaagtgcatcttcctgctgttcatcaaccacagactggtggagagcaccagcctgagaaaggccatcgagaccgtgtacgccgcctacctgcccaagaacacccaccccttcctgtacctgagcctggagatcagcccccagaacgtggacgtgaacgtgcaccccaccaagcacgaggtgcacttcctgcacgaggagagcatcctggagagagtgcagcagcacatcgagagcaagctgctgggcagcaacagcagcagaatgtacttcacccagaccctgctgcccggcctggccggccccagcggcgagatggtgaagagcaccaccagcctgaccagcagcagcaccagcggcagcagcgacaaggtgtacgcccaccagatggtgagaaccgacagcagagagcagaagctggacgccttcctgcagcccctgagcaagcccctgagcagccagccccaggccatcgtgaccgaggacaagaccgacatcagcagcggcagagccagacagcaggacgaggagatgctggagctgcccgcccccgccgaggtggccgccaagaaccagagcctggagggcgacaccaccaagggcaccagcgagatgagcgagaagagaggccccaccagcagcaaccccagaaagagacacagagaggacagcgacgtggagatggtggaggacgacagcagaaaggagatgaccgccgcctgcacccccagaagaagaatcatcaacctgaccagcgtgctgagcctgcaggaggagatcaacgagcagggccacgaggtgctgagagagatgctgcacaaccacagcttcgtgggctgcgtgaacccccagtgggccctggcccagcaccagaccaagctgtacctgctgaacaccaccaagctgagcgaggagctgttctaccagatcctgatctacgacttcgccaacttcggcgtgctgagactgagcgagcccgcccccctgttcgacctggccatgctggccctggacagccccgagagcggctggaccgaggaggacggccccaaggagggcctggccgagtacatcgtggagttcctgaagaagaaggccgagatgctggccgactacttcagcctggagatcgacgaggagggcaacctgatcggcctgcccctgctgatcgacaactacgtgccccccctggagggcctgcccatcttcatcctgagactggccaccgaggtgaactgggacgaggagaaggagtgcttcgagagcctgagcaaggagtgcgccatgttctacagcatcagaaagcagtacatcagcgaggagagcaccctgagcggccagcagagcgaggtgcccggcagcatccccaacagctggaagtggaccgtggagcacatcgtgtacaaggccctgagaagccacatcctgccccccaagcacttcaccgaggacggcaacatcctgcagctggccaacctgcccgacctgtacaaggtgttcgagagatgctag

SEQ ID NO: 5395 - protein, 745 aa, Artificial Sequence
  derived and/or modified sequence
MGVPFFSSLRCMVDLGPCWAGGLTAEMKLLLALAGLLAILATPQPSEGAAPAVLGEVDTSLVLSSMEEAKQLVDKAYKERRESIKQRLRSGSASPMELLSYFKQPVAATRTAVRAADYLHVALDLLERKLRSLWRRPFNVTDVLTPAQLNVLSKSSGCAYQDVGVTCPEQDKYRTITGMCNNRRSPTLGASNRAFVRWLPAEYEDGFSLPYGWTPGVKRNGFPVALARAVSNEIVRFPTDQLTPDQERSLMFMQWGQLLDHDLDFTPEPAARASFVTGVNCETSCVQQPPCFPLKIPPNDPRIKNQADCIPFFRSCPACPGSNITIRNQINALTSFVDASMVYGSEEPLARNLRNMSNQLGLLAVNQRFQDNGRALLPFDNLHDDPCLLTNRSARIPCFLAGDTRSSEMPELTSMHTLLLREHNRLATELKSLNPRWDGERLYQEARKIVGAMVQIITYRDYLPLVLGPTAMRKYLPTYRSYNDSVDPRIANVFTNAFRYGHTLIQPFMFRLDNRYQPMEPNPRVPLSRVFFASWRVVLEGGIDPILRGLMATPAKLNRQNQIAVDEIRERLFEQVMRIGLDLPALNMQRSRDHGLPGYNAWRRFCGLPQPETVGQLGTVLRNLKLARKLMEQYGTPNNIDIWMGGVSEPLKRKGRVGPLLACIIGTQFRKLRDGDRFWWENEGVFSMQQRQALAQISLPRIICDNTGITTVSKNNIFMSNSYPRDFVNCSTLPALNLASWREAS

SEQ ID NO: 5396 - protein, 777 aa, Artificial Sequence
  derived and/or modified sequence
MGVPFFSSLRCMVDLGPCWAGGLTAEMKLLLALAGLLAILATPQPSEGAAPAVLGEVDTSLVLSSMEEAKQLVDKAYKERRESIKQRLRSGSASPMELLSYFKQPVAATRTAVRAADYLHVALDLLERKLRSLWRRPFNVTDVLTPAQLNVLSKSSGCAYQDVGVTCPEQDKYRTITGMCNNRCGWLGVAAGTGLREASRTPQASRCQRPVLPCRRSPTLGASNRAFVRWLPAEYEDGFSLPYGWTPGVKRNGFPVALARAVSNEIVRFPTDQLTPDQERSLMFMQWGQLLDHDLDFTPEPAARASFVTGVNCETSCVQQPPCFPLKIPPNDPRIKNQADCIPFFRSCPACPGSNITIRNQINALTSFVDASMVYGSEEPLARNLRNMSNQLGLLAVNQRFQDNGRALLPFDNLHDDPCLLTNRSARIPCFLAGDTRSSEMPELTSMHTLLLREHNRLATELKSLNPRWDGERLYQEARKIVGAMVQIITYRDYLPLVLGPTAMRKYLPTYRSYNDSVDPRIANVFTNAFRYGHTLIQPFMFRLDNRYQPMEPNPRVPLSRVFFASWRVVLEGGIDPILRGLMATPAKLNRQNQIAVDEIRERLFEQVMRIGLDLPALNMQRSRDHGLPGYNAWRRFCGLPQPETVGQLGTVLRNLKLARKLMEQYGTPNNIDIWMGGVSEPLKRKGRVGPLLACIIGTQFRKLRDGDRFWWENEGVFSMQQRQALAQISLPRIICDNTGITTVSKNNIFMSNSYPRDFVNCSTLPALNLASWREAS

SEQ ID NO: 5397 - DNA, 2238 bp, Artificial Sequence
  derived and/or modified sequence
atgggcgtgcccttcttcagcagcctgagatgcatggtggacctgggcccctgctgggccggcggcctgaccgccgagatgaagctgctgctggccctggccggcctgctggccatcctggccaccccccagcccagcgagggcgccgcccccgccgtgctgggcgaggtggacaccagcctggtgctgagcagcatggaggaggccaagcagctggtggacaaggcctacaaggagagaagagagagcatcaagcagagactgagaagcggcagcgccagccccatggagctgctgagctacttcaagcagcccgtggccgccaccagaaccgccgtgagagccgccgactacctgcacgtggccctggacctgctggagagaaagctgagaagcctgtggagaagacccttcaacgtgaccgacgtgctgacccccgcccagctgaacgtgctgagcaagagcagcggctgcgcctaccaggacgtgggcgtgacctgccccgagcaggacaagtacagaaccatcaccggcatgtgcaacaacagaagaagccccaccctgggcgccagcaacagagccttcgtgagatggctgcccgccgagtacgaggacggcttcagcctgccctacggctggacccccggcgtgaagagaaacggcttccccgtggccctggccagagccgtgagcaacgagatcgtgagattccccaccgaccagctgacccccgaccaggagagaagcctgatgttcatgcagtggggccagctgctggaccacgacctggacttcacccccgagcccgccgccagagccagcttcgtgaccggcgtgaactgcgagaccagctgcgtgcagcagcccccctgcttccccctgaagatcccccccaacgaccccagaatcaagaaccaggccgactgcatccccttcttcagaagctgccccgcctgccccggcagcaacatcaccatcagaaaccagatcaacgccctgaccagcttcgtggacgccagcatggtgtacggcagcgaggagcccctggccagaaacctgagaaacatgagcaaccagctgggcctgctggccgtgaaccagagattccaggacaacggcagagccctgctgcccttcgacaacctgcacgacgacccctgcctgctgaccaacagaagcgccagaatcccctgcttcctggccggcgacaccagaagcagcgagatgcccgagctgaccagcatgcacaccctgctgctgagagagcacaacagactggccaccgagctgaagagcctgaaccccagatgggacggcgagagactgtaccaggaggccagaaagatcgtgggcgccatggtgcagatcatcacctacagagactacctgcccctggtgctgggccccaccgccatgagaaagtacctgcccacctacagaagctacaacgacagcgtggaccccagaatcgccaacgtgttcaccaacgccttcagatacggccacaccctgatccagcccttcatgttcagactggacaacagataccagcccatggagcccaaccccagagtgcccctgagcagagtgttcttcgccagctggagagtggtgctggagggcggcatcgaccccatcctgagaggcctgatggccacccccgccaagctgaacagacagaaccagatcgccgtggacgagatcagagagagactgttcgagcaggtgatgagaatcggcctggacctgcccgccctgaacatgcagagaagcagagaccacggcctgcccggctacaacgcctggagaagattctgcggcctgccccagcccgagaccgtgggccagctgggcaccgtgctgagaaacctgaagctggccagaaagctgatggagcagtacggcacccccaacaacatcgacatctggatgggcggcgtgagcgagcccctgaagagaaagggcagagtgggccccctgctggcctgcatcatcggcacccagttcagaaagctgagagacggcgacagattctggtgggagaacgagggcgtgttcagcatgcagcagagacaggccctggcccagatcagcctgcccagaatcatctgcgacaacaccggcatcaccaccgtgagcaagaacaacatcttcatgagcaacagctaccccagagacttcgtgaactgcagcaccctgcccgccctgaacctggccagctggagagaggccagctag

SEQ ID NO: 5398 - DNA, 2238 bp, Artificial Sequence
  derived and/or modified sequence
atgggagtcccctttttttcttctttacgttgcatggtggatcttggaccttgctgggccgggggcctcaccgccgagatgaagctgctgttagccttggccgggctgctagctatcctggccactcctcagcccagcgagggcgccgcccccgcggtactgggggaggtggatacctcattagtactatctagcatggaagaggccaaacagttggttgacaaggcatataaggaaaggcgggagtccattaaacagagactacgcagcggctccgcctctcctatggagctgctgtcttactttaaacaacctgtcgctgccacacgcacagcggtaagggcggcagattatctccatgtggccctcgacctgcttgagaggaagttaaggtcgttgtggcggaggccgttcaacgttacagatgtgctcacccctgcccagctgaatgtgctcagcaaatcttctggttgcgcgtaccaggacgttggagtgacctgccccgagcaggataagtaccgcaccatcaccggaatgtgcaacaacaggcggtctcctacactgggggccagcaatcgggctttcgttcgctggcttccggcggagtatgaggatgggttctccctgccttacggttggacacctggcgtgaaacggaatgggttcccggtggccttagcccgggccgttagcaacgagattgtacggtttcccactgaccaattgacaccggaccaggagagatccttaatgtttatgcagtgggggcaacttttagatcatgatttggatttcacgcctgagcccgctgcgagggctagcttcgttacgggggttaattgtgagactagctgtgtccagcagccaccgtgcttccccctaaaaattccacctaacgatcctcgcattaagaatcaggctgattgcattcctttctttagatcgtgccccgcttgcccaggcagtaacataaccataaggaatcagatcaatgccctaactagtttcgtggatgcctctatggtgtatggaagtgaggaaccgctagctaggaatcttcggaacatgtccaatcagttgggattgctcgcagtaaatcagaggttccaggataatggaagggccctcctaccgttcgacaacctgcacgatgatccctgcctgctgacaaacagatctgctcgcatcccatgcttccttgccggagatacccggtcttccgagatgccagaactgacttcaatgcataccctgttgttaagagagcataacagattggccacagaactcaaaagcttgaatccaagatgggatggggagcgcctgtatcaggaggctcggaagatcgtaggcgcaatggtacagattatcacttatcgcgactacctcccactggtcctcggccccaccgcgatgaggaagtacctgcccacttacaggtcctataatgatagcgtggatcctagaatcgcgaatgtgttcaccaacgcctttcgatacggccacaccttgatccagccgttcatgttcaggcttgataatagataccaacccatggagccaaaccctagggtgcctcttagccgagtgtttttcgcctcctggcgcgttgtactggagggtggaatcgacccgatcctgaggggactgatggccactcctgccaaacttaatcggcagaatcagattgctgtcgatgagattcgggagcgcctcttcgagcaagttatgaggattggactagacttacctgccttgaacatgcagaggtctcgagatcacggcctgccggggtataacgcctggcggagattttgtggactgccacagccagagacggtaggccagcttggtaccgtgcttcgaaacctgaagctagccaggaaactcatggaacagtatgggacccctaacaacatcgatatctggatgggcggtgtttccgagccgttgaaaaggaagggacgtgtcggaccgctgctcgcatgtatcatcggaacccagttccgaaaacttcgcgatggggatcggttttggtgggaaaacgagggtgtttttagcatgcagcagcgacaggcccttgcccaaataagcctgccccgcatcatctgcgataataccggcatcacaacagtgtctaagaataacatattcatgagtaatagttatcctcgggactttgtaaactgtagcactttgccggccctgaacctggcctcgtggcgcgaggcatcctag

SEQ ID NO: 5399 - DNA, 2238 bp, Artificial Sequence
  derived and/or modified sequence
atgggcgtgcccttcttcagcagcctgcgctgcatggtggacctgggcccctgctgggccggcggcctgacagctgagatgaagctgctgctggccctggccggcctgctggccatcctggccaccccccagcccagcgagggcgccgccccagctgtgctgggggaggtggacaccagcctggtgctgagctccatggaggaggccaagcagctggtggacaaggcctacaaggagcggcgggagagcatcaagcagaggctgcggagcggcagcgccagccccatggagctgctgagctacttcaagcagcctgtggccgccaccaggacagctgtgcgggctgctgactacctgcacgtggccctggacctgctggagaggaagctgcggagcctgtggaggcggcccttcaacgtgacagatgtgctgaccccagcccagctgaatgtgctgagcaagagcagcggctgtgcctaccaggatgtgggcgtgacctgcccagagcaggacaagtaccgcaccatcaccggcatgtgcaacaacagaagaagccccaccctgggcgccagcaacagagcctttgtgcgctggctgcctgcagaatatgaagatggcttcagcctgccctacggctggaccccaggagtgaagagaaatggcttccctgtggccctggcccgggctgtgtccaatgagatcgtgcgcttccccacagaccagctgaccccagaccaggagaggagcctgatgttcatgcagtggggccagctgctggaccatgacctggacttcaccccagagcctgctgcccgggccagctttgtgactggagtgaactgtgagaccagctgtgtgcagcagcccccctgcttccccctgaagatccccccaaatgacccccgcatcaagaaccaggccgactgcatccccttcttccgcagctgcccagcctgccccggcagcaacatcaccatccggaaccagatcaatgccctgaccagctttgtggatgcctccatggtgtatggcagcgaggagcccctggccaggaacctgaggaacatgagcaaccagctgggcctgctggccgtgaaccagcgcttccaggacaatggccgggccctgctgccctttgacaacctgcatgatgacccctgcctgctgaccaacagaagtgcccgcatcccctgcttcctggccggggacaccaggagcagcgagatgcctgagctgacctccatgcacaccctgctgctgcgggagcacaaccggctggccacagagctgaagagcctgaacccccgctgggatggagagcggctgtaccaggaggccaggaagatcgtgggcgccatggtgcagatcatcacctacagagactacctgcccctggtgctgggccccacagccatgaggaagtacctgcccacctaccgcagctacaatgattctgtggacccccgcatcgccaacgtgttcaccaatgccttccgctatggccacaccctcatccagcccttcatgttccggctggacaaccgctaccagcccatggagcccaacccccgggtgcccctgagcagggtcttctttgcctcctggagggtggtgctggagggcggcatcgaccccatcctgcggggcctgatggccaccccagccaagctgaaccggcagaaccagattgctgtggatgagatccgggagcggctgtttgagcaggtgatgagaattggcctggacctgcctgccctgaacatgcagaggagccgggaccacggcctgcccggctacaatgcctggaggcgcttctgtggcctgccccagcctgagaccgtgggccagctgggcaccgtgctgaggaacctgaagctggccaggaagctgatggagcagtatggcacccccaacaacatcgacatctggatgggcggcgtgtctgagcccctgaagaggaagggccgggtgggccccctgctggcctgcatcatcggcacccagttcaggaagctgagagatggagaccgcttctggtgggagaatgaaggagtcttctccatgcagcagaggcaggccctggcccagatcagcctgccccgcatcatctgtgacaacacaggcatcaccaccgtgtccaagaacaacatcttcatgagcaacagctacccccgggactttgtgaactgcagcaccctgcctgccctgaacctggcctcctggagggaggccagctag

SEQ ID NO: 5400 - DNA, 2238 bp, Artificial Sequence
  derived and/or modified sequence
atgggcgtgcccttcttcagcagcctgcggtgcatggtggacctgggtccatgttgggccgggggcctcaccgccgaaatgaagctactgttagccttggccggcctgctcgccattctagctacaccccagcccagtgaaggggccgcccctgccgtgctgggcgaagtggatacttcgcttgtcctttcgtccatggaagaagctaaacagttggttgataaggcctataaggaaaggcgcgagagtattaagcagagattacgctcgggaagcgcttcgccaatggaacttctatcgtacttcaagcaaccagtggctgcaaccaggaccgctgtccgtgccgccgactacttgcatgttgccttagaccttctggagaggaaattgcgatccctttggaggagaccgttcaatgtgaccgatgtactgaccccagctcagctcaatgtcctttccaagtcctccggatgcgcctaccaggacgtgggagtgacatgtcccgagcaggataaataccggacaatcactggcatgtgcaacaataggaggtcccctactctcggcgcttcgaatcgtgccttcgtgagatggctgccagccgaatacgaagatggcttcagtctgccatacgggtggacccctggcgtgaaaagaaatggctttccagtagcacttgcccgcgctgtgtccaatgaaatcgtacgctttccaaccgaccagctgacaccggaccaggagaggtccctgatgtttatgcaatgggggcagcttctggatcacgatctagattttacccctgaacctgcagcccgagcctctttcgtcacaggggttaattgcgaaacttcgtgcgtgcagcagccaccctgttttcctctgaagatcccgcccaatgatccacggattaaaaaccaggctgattgtattcccttctttcgctcatgcccagcatgtcctgggtctaatatcactatccgaaaccagattaacgctctaactagctttgtggatgccagcatggtctacggatcggaggaacccctggcacgtaacctccgcaatatgtccaaccagctgggtctcctcgccgtgaaccaacggttccaggataacgggagggccttgctcccctttgataatcttcatgatgacccttgccttctgacaaataggagtgcccgcattccatgctttctcgccggcgatacaagatcatccgagatgcccgaactcaccagtatgcacacccttttgcttagagagcacaacaggctggccacagagcttaagagtctgaacccacgctgggatggcgaaagactctaccaagaggccagaaagatcgtgggcgcaatggtacaaatcataacataccgagattacctgcctctcgtcttgggaccaaccgccatgaggaaatatctgccgacgtacaggtcatacaacgatagcgtggaccctagaattgcgaatgtgttcacaaatgcttttcgctacggtcataccctaatccagccattcatgttccgtttggacaaccgttatcaaccaatggaaccaaacccaagggtccctctgagcagagtgtttttcgctagttggcgggtagtgcttgaaggcgggatcgacccaatactgcgcggcttaatggctacaccggccaagctcaaccgccaaaatcagattgctgttgacgaaattagggaacgtctcttcgagcaggtaatgagaattgggctcgatttgcctgctctgaacatgcaacgttcccgcgaccacggacttcccggctacaatgcctggcgccggttctgcggattaccgcagccggagactgtcggccaattgggaacagttctcaggaacctcaagcttgcccgcaagctcatggaacaatacggcactccaaacaacatcgatatttggatggggggcgtgagcgaacctcttaagaggaaggggcgcgtgggtccactcctggcatgtattatcggcacacagtttcggaaacttcgtgacggcgaccggttttggtgggaaaacgaaggagttttctcaatgcagcaaaggcaagctctggcacaaatcagcctgccgcgcattatttgcgataataccggaattacaacagtgagcaaaaacaacatctttatgagcaacagctacccccgagacttcgtcaactgcagtacactgcccgctttgaacttggcgagttggcgggaagcgagctag

SEQ ID NO: 5401 - DNA, 2238 bp, Artificial Sequence
  derived and/or modified sequence
atgggcgttccttttttctcttccctgagatgcatggttgacttaggcccatgctgggcagggggtcttacagccgaaatgaagctactgctagccctggcaggtttgctggcaatcttagctactcctcagccttctgagggagccgcaccagcggtcctgggggaggtggatacctccttagtgctatcatcaatggaagaagctaagcaactcgtggataaagcctataaagagcggagggagagcattaagcagcgtctgcgcagtggatctgccagccctatggagctactaagctatttcaagcagcccgtcgcggcaactagaacagctgtacgcgctgccgactacttgcacgtagctttggatcttctagagcgtaaactccgcagtctgtggagaaggccattcaacgtgaccgacgtgctaactcctgcccaactgaacgttctgagtaagagcagcggctgcgcataccaggacgtgggggtcacctgccccgagcaggacaagtaccggaccattactggcatgtgcaataatcggcgttccccaacacttggagcctcaaaccgggcttttgtccgttggctccccgctgaatatgaggatggcttctcacttccttacggctggacccctggcgttaagcggaatgggtttcctgtagcattagcacgcgcagtttcaaatgaaatagtcagattccctacagaccagttgacgccagatcaagagcgatcattaatgtttatgcaatggggtcaattactggatcatgacctagactttacacccgagccagctgcccgagcttctttcgtcacgggcgtgaattgtgaaacttcgtgcgttcaacagcccccatgctttcctctcaaaatccccccaaatgatcctcgcatcaaaaaccaggctgattgcatccccttctttcggtcatgcccagcctgtcccggatcaaatattactatccgcaaccaaatcaatgctctgacctctttcgtagacgcgtcaatggtatacgggagcgaggaacctctggcccgaaatttgcggaacatgagcaaccaactgggattactcgcagtgaaccagcgatttcaggacaatgggagggccctgctgccattcgataacctgcacgatgatccgtgcctcctgacaaacagaagcgctcggatcccttgctttctcgcaggcgacacccgctcttccgagatgcctgagctaacctccatgcacacacttctgctccgagagcataataggctggccaccgagttgaaaagcctgaatcctaggtgggacggggagcggctgtaccaggaggctcgaaagatcgtgggcgctatggtccagattatcacctatagggactacctgccacttgtacttgggcctacggccatgcggaaatatctgccgacctacagaagctacaatgacagtgttgaccctagaatcgctaacgtgttcaccaacgcctttcgttacgggcatactttgatccagccctttatgttccgccttgacaaccgttaccaaccaatggaacctaatccacgtgttccactgagccgggtgtttttcgcttcttggcgggtggtgttggaggggggtattgaccctatcctccgagggctcatggcaacacccgctaagttaaatcgccagaatcagattgcagtggatgagatccgcgaaagacttttcgagcaggtgatgaggatcggccttgacctgccagcacttaacatgcagaggtcaagagaccacggattgcccggttacaacgcctggagacgcttttgcggtctaccccagcccgagacagtaggtcagctgggcaccgtgctgagaaatctgaagctcgcccgaaagctaatggaacagtatgggacccccaacaatattgacatctggatgggtggtgtctcagagcccctgaagcgcaagggcagggtaggtccactcctggcttgcattatcggtacccagttcaggaaacttagggacggtgatagattttggtgggaaaatgagggcgtgttcagcatgcagcaaagacaggctttggctcaaatcagcctccctcggatcatctgtgataacacaggaattactacagtatccaagaataacatctttatgtctaactcctaccccagggatttcgtcaattgcagtacactacctgctctcaacctcgcatcatggagagaggcctcttag

SEQ ID NO: 5402 - DNA, 2334 bp, Artificial Sequence
  derived and/or modified sequence
atgggagtccccttcttctcttcactgcggtgtatggtcgacctggggccgtgctgggccggagggttgactgccgaaatgaaactgttgctagctctcgctggactgctcgctatcctcgccacccctcagccctccgaaggagcagctcccgccgtcctcggcgaagtcgacacatccctggtcttgagtagcatggaagaggcaaagcagctagtcgacaaggcatataaggagagaagagagtcaattaaacaacgcctgagaagcggttcagccagcccaatggaactcctgtcatactttaagcagcccgttgctgccactcggaccgctgtcagggcggccgattacctacatgtggcactggacctgttggagcggaagctccgctctctctggcgacggcctttcaatgtgaccgatgttcttaccccagcacagttgaatgtgctgagtaagtcctccggctgcgcctatcaggatgtcggcgtcacttgcccagaacaggacaagtaccggactatcactgggatgtgtaacaaccggtgcgggtggttgggcgtagctgctggcaccgggcttcgagaggccagccgcacaccacaagcctcgagatgtcagaggccggttcttccttgccgcaggtcacctaccttgggagctagcaaccgcgctttcgttagatggctgcccgcagaatacgaggacggctttagtctcccctatggctggaccccaggtgtgaagcgcaacgggtttcctgtggctctggctcgagcagtctcgaacgaaattgtccgttttcctaccgaccagctcacccccgatcaggaaagaagcctgatgttcatgcagtggggtcagctgttggaccacgatctcgatttcactccggaacctgctgcgcgggccagctttgtcacaggtgtcaactgtgaaacttcctgcgtgcagcagcccccctgctttcctctgaaaatcccacctaacgatccccgaattaagaatcaggccgactgcatccctttctttcgaagttgccccgcatgtccagggtccaacattaccatcagaaatcaaataaacgcacttactagctttgtggacgcctccatggtgtacggatctgaggagcctctggctagaaaccttcgaaatatgagcaaccaattgggcctgctggccgtgaaccagaggtttcaagacaacggtagagcgctccttccattcgacaatctgcacgacgacccctgccttcttactaataggtccgctcggataccttgcttcctcgccggcgatacccgaagttcagagatgcccgagcttacttcaatgcatactctattgcttcgtgaacacaatcgacttgccacggagctaaagagccttaacccgaggtgggacggggaacgactttaccaggaggctcgcaaaatcgtcggggcaatggtgcaaattatcacttatagagactacctgccgcttgtcttgggccctaccgccatgagaaagtacctccccacataccggagctacaatgacagtgtcgatcctaggatcgctaatgtcttcacgaatgccttccggtacggccacaccctgatccagccgttcatgtttcgattggacaaccgctatcagcccatggaacccaatcctcgcgtcccactgtcccgggtgttctttgccagctggcgcgtggtgctggaaggtggaatcgaccccattctgagaggtcttatggcgactcctgcaaagctgaatcggcagaatcagatcgcagtggatgagatccgcgagcgcctgttcgaacaggtgatgcgcatcgggctggacctccccgcattgaacatgcagcggagtcgagaccatggcctacccgggtataacgcctggagacgcttttgtggcctgccacagccagagaccgttggccagctcggtactgttctccgcaacttaaaactcgctcgaaaactcatggaacagtacgggactcccaacaacattgacatttggatgggcggtgtatccgaaccactcaagcgaaaaggaagagttggacctctacttgcttgtattataggtacccaattcaggaagttgcgggacggcgatcgtttttggtgggagaatgaaggtgtcttttccatgcagcagagacaggctctcgctcaaatcagcctgcccagaatcatctgtgacaatactgggatcacaaccgtttctaaaaataacatattcatgagtaactcctacccccgggatttcgtgaactgcagcacattgcccgctctgaatctggcctcatggcgggaagcaagctag

SEQ ID NO: 5403 - DNA, 2334 bp, Artificial Sequence
  derived and/or modified sequence
atgggcgtgcccttcttcagcagcctgcgctgcatggtggacctgggcccctgctgggccggcggcctgacagctgagatgaagctgctgctggccctggccggcctgctggccatcctggccaccccccagcccagcgagggcgccgccccagctgtgctgggggaggtggacaccagcctggtgctgagctccatggaggaggccaagcagctggtggacaaggcctacaaggagcggcgggagagcatcaagcagaggctgcggagcggcagcgccagccccatggagctgctgagctacttcaagcagcctgtggccgccaccaggacagctgtgcgggctgctgactacctgcacgtggccctggacctgctggagaggaagctgcggagcctgtggaggcggcccttcaacgtgacagatgtgctgaccccagcccagctgaatgtgctgagcaagagcagcggctgtgcctaccaggatgtgggcgtgacctgcccagagcaggacaagtaccgcaccatcaccggcatgtgcaacaacagatgtggctggctgggcgtggccgccggcaccggcctgcgggaggccagcaggaccccccaggccagccgctgccagaggcctgtgctgccctgcagaagaagccccaccctgggcgccagcaacagagcctttgtgcgctggctgcctgcagaatatgaagatggcttcagcctgccctacggctggaccccaggagtgaagagaaatggcttccctgtggccctggcccgggctgtgtccaatgagatcgtgcgcttccccacagaccagctgaccccagaccaggagaggagcctgatgttcatgcagtggggccagctgctggaccatgacctggacttcaccccagagcctgctgcccgggccagctttgtgactggagtgaactgtgagaccagctgtgtgcagcagcccccctgcttccccctgaagatccccccaaatgacccccgcatcaagaaccaggccgactgcatccccttcttccgcagctgcccagcctgccccggcagcaacatcaccatccggaaccagatcaatgccctgaccagctttgtggatgcctccatggtgtatggcagcgaggagcccctggccaggaacctgaggaacatgagcaaccagctgggcctgctggccgtgaaccagcgcttccaggacaatggccgggccctgctgccctttgacaacctgcatgatgacccctgcctgctgaccaacagaagtgcccgcatcccctgcttcctggccggggacaccaggagcagcgagatgcctgagctgacctccatgcacaccctgctgctgcgggagcacaaccggctggccacagagctgaagagcctgaacccccgctgggatggagagcggctgtaccaggaggccaggaagatcgtgggcgccatggtgcagatcatcacctacagagactacctgcccctggtgctgggccccacagccatgaggaagtacctgcccacctaccgcagctacaatgattctgtggacccccgcatcgccaacgtgttcaccaatgccttccgctatggccacaccctcatccagcccttcatgttccggctggacaaccgctaccagcccatggagcccaacccccgggtgcccctgagcagggtcttctttgcctcctggagggtggtgctggagggcggcatcgaccccatcctgcggggcctgatggccaccccagccaagctgaaccggcagaaccagattgctgtggatgagatccgggagcggctgtttgagcaggtgatgagaattggcctggacctgcctgccctgaacatgcagaggagccgggaccacggcctgcccggctacaatgcctggaggcgcttctgtggcctgccccagcctgagaccgtgggccagctgggcaccgtgctgaggaacctgaagctggccaggaagctgatggagcagtatggcacccccaacaacatcgacatctggatgggcggcgtgtctgagcccctgaagaggaagggccgggtgggccccctgctggcctgcatcatcggcacccagttcaggaagctgagagatggagaccgcttctggtgggagaatgaaggagtcttctccatgcagcagaggcaggccctggcccagatcagcctgccccgcatcatctgtgacaacacaggcatcaccaccgtgtccaagaacaacatcttcatgagcaacagctacccccgggactttgtgaactgcagcaccctgcctgccctgaacctggcctcctggagggaggccagctag

SEQ ID NO: 5404 - DNA, 3215 bp, Artificial Sequence
  derived and/or modified sequence
gacaatatcaggtgagctgtggaggtggggtccttggaagctggatgacagcagctggcaaggggataagagagcagtgagcccctccctcaaggaggtctggctttatccatagacagggccctctgaggtggggctgaggtacaaagggggattgagcagcccaggagaagagagatgggggttcccttcttctcttctctcagatgcatggtggacttaggaccttgctgggctgggggtctcactgcagagatgaagctgcttctggccctagcagggctcctggccattctggccacgccccagccctctgaaggtgctgctccagctgtcctgggggaggtggacacctcgttggtgctgagctccatggaggaggccaagcagctggtggacaaggcctacaaggagcggcgggaaagcatcaagcagcggcttcgcagcggctcagccagccccatggaactcctatcctacttcaagcagccggtggcagccaccaggacggcggtgagggccgctgactacctgcacgtggctctagacctgctggagaggaagctgcggtccctgtggcgaaggccattcaatgtcactgatgtgctgacgcccgcccagctgaatgtgttgtccaagtcaagcggctgcgcctaccaggacgtgggggtgacttgcccggagcaggacaaataccgcaccatcaccgggatgtgcaacaacagacgcagccccacgctgggggcctccaaccgtgcctttgtgcgctggctgccggcggagtatgaggacggcttctctcttccctacggctggacgcccggggtcaagcgcaacggcttcccggtggctctggctcgcgcggtctccaacgagatcgtgcgcttccccactgatcagctgactccggaccaggagcgctcactcatgttcatgcaatggggccagctgttggaccacgacctcgacttcacccctgagccggccgcccgggcctccttcgtcactggcgtcaactgcgagaccagctgcgttcagcagccgccctgcttcccgctcaagatcccgcccaatgacccccgcatcaagaaccaagccgactgcatcccgttcttccgctcctgcccggcttgccccgggagcaacatcaccatccgcaaccagatcaacgcgctcacttccttcgtggacgccagcatggtgtacggcagcgaggagcccctggccaggaacctgcgcaacatgtccaaccagctggggctgctggccgtcaaccagcgcttccaagacaacggccgggccctgctgccctttgacaacctgcacgatgacccctgtctcctcaccaaccgctcagcgcgcatcccctgcttcctggcaggggacacccgttccagtgagatgcccgagctcacctccatgcacaccctcttacttcgggagcacaaccggctggccacagagctcaagagcctgaaccctaggtgggatggggagaggctctaccaggaagcccggaagatcgtgggggccatggtccagatcatcacttaccgggactacctgcccctggtgctggggccaacggccatgaggaagtacctgcccacgtaccgttcctacaatgactcagtggacccacgcatcgccaacgtcttcaccaatgccttccgctacggccacaccctcatccaacccttcatgttccgcctggacaatcggtaccagcccatggaacccaacccccgtgtccccctcagcagggtcttttttgcctcctggagggtcgtgctggaaggtggcattgaccccatcctccggggcctcatggccacccctgccaagctgaatcgtcagaaccaaattgcagtggatgagatccgggagcgattgtttgagcaggtcatgaggattgggctggacctgcctgctctgaacatgcagcgcagcagggaccacggcctcccaggatacaatgcctggaggcgcttctgtgggctcccgcagcctgaaactgtgggccagctgggcacggtgctgaggaacctgaaattggcgaggaaactgatggagcagtatggcacgcccaacaacatcgacatctggatgggcggcgtgtccgagcctctgaagcgcaaaggccgcgtgggcccactcctcgcctgcatcatcggtacccagttcaggaagctccgggatggtgatcggttttggtgggagaacgagggtgtgttcagcatgcagcagcgacaggccctggcccagatctcattgccccggatcatctgcgacaacacaggcatcaccaccgtgtctaagaacaacatcttcatgtccaactcatatccccgggactttgtcaactgcagtacacttcctgcattgaacctggcttcctggagggaagcctcctagaggccaggtaagggggtgcagcagtgaggggtatatctgggctggccagttggaaccacggagatctccttgccctagatgagcccagccctgttctgggtgcagctgagaaaatgagtgactagacgttcatttgtgtgctcatgtatgtgcgaagtatataaattggcttttcatgcgtgtgtgttgtctgaacatggggagtgtttcatgggttatgtgtatgtgccatttatgtgagtgtgtgtttgtgctgatgagaatactgagtatgtggaaggcagcagagcggactggtgaggagcacagctcaggaactagactgcctgggttccaatcctggctctgtggcttgctagctatgtgaccttgagcaaattaccctccttaaacaagagttttcttccttgtaaattacatctgtcatggtttcttggagggcccacttgtatcctctggttcttcatttattgagcacctactacatgcaaggcactgtactaggcgtgagaagcatatagaggcaagaaagagataccaagatgccatctgtgtcctggttagcagagctggaccagtggtgccttggagggataagccagctgcagctgggctgtgtggttgacttatgggcccagccagccaggctcaggccatggctcccctttttcttcctcaccctgatttcttgcttattcactgaagttctcctgaagaggaactgggcctgttgccctttctgtaccatttatttgctcccaatgtttatgataataaaggcaccgctgatggggacctcc

SEQ ID NO: 5405 - DNA, 3311 bp, Artificial Sequence
  derived and/or modified sequence
gacaatatcaggtgagctgtggaggtggggtccttggaagctggatgacagcagctggcaaggggataagagagcagtgagcccctccctcaaggaggtctggctttatccatagacagggccctctgaggtggggctgaggtacaaagggggattgagcagcccaggagaagagagatgggggttcccttcttctcttctctcagatgcatggtggacttaggaccttgctgggctgggggtctcactgcagagatgaagctgcttctggccctagcagggctcctggccattctggccacgccccagccctctgaaggtgctgctccagctgtcctgggggaggtggacacctcgttggtgctgagctccatggaggaggccaagcagctggtggacaaggcctacaaggagcggcgggaaagcatcaagcagcggcttcgcagcggctcagccagccccatggaactcctatcctacttcaagcagccggtggcagccaccaggacggcggtgagggccgctgactacctgcacgtggctctagacctgctggagaggaagctgcggtccctgtggcgaaggccattcaatgtcactgatgtgctgacgcccgcccagctgaatgtgttgtccaagtcaagcggctgcgcctaccaggacgtgggggtgacttgcccggagcaggacaaataccgcaccatcaccgggatgtgcaacaacaggtgcggctggctgggggtggctgcaggaaccgggctcagagaggcgtcccggacgccacaagcctcccggtgtcagcgccctgtcctcccctgcagacgcagccccacgctgggggcctccaaccgtgcctttgtgcgctggctgccggcggagtatgaggacggcttctctcttccctacggctggacgcccggggtcaagcgcaacggcttcccggtggctctggctcgcgcggtctccaacgagatcgtgcgcttccccactgatcagctgactccggaccaggagcgctcactcatgttcatgcaatggggccagctgttggaccacgacctcgacttcacccctgagccggccgcccgggcctccttcgtcactggcgtcaactgcgagaccagctgcgttcagcagccgccctgcttcccgctcaagatcccgcccaatgacccccgcatcaagaaccaagccgactgcatcccgttcttccgctcctgcccggcttgccccgggagcaacatcaccatccgcaaccagatcaacgcgctcacttccttcgtggacgccagcatggtgtacggcagcgaggagcccctggccaggaacctgcgcaacatgtccaaccagctggggctgctggccgtcaaccagcgcttccaagacaacggccgggccctgctgccctttgacaacctgcacgatgacccctgtctcctcaccaaccgctcagcgcgcatcccctgcttcctggcaggggacacccgttccagtgagatgcccgagctcacctccatgcacaccctcttacttcgggagcacaaccggctggccacagagctcaagagcctgaaccctaggtgggatggggagaggctctaccaggaagcccggaagatcgtgggggccatggtccagatcatcacttaccgggactacctgcccctggtgctggggccaacggccatgaggaagtacctgcccacgtaccgttcctacaatgactcagtggacccacgcatcgccaacgtcttcaccaatgccttccgctacggccacaccctcatccaacccttcatgttccgcctggacaatcggtaccagcccatggaacccaacccccgtgtccccctcagcagggtcttttttgcctcctggagggtcgtgctggaaggtggcattgaccccatcctccggggcctcatggccacccctgccaagctgaatcgtcagaaccaaattgcagtggatgagatccgggagcgattgtttgagcaggtcatgaggattgggctggacctgcctgctctgaacatgcagcgcagcagggaccacggcctcccaggatacaatgcctggaggcgcttctgtgggctcccgcagcctgaaactgtgggccagctgggcacggtgctgaggaacctgaaattggcgaggaaactgatggagcagtatggcacgcccaacaacatcgacatctggatgggcggcgtgtccgagcctctgaagcgcaaaggccgcgtgggcccactcctcgcctgcatcatcggtacccagttcaggaagctccgggatggtgatcggttttggtgggagaacgagggtgtgttcagcatgcagcagcgacaggccctggcccagatctcattgccccggatcatctgcgacaacacaggcatcaccaccgtgtctaagaacaacatcttcatgtccaactcatatccccgggactttgtcaactgcagtacacttcctgcattgaacctggcttcctggagggaagcctcctagaggccaggtaagggggtgcagcagtgaggggtatatctgggctggccagttggaaccacggagatctccttgccctagatgagcccagccctgttctgggtgcagctgagaaaatgagtgactagacgttcatttgtgtgctcatgtatgtgcgaagtatataaattggcttttcatgcgtgtgtgttgtctgaacatggggagtgtttcatgggttatgtgtatgtgccatttatgtgagtgtgtgtttgtgctgatgagaatactgagtatgtggaaggcagcagagcggactggtgaggagcacagctcaggaactagactgcctgggttccaatcctggctctgtggcttgctagctatgtgaccttgagcaaattaccctccttaaacaagagttttcttccttgtaaattacatctgtcatggtttcttggagggcccacttgtatcctctggttcttcatttattgagcacctactacatgcaaggcactgtactaggcgtgagaagcatatagaggcaagaaagagataccaagatgccatctgtgtcctggttagcagagctggaccagtggtgccttggagggataagccagctgcagctgggctgtgtggttgacttatgggcccagccagccaggctcaggccatggctcccctttttcttcctcaccctgatttcttgcttattcactgaagttctcctgaagaggaactgggcctgttgccctttctgtaccatttatttgctcccaatgtttatgataataaaggcaccgctgatggggacctcc

SEQ ID NO: 5406 - DNA, 2334 bp, Artificial Sequence
  derived and/or modified sequence
atgggcgtgcccttcttcagcagcctgcggtgcatggtggacctgggaccctgctgggcagggggactgactgcagagatgaagcttctcctggccctcgcaggactgctggctatcttagccacacctcagccatctgagggcgctgcccccgccgttctgggtgaagtcgacacttctctggtactcagctcaatggaggaagctaagcagttggtggacaaagcatacaaagagagacgagaaagcatcaagcagagactgcgtagtggctctgcgagcccaatggagcttttgagctacttcaaacagccggtcgcagctactagaactgccgtaagagccgctgactatctgcacgtggccctggacctgttggagagaaagctgcggtcgttgtggaggcgtccatttaatgtgacagatgtgttgactccagcccagctgaatgtgcttagtaaaagctctggatgtgcctatcaggacgttggcgtgacttgccccgaacaggataagtaccggaccataactggcatgtgcaataatagatgcggctggctgggagtggctgcgggcactgggctcagagaagccagtagaacacctcaagcaagtaggtgtcagcgccccgtgctcccttgtcggcgctcccctacactaggagcctcaaaccgggccttcgtccggtggctccctgccgagtatgaggacggctttagccttccctacgggtggacgccgggcgtgaaacgcaatggcttcccggtggcactagcacgtgccgtgagcaacgagattgtgcgctttcccaccgatcagctcactccggatcaagaacggagcctgatgttcatgcagtggggccagctgctggaccacgacctggactttacgcctgagccagccgcaagggcctcatttgtcacaggggtgaattgcgaaaccagctgtgtgcagcaaccaccctgttttcccttaaagattccacctaacgatccccggatcaaaaatcaagctgattgcatacctttttttcggtcatgtccagcctgccccggaagcaatattacgatccgaaatcagattaatgcgctgaccagttttgtggacgctagcatggtatacgggagcgaagaaccattggcaaggaatctgaggaatatgtctaaccagttagggctgttggcagttaaccagaggtttcaggacaacggacgagcccttctgccttttgacaacctccacgacgacccttgtctcctgaccaataggtctgctcggattccttgtttcttggcaggcgacaccagaagctctgagatgcctgaattgacatcaatgcatacacttctgctaagggaacataatagattagcaacagaactaaagagcttaaatcccagatgggatggtgagagactgtaccaagaggcgaggaagatcgtgggtgcgatggtccagattatcacctatagagattacctccccctggtcttaggtccaaccgcgatgcggaagtaccttccaacatataggagttataatgactccgtcgatccccggatcgcaaatgtgttcaccaatgcttttaggtatggacacacgctcattcagccgttcatgttcaggctagataatcgctatcagccaatggaaccaaacccgagagtcccgttatcaagagtgtttttcgcgtcctggcgcgtggttctggaggggggcattgaccccatcttgcgcgggctcatggccacacctgccaaactgaatcgccagaaccagattgccgtcgatgaaatccgtgagcggcttttcgagcaagtcatgaggattggtctcgacctgccagccctcaacatgcaaaggtctcgggaccacggacttccagggtataacgcctggagaagattttgtggtctcccccaaccagagacggtcgggcaattgggaaccgttctcagaaatctaaagctggctcgaaagctcatggagcagtacggaacccctaacaacatcgacatctggatgggtggagtcagcgaaccgctcaagagaaagggccgggtgggcccactgttagcttgcatcattggaacgcagttccgaaagctgagggacggcgaccggttctggtgggagaacgagggcgtttttagcatgcagcagaggcaggcccttgcccaaatctccctgcctaggataatctgcgacaacacaggaattaccaccgtgtcgaaaaataatatattcatgagcaactcctatccacgagatttcgtgaactgtagcacattgcccgcacttaatcttgcatcgtggagagaagcctcctag

SEQ ID NO: 5407 - DNA, 2334 bp, Artificial Sequence
  derived and/or modified sequence
atgggcgttccctttttttctagcttgcgatgcatggtggatctcgggccatgttgggccggaggcttaaccgctgaaatgaagctcctgctagcactggctggcctgcttgcaatcttagcaacaccacagccaagcgagggagcggcacccgctgtgcttggcgaggtggacacaagtttagtcctcagttccatggaggaagcgaagcagcttgtagataaggcctacaaagagaggcgggagtccattaagcagcgcttgagaagcggcagcgcgtcccctatggagctgttaagctattttaagcaacctgtcgctgcgactcggaccgccgttcgggcagccgattatctgcatgtggcccttgacctcctggaaaggaaactccggtcgttgtggcggcgaccctttaacgtgactgacgtcctgacacctgcacagcttaatgtactgagtaagtcttctggatgcgcttatcaggatgtcggggttacctgcccagaacaggataaatataggacgatcacaggcatgtgtaataatcgatgcggatggctgggagttgccgcaggcactgggttacgggaggcctctcggacacctcaagcatcgaggtgccaacgcccagtgctcccatgtcgcaggagtcccaccttgggcgcttccaaccgagccttcgtgcggtggctcccagccgagtatgaagacggcttctctcttccatacggatggacacccggagttaagagaaacggctttcctgtagccctggcaagggccgtgagtaatgaaattgtacgcttcccaaccgaccagctgactcctgatcaggagcgtagtttaatgtttatgcaatgggggcaactgctggaccacgatctggacttcacccccgaacccgcagctagggctagtttcgtgacaggggtcaattgcgagaccagctgcgttcagcagcctccttgtttccccctgaaaatacctccaaacgatcccaggatcaaaaaccaggccgactgcatccccttctttaggagttgtcctgcctgtcccggatccaacattacgatacgaaatcagatcaatgctctgacatccttcgtcgacgcctcaatggtttatggaagtgaggaaccattagcacgtaacctgcggaatatgtcaaaccaactcggtcttctggccgtgaatcagcgattccaagacaacggacgcgctctactgcccttcgacaacctgcacgacgatccatgcctcctcacgaatcgctctgctaggataccttgtttcctggcgggagatacaaggtcctccgagatgcctgagctcacaagtatgcatactctccttctgagggaacataatcgactggcaaccgagctgaagagcctgaaccccaggtgggacggcgaacggttgtatcaggaggctcggaaaatagtgggagccatggtgcagattattacctaccgcgactacttgcctctcgtgctaggccctaccgcaatgcgtaagtatctgcctacctaccgttcctacaacgacagtgtggaccctaggattgcgaatgtgttcacaaatgcgttccgatatgggcacacccttattcaaccattcatgtttcgactagataaccgatatcagcccatggagccaaaccccagggtgccattgagccgggtgtttttcgcttcctggcgcgtggtgctggaggggggaatagatccaatcctacggggactgatggctactccagctaaactcaatagacagaatcagatcgccgtcgacgagattcgggaacggctattcgaacaggtgatgagaatagggctcgacttgccggcacttaacatgcagcgtagccgcgaccacggtctccctggttacaatgcgtggcggagattctgtggacttcctcagccagaaaccgtggggcaattaggaacagtcctgagaaatctcaagctggctcgcaagttaatggagcagtatggaacccctaataatatcgacatctggatggggggagtctctgaacccctgaagcggaaggggagagtcgggcctttactcgcttgtatcatcgggacacagtttcgcaaactgagagacggggacaggttctggtgggagaacgagggcgtgttcagtatgcagcagcggcaggccctggctcagatatctctcccccgaatcatttgtgacaacacaggcattacgacagtgagcaagaataatatattcatgtctaattcttacccgagagactttgtgaactgcagtacccttcccgcactcaacttggcctcttggcgggaggcttcgtag

SEQ ID NO: 5408 - DNA, 2334 bp, Artificial Sequence
  derived and/or modified sequence
atgggcgtgcccttcttcagcagcctgagatgcatggtggacctgggcccctgctgggccggcggcctgaccgccgagatgaagctgctgctggccctggccggcctgctggccatcctggccaccccccagcccagcgagggcgccgcccccgccgtgctgggcgaggtggacaccagcctggtgctgagcagcatggaggaggccaagcagctggtggacaaggcctacaaggagagaagagagagcatcaagcagagactgagaagcggcagcgccagccccatggagctgctgagctacttcaagcagcccgtggccgccaccagaaccgccgtgagagccgccgactacctgcacgtggccctggacctgctggagagaaagctgagaagcctgtggagaagacccttcaacgtgaccgacgtgctgacccccgcccagctgaacgtgctgagcaagagcagcggctgcgcctaccaggacgtgggcgtgacctgccccgagcaggacaagtacagaaccatcaccggcatgtgcaacaacagatgcggctggctgggcgtggccgccggcaccggcctgagagaggccagcagaaccccccaggccagcagatgccagagacccgtgctgccctgcagaagaagccccaccctgggcgccagcaacagagccttcgtgagatggctgcccgccgagtacgaggacggcttcagcctgccctacggctggacccccggcgtgaagagaaacggcttccccgtggccctggccagagccgtgagcaacgagatcgtgagattccccaccgaccagctgacccccgaccaggagagaagcctgatgttcatgcagtggggccagctgctggaccacgacctggacttcacccccgagcccgccgccagagccagcttcgtgaccggcgtgaactgcgagaccagctgcgtgcagcagcccccctgcttccccctgaagatcccccccaacgaccccagaatcaagaaccaggccgactgcatccccttcttcagaagctgccccgcctgccccggcagcaacatcaccatcagaaaccagatcaacgccctgaccagcttcgtggacgccagcatggtgtacggcagcgaggagcccctggccagaaacctgagaaacatgagcaaccagctgggcctgctggccgtgaaccagagattccaggacaacggcagagccctgctgcccttcgacaacctgcacgacgacccctgcctgctgaccaacagaagcgccagaatcccctgcttcctggccggcgacaccagaagcagcgagatgcccgagctgaccagcatgcacaccctgctgctgagagagcacaacagactggccaccgagctgaagagcctgaaccccagatgggacggcgagagactgtaccaggaggccagaaagatcgtgggcgccatggtgcagatcatcacctacagagactacctgcccctggtgctgggccccaccgccatgagaaagtacctgcccacctacagaagctacaacgacagcgtggaccccagaatcgccaacgtgttcaccaacgccttcagatacggccacaccctgatccagcccttcatgttcagactggacaacagataccagcccatggagcccaaccccagagtgcccctgagcagagtgttcttcgccagctggagagtggtgctggagggcggcatcgaccccatcctgagaggcctgatggccacccccgccaagctgaacagacagaaccagatcgccgtggacgagatcagagagagactgttcgagcaggtgatgagaatcggcctggacctgcccgccctgaacatgcagagaagcagagaccacggcctgcccggctacaacgcctggagaagattctgcggcctgccccagcccgagaccgtgggccagctgggcaccgtgctgagaaacctgaagctggccagaaagctgatggagcagtacggcacccccaacaacatcgacatctggatgggcggcgtgagcgagcccctgaagagaaagggcagagtgggccccctgctggcctgcatcatcggcacccagttcagaaagctgagagacggcgacagattctggtgggagaacgagggcgtgttcagcatgcagcagagacaggccctggcccagatcagcctgcccagaatcatctgcgacaacaccggcatcaccaccgtgagcaagaacaacatcttcatgagcaacagctaccccagagacttcgtgaactgcagcaccctgcccgccctgaacctggccagctggagagaggccagctag

SEQ ID NO: 5409 - protein, 934 aa, Artificial Sequence [sequence omitted]

SEQ ID NO: 5410 - protein, 341 aa, Artificial Sequence [sequence omitted]

SEQ ID NO: 5411 - protein, 810 aa, Artificial Sequence
  derived and/or modified sequence
MAVQPKETLQLESAAEVGFVRFFQGMPEKPTTTVRLFDRGDFYTAHGEDALLAAREVFKTQGVIKYMGPAGAKNLQSVVLSKMNFESFVKDLLLVRQYRVEVYKNRAGNKASKENDWYLAYKASPGNLSQFEDILFGNNDMSASIGVVGVKMSAVDGQRQVGVGYVDSIQRKLGLCEFPDNDQFSNLEALLIQIGPKECVLPGGETAGDMGKLRQIIQRGGILITERKKADFSTKDIYQDLNRLLKGKKGEQMNSAVLPEMENQVAVSSLSAVIKFLELLSDDSNFGQFELTTFDFSQYMKLDIAAVRALNLFQGSVEDTTGSQSLAALLNKCKTPQGQRLVNQWIKQPLMDKNRIEERLNLVEAFVEDAELRQTLQEDLLRRFPDLNRLAKKFQRQAANLQDCYRLYQGINQLPNVIQALEKHEGKHQKLLLAVFVTPLTDLRSDFSKFQEMIETTLDMDQVENHEFLVKPSFDPNLSELREIMNDLEKKMQSTLISAARDLGLDPGKQIKLDSSAQFGYYFRVTCKEEKVLRNNKNFSTVDIQKNGVKFTNSKLTSLNEEYTKNKTEYEEAQDAIVKEIVNISSGYVEPMQTLNDVLAQLDAVVSFAHVSNGAPVPYVRPAILEKGQGRIILKASRHACVEVQDEIAFIPNDVYFEKDKQMFHIITGPNMGGKSTYIRQTGVIVLMAQIGCFVPCESAEVSIVDCILARVGAGDSQLKGVSTFMAEMLETASILRSATKDSLIIIDELGRGTSTYDGFGLAWAISEYIATKIGAFCMFATIFMNLLPWPIRYQLLIIYMSQHSPLKRP

SEQ ID NO: 5412 - protein, 168 aa, Artificial Sequence
  derived and/or modified sequence
MDKNRIEERLNLVEAFVEDAELRQTLQEDLLRRFPDLNRLAKKFQRQAANLQDCYRLYQGINQLPNVIQALEKHEGKHQKLLLAVFVTPLTDLRSDFSKFQEMIETTLDMDQVENHEFLVKPSFDPNLSELREIMNDLEKKMQSTLISAARDLGGSLQPRSSRLACAT

SEQ ID NO: 5413 - protein, 533 aa, Artificial Sequence
  derived and/or modified sequence
MAVQPKETLQLESAAEVGFVRFFQGMPEKPTTTVRLFDRGDFYTAHGEDALLAAREVFKTQGVIKYMGPAGAKNLQSVVLSKMNFESFVKDLLLVRQYRVEVYKNRAGNKASKENDWYLAYKASPGNLSQFEDILFGNNDMSASIGVVGVKMSAVDGQRQVGVGYVDSIQRKLGLCEFPDNDQFSNLEALLIQIGPKECVLPGGETAGDMGKLRQIIQRGGILITERKKADFSTKDIYQDLNRLLKGKKGEQMNSAVLPEMENQVAVSSLSAVIKFLELLSDDSNFGQFELTTFDFSQYMKLDIAAVRALNLFQGSVEDTTGSQSLAALLNKCKTPQGQRLVNQWIKQPLMDKNRIEERLNLVEAFVEDAELRQTLQEDLLRRFPDLNRLAKKFQRQAANLQDCYRLYQGINQLPNVIQALEKHEGKHQKLLLAVFVTPLTDLRSDFSKFQEMIETTLDMDQVENHEFLVKPSFDPNLSELREIMNDLEKKMQSTLISAARDLGLDPGKQIKLDSSAQFGYYFRVTCKEKSPS

SEQ ID NO: 5414 - protein, 410 aa, Artificial Sequence
  derived and/or modified sequence
MAVQPKETLQLESAAEVGFVRFFQGMPEKPTTTVRLFDRGDFYTAHGEDALLAAREVFKTQGVIKYMGPAGAKNLQSVVLSKMNFESFVKDLLLVRQYRVEVYKNRAGNKASKENDWYLAYKASPGNLSQFEDILFGNNDMSASIGVVGVKMSAVDGQRQVGVGYVDSIQRKLGLCEFPDNDQFSNLEALLIQIGPKECVLPGGETAGDMGKLRQIIQRGGILITERKKADFSTKDIYQDLNRLLKGKKGEQMNSAVLPEMENQVAVSSLSAVIKFLELLSDDSNFGQFELTTFDFSQYMKLDIAAVRALNLFQGSVEDTTGSQSLAALLNKCKTPQGQRLVNQWIKQPLMDKNRIEERLNLVEAFVEDAELRQTLQEDYFVDSQILTDLPRSFKDKQQTYKIVTDSIRV

SEQ ID NO: 5415 - protein, 485 aa, Artificial Sequence
  derived and/or modified sequence
MAVQPKETLQLESAAEVGFVRFFQGMPEKPTTTVRLFDRGDFYTAHGEDALLAAREVFKTQGVIKYMGPAGAKNLQSVVLSKMNFESFVKDLLLVRQYRVEVYKNRAGNKASKENDWYLAYKASPGNLSQFEDILFGNNDMSASIGVVGVKMSAVDGQRQVGVGYVDSIQRKLGLCEFPDNDQFSNLEALLIQIGPKECVLPGGETAGDMGKLRQIIQRGGILITERKKADFSTKDIYQDLNRLLKGKKGEQMNSAVLPEMENQVAVSSLSAVIKFLELLSDDSNFGQFELTTFDFSQYMKLDIAAVRALNLFQGSVEDTTGSQSLAALLNKCKTPQGQRLVNQWIKQPLMDKNRIEERLNLVEAFVEDAELRQTLQEDLLRRFPDLNRLAKKFQRQAANLQDCYRLYQGINQLPNVIQALEKHEGKHQKLLLAVFVTPLTDLRSDFSKFQEMIETTLDMDQVENHEFLVKPSFDPNLSELRNNE

SEQ ID NO: 5416 - DNA, 3307 bp, Artificial Sequence
  derived and/or modified sequence
gcagtagctaaagtcaccagcgtgcgcgggaagctgggccgcgtctgcttatgattggttgccgcggcagactcccacccaccgaaacgcagccctggaagctgattgggtgtggtcgccgtggccggacgccgctcgggggacgtgggaggggaggcgggaaacagcttagtgggtgtggggtcgcgcattttcttcaaccaggaggtgaggaggtttcgacatggcggtgcagccgaaggagacgctgcagttggagagcgcggccgaggtcggcttcgtgcgcttctttcagggcatgccggagaagccgaccaccacagtgcgccttttcgaccggggcgacttctatacggcgcacggcgaggacgcgctgctggccgcccgggaggtgttcaagacccagggggtgatcaagtacatggggccggcaggagcaaagaatctgcagagtgttgtgcttagtaaaatgaattttgaatcttttgtaaaagatcttcttctggttcgtcagtatagagttgaagtttataagaatagagctggaaataaggcatccaaggagaatgattggtatttggcatataaggcttctcctggcaatctctctcagtttgaagacattctctttggtaacaatgatatgtcagcttccattggtgttgtgggtgttaaaatgtccgcagttgatggccagagacaggttggagttgggtatgtggattccatacagaggaaactaggactgtgtgaattccctgataatgatcagttctccaatcttgaggctctcctcatccagattggaccaaaggaatgtgttttacccggaggagagactgctggagacatggggaaactgagacagataattcaaagaggaggaattctgatcacagaaagaaaaaaagctgacttttccacaaaagacatttatcaggacctcaaccggttgttgaaaggcaaaaagggagagcagatgaatagtgctgtattgccagaaatggagaatcaggttgcagtttcatcactgtctgcggtaatcaagtttttagaactcttatcagatgattccaactttggacagtttgaactgactacttttgacttcagccagtatatgaaattggatattgcagcagtcagagcccttaacctttttcagggttctgttgaagataccactggctctcagtctctggctgccttgctgaataagtgtaaaacccctcaaggacaaagacttgttaaccagtggattaagcagcctctcatggataagaacagaatagaggagagattgaatttagtggaagcttttgtagaagatgcagaattgaggcagactttacaagaagatttacttcgtcgattcccagatcttaaccgacttgccaagaagtttcaaagacaagcagcaaacttacaagattgttaccgactctatcagggtataaatcaactacctaatgttatacaggctctggaaaaacatgaaggaaaacaccagaaattattgttggcagtttttgtgactcctcttactgatcttcgttctgacttctccaagtttcaggaaatgatagaaacaactttagatatggatcaggtggaaaaccatgaattccttgtaaaaccttcatttgatcctaatctcagtgaattaagagaaataatgaatgacttggaaaagaagatgcagtcaacattaataagtgcagccagagatcttggcttggaccctggcaaacagattaaactggattccagtgcacagtttggatattactttcgtgtaacctgtaaggaagaaaaagtccttcgtaacaataaaaactttagtactgtagatatccagaagaatggtgttaaatttaccaacagcaaattgacttctttaaatgaagagtataccaaaaataaaacagaatatgaagaagcccaggatgccattgttaaagaaattgtcaatatttcttcaggctatgtagaaccaatgcagacactcaatgatgtgttagctcagctagatgctgttgtcagctttgctcacgtgtcaaatggagcacctgttccatatgtacgaccagccattttggagaaaggacaaggaagaattatattaaaagcatccaggcatgcttgtgttgaagttcaagatgaaattgcatttattcctaatgacgtatactttgaaaaagataaacagatgttccacatcattactggccccaatatgggaggtaaatcaacatatattcgacaaactggggtgatagtactcatggcccaaattgggtgttttgtgccatgtgagtcagcagaagtgtccattgtggactgcatcttagcccgagtaggggctggtgacagtcaattgaaaggagtctccacgttcatggctgaaatgttggaaactgcttctatcctcaggtctgcaaccaaagattcattaataatcatagatgaattgggaagaggaacttctacctacgatggatttgggttagcatgggctatatcagaatacattgcaacaaagattggtgctttttgcatgtttgcaacccattttcatgaacttactgccttggccaatcagataccaactgttaataatctacatgtcacagcactcaccactgaagagaccttaactatgctttatcaggtgaagaaaggtgtctgtgatcaaagttttgggattcatgttgcagagcttgctaatttccctaagcatgtaatagagtgtgctaaacagaaagccctggaacttgaggagtttcagtatattggagaatcgcaaggatatgatatcatggaaccagcagcaaagaagtgctatctggaaagagagcaaggtgaaaaaattattcaggagttcctgtccaaggtgaaacaaatgccctttactgaaatgtcagaagaaaacatcacaataaagttaaaacagctaaaagctgaagtaatagcaaagaataatagctttgtaaatgaaatcatttcacgaataaaagttactacgtgaaaaatcccagtaatggaatgaaggtaatattgataagctattgtctgtaatagttttatattgttttatattaaccctttttccatagtgttaactgtcagtgcccatgggctatcaacttaataagatatttagtaatattttactttgaggacattttcaaagatttttattttgaaaaatgagagctgtaactgaggactgtttgcaattgacataggcaataataagtgatgtgctgaattttataaataaaatcatgtagtttgtggaatttga

SEQ ID NO: 5417 - DNA, 3018 bp, Artificial Sequence
  derived and/or modified sequence
aagctgattgggtgtggtcgccgtggccggacgccgctcgggggacgtgggaggggaggcgggaaacagcttagtgggtgtggggtcgcgcattttcttcaaccaggaggtgttcaagacccagggggtgatcaagtacatggggccggcaggagcaaagaatctgcagagtgttgtgcttagtaaaatgaattttgaatcttttgtaaaagatcttcttctggttcgtcagtatagagttgaagtttataagaatagagctggaaataaggcatccaaggagaatgattggtatttggcatataaggcttctcctggcaatctctctcagtttgaagacattctctttggtaacaatgatatgtcagcttccattggtgttgtgggtgttaaaatgtccgcagttgatggccagagacaggttggagttgggtatgtggattccatacagaggaaactaggactgtgtgaattccctgataatgatcagttctccaatcttgaggctctcctcatccagattggaccaaaggaatgtgttttacccggaggagagactgctggagacatggggaaactgagacagataattcaaagaggaggaattctgatcacagaaagaaaaaaagctgacttttccacaaaagacatttatcaggacctcaaccggttgttgaaaggcaaaaagggagagcagatgaatagtgctgtattgccagaaatggagaatcaggttgcagtttcatcactgtctgcggtaatcaagtttttagaactcttatcagatgattccaactttggacagtttgaactgactacttttgacttcagccagtatatgaaattggatattgcagcagtcagagcccttaacctttttcagggttctgttgaagataccactggctctcagtctctggctgccttgctgaataagtgtaaaacccctcaaggacaaagacttgttaaccagtggattaagcagcctctcatggataagaacagaatagaggagagattgaatttagtggaagcttttgtagaagatgcagaattgaggcagactttacaagaagatttacttcgtcgattcccagatcttaaccgacttgccaagaagtttcaaagacaagcagcaaacttacaagattgttaccgactctatcagggtataaatcaactacctaatgttatacaggctctggaaaaacatgaaggaaaacaccagaaattattgttggcagtttttgtgactcctcttactgatcttcgttctgacttctccaagtttcaggaaatgatagaaacaactttagatatggatcaggtggaaaaccatgaattccttgtaaaaccttcatttgatcctaatctcagtgaattaagagaaataatgaatgacttggaaaagaagatgcagtcaacattaataagtgcagccagagatcttggcttggaccctggcaaacagattaaactggattccagtgcacagtttggatattactttcgtgtaacctgtaaggaagaaaaagtccttcgtaacaataaaaactttagtactgtagatatccagaagaatggtgttaaatttaccaacagcaaattgacttctttaaatgaagagtataccaaaaataaaacagaatatgaagaagcccaggatgccattgttaaagaaattgtcaatatttcttcaggctatgtagaaccaatgcagacactcaatgatgtgttagctcagctagatgctgttgtcagctttgctcacgtgtcaaatggagcacctgttccatatgtacgaccagccattttggagaaaggacaaggaagaattatattaaaagcatccaggcatgcttgtgttgaagttcaagatgaaattgcatttattcctaatgacgtatactttgaaaaagataaacagatgttccacatcattactggccccaatatgggaggtaaatcaacatatattcgacaaactggggtgatagtactcatggcccaaattgggtgttttgtgccatgtgagtcagcagaagtgtccattgtggactgcatcttagcccgagtaggggctggtgacagtcaattgaaaggagtctccacgttcatggctgaaatgttggaaactgcttctatcctcaggtctgcaaccaaagattcattaataatcatagatgaattgggaagaggaacttctacctacgatggatttgggttagcatgggctatatcagaatacattgcaacaaagattggtgctttttgcatgtttgcaacccattttcatgaacttactgccttggccaatcagataccaactgttaataatctacatgtcacagcactcaccactgaagagaccttaactatgctttatcaggtgaagaaaggtgtctgtgatcaaagttttgggattcatgttgcagagcttgctaatttccctaagcatgtaatagagtgtgctaaacagaaagccctggaacttgaggagtttcagtatattggagaatcgcaaggatatgatatcatggaaccagcagcaaagaagtgctatctggaaagagagcaaggtgaaaaaattattcaggagttcctgtccaaggtgaaacaaatgccctttactgaaatgtcagaagaaaacatcacaataaagttaaaacagctaaaagctgaagtaatagcaaagaataatagctttgtaaatgaaatcatttcacgaataaaagttactacgtgaaaaatcccagtaatggaatgaaggtaatattgataagctattgtctgtaatagttttatattgttttatattaaccctttttccatagtgttaactgtcagtgcccatgggctatcaacttaataagatatttagtaatattttactttgaggacattttcaaagatttttattttgaaaaatgagagctgtaactgaggactgtttgcaattgacataggcaataataagtgatgtgctgaattttataaataaaatcatgtagtttgtgg

SEQ ID NO: 5418 - DNA, 2805 bp, Artificial Sequence
  derived and/or modified sequence
atggctgtccagccgaaagagactctgcagttagagagtgctgccgaggtcggcttcgtaaggttctttcaaggaatgcccgaaaaaccgactactaccgtgcgcttattcgaccgtggggacttttacactgcccacggagaggatgccctgctggccgctagggaagtattcaaaacacagggggtaattaaatatatgggaccagctggtgctaaaaacctccagtcagtagtgctctcaaagatgaatttcgagagtttcgtcaaagacctgttgctggtgcggcagtaccgagtggaagtatacaaaaaccgggccggcaataaagccagcaaggagaacgactggtacctcgcgtacaaggctagtccgggcaatctgtcacaattcgaagacattttgtttggcaacaacgatatgtccgcttcgataggcgtcgtcggcgttaagatgtctgcggtggatggccaaagacaggtaggcgtcggctacgtggattctatccaacggaagttaggcctgtgcgaattccccgataacgaccaatttagcaaccttgaagccctgctcatccagattggccctaaggaatgtgtgctccccgggggggagacagctggggacatgggcaagctcagacagataatccaacgtggcggcattctgattacagaacggaagaaggccgactttagtacaaaagacatctatcaggacttgaacaggcttttaaaaggtaagaaaggagaacagatgaactctgccgtactgccggaaatggaaaatcaagttgccgtttcttcgctgtctgccgtgatcaaatttctggaactgctgtccgatgactcaaactttggccagtttgagctgacgactttcgatttctctcagtatatgaaattggatatcgcggcggtccgagccctgaatctattccagggctcagtggaggacactactgggtctcagagtctggccgccctactcaacaagtgtaaaaccccccaggggcagcggcttgtgaaccagtggattaagcagcccctgatggacaagaatcgcattgaagagcggctcaatttggtcgaggcctttgtcgaagacgccgagctgcggcagacactgcaagaagatcttctgagacgattccctgatctcaatcggcttgccaagaagtttcaaaggcaggctgcgaacctccaggattgttaccggctgtaccaaggtattaatcagctacctaatgttatccaggctcttgaaaaacacgagggcaagcaccaaaagctgctgttggctgtgttcgtgaccccactaactgacctaagatccgatttttctaaatttcaggaaatgattgagactacattggacatggatcaagtggagaatcatgagttccttgtcaaacctagcttcgatcctaatttatccgagctgagagaaataatgaatgacctggaaaagaaaatgcagtccaccttaatttccgctgctcgtgatttaggactcgatccggggaagcagatcaaactcgattcttctgctcagtttggatactactttcgtgtaacctgtaaagaggaaaaggtcctgaggaacaacaaaaatttttccacggtggacatccagaaaaatggggtgaagttcaccaactctaaactgacctccctgaacgaggagtataccaagaataaaactgaatatgaagaggcacaggatgctatcgtcaaggagatcgtgaatatcagctcagggtacgtggaacccatgcagacgctaaacgatgtgctcgcacagttagacgcggtcgtctcctttgcgcacgtttctaacggagcacctgtgccttatgtgaggcccgccatactggagaaaggacagggtcgaatcatcctgaaagcaagtaggcacgcttgcgtagaggtgcaggacgaaatcgcattcatcccgaacgacgtgtacttcgagaaggacaaacagatgttccatattattaccgggccgaacatgggcggcaagtctacatatattcgtcaaactggagtgatagttcttatggcacagatcggttgctttgtcccttgcgagagcgcagaagtgagcatcgtggactgcatcttggctagagttggcgcaggcgatagtcagttgaagggagtttctacatttatggccgagatgctggagaccgcttccattctgcggtctgcgactaaagattctttgataattatagatgaactgggtcgcggaacatcaacttacgatggatttgggctcgcatgggccatcagtgagtacatagccacaaagattggcgctttctgcatgtttgcaacacactttcacgaacttacagcactggctaaccagataccaactgtgaacaacctgcacgtcaccgccctaacaacagaggaaaccctgaccatgctgtaccaggtgaaaaaaggagtgtgtgatcagagttttggaattcatgtcgccgagctggctaacttcccgaaacacgttatcgaatgtgccaaacagaaggccttggaacttgaggagttccagtatataggcgagtcccagggatacgacattatggaaccagccgcaaaaaagtgctatttggagagagagcagggagagaagattatacaggaattcctcagtaaagtaaagcaaatgccattcacagaaatgtcggaggagaatattacaatcaaactgaaacagcttaaggcggaggtgatcgcaaagaataactcctttgtgaatgagattatcagtaggatcaaagtaacaacgtag

SEQ ID NO: 5419 - DNA, 2805 bp, Artificial Sequence
  derived and/or modified sequence
atggctgtgcagcccaaggagaccctgcagctggagagcgctgctgaggtgggctttgtgcgcttcttccagggcatgcctgagaagcccaccaccaccgtgcggctgtttgacagaggagacttctacacagcccacggggaggatgccctgctggccgcccgggaggtgttcaagacccagggcgtcatcaagtacatgggccctgctggggccaagaacctgcagagcgtggtgctgagcaagatgaactttgagagctttgtgaaggacctgctgctggtgcggcagtacagagtggaggtgtacaagaacagagctggcaacaaggccagcaaagaaaatgactggtacctggcctacaaggccagccctggcaacctgagccagtttgaggacatcctgtttggaaataatgacatgtctgccagcattggagtggtgggcgtgaagatgtctgctgtggatggccagaggcaggtgggcgtgggctacgtggacagcatccagaggaagctgggcctgtgtgagttcccagacaatgaccagttcagcaacctggaggccctgctgatccagatcggccccaaggaatgtgtgctgcccggcggggagacagctggggacatgggcaagctgcggcagatcatccagaggggcggcatcctgatcacagagaggaagaaggctgacttcagcaccaaggacatctaccaggacctgaaccggctgctgaagggcaagaagggggagcagatgaacagcgctgtgctgcctgagatggagaaccaggtggccgtgagcagcctgtctgctgtgatcaagttcctggagctgctgagtgatgacagcaactttggccagtttgagctgaccacctttgacttcagccagtacatgaagctggacattgctgctgtgcgggccctgaacctcttccagggctctgtggaggacaccaccggcagccagagcctggccgccctgctgaacaagtgcaagaccccccagggccagaggctggtgaaccagtggatcaagcagcccctgatggacaagaaccgcatcgaggagcggctgaacctggtggaggcctttgtggaggatgctgagctgcggcagaccctgcaggaggacctgctgcggcgcttcccagacctgaaccggctggccaagaagttccagaggcaggccgccaacctgcaggactgctaccgcctgtaccagggcatcaaccagctgcccaacgtcatccaggccctggagaagcatgagggcaagcaccagaagctgctgctggccgtgtttgtgacccccctgacagacctgcggagtgacttcagcaagttccaggagatgattgagaccaccctggacatggaccaggtggagaaccacgagttcctggtgaagcccagctttgaccccaacctgtctgagctgcgggagatcatgaatgacctggagaagaagatgcagagcaccctcatctctgctgcccgggacctgggcctggaccccgggaagcagatcaagctggacagcagcgcccagtttggctactacttccgggtgacctgcaaggaggagaaggtgctgaggaacaacaagaacttcagcacagtggacatccagaagaatggagtgaagttcaccaacagcaagctgaccagcctgaatgaggagtacaccaagaacaagacagaatatgaggaggcccaggatgccatcgtgaaggagatcgtgaacatcagcagcggctacgtggagcccatgcagaccctgaatgatgtgctggcccagctggatgctgtggtgtcctttgcccacgtgtccaatggagcccctgtgccctacgtgcggcctgccatcctggagaagggccagggccgcatcatcctgaaggccagcagacatgcctgtgtggaggtgcaggatgagatcgccttcatccccaatgatgtgtactttgagaaggacaagcagatgttccacatcatcaccggccccaacatgggcggcaagagcacctacatccggcagacaggagtgattgtgctgatggcccagatcggctgctttgtgccctgtgagagcgctgaggtgtccatcgtggactgcatcctggcccgggtgggcgctggggacagccagctgaagggcgtgtccaccttcatggccgagatgctggagacagccagcatcctgcggagcgccaccaaggacagcctcatcatcattgatgagctgggccggggcaccagcacctatgatggcttcggcctggcctgggccatcagcgagtacatcgccaccaagatcggggccttctgcatgtttgccacccacttccacgagctgacagccctggccaaccagatccccaccgtgaacaacctgcacgtgacagccctgaccacagaggagaccctgaccatgctgtaccaggtgaagaagggcgtgtgtgaccagagctttggcatccacgtggccgagctggccaacttccccaagcacgtgattgaatgtgccaagcagaaggccctggagctggaggagttccagtacatcggggagagccagggctatgacatcatggagcctgctgccaagaagtgctacctggagcgggagcagggcgagaagatcatccaggagttcctgagcaaggtgaagcagatgcccttcacagagatgtctgaggagaacatcaccatcaagctgaagcagctgaaggccgaggtgattgccaagaacaacagctttgtgaatgagatcatcagccgcatcaaggtgaccacctag

SEQ ID NO: 5420 - DNA, 2805 bp, Artificial Sequence
  derived and/or modified sequence
atggccgtgcagcccaaggagaccctgcagctggagagcgccgccgaggtggggtttgtgagatttttccagggaatgcccgaaaaacctacaacgacagttcgactctttgaccggggggacttttacactgcccacggagaagatgcattattggcagccagagaggtgtttaagactcagggagtcatcaaatacatgggacccgccggggctaaaaacttgcagagcgtcgtgttgtctaagatgaactttgagtcatttgttaaggacctcctgctggttcggcagtaccgcgttgaggtctacaagaaccgggccggcaacaaagcttccaaggagaacgattggtacctggcatacaaggcttccccagggaacctgagtcaattcgaagacatcttgttcggcaacaacgacatgtccgcctcaatcggagtcgtcggcgtgaagatgtctgcagttgatggacagcggcaggtgggcgttggctatgttgacagcatccaacgtaagctcggtctctgtgaatttcccgacaacgaccagtttagtaatctcgaggcgcttcttatccaaattggacctaaggagtgtgtgctccccggcggggaaacggccggggatatggggaagttaaggcagatcattcagcggggaggaatcttgattacagagaggaagaaggccgatttctccacaaaagacatctaccaggacctcaatcggctgctgaaaggcaagaaaggagagcaaatgaacagcgccgtgttgcctgagatggagaaccaggtggcggtgtcttcactgagcgcggtcatcaaattccttgagctgctttctgacgactcgaattttggccagttcgagctaactacatttgattttagccagtacatgaagctggatatcgctgccgtgcgcgcacttaacctgttccagggaagtgttgaggatacaaccgggagtcagtccctggcagccctcctgaacaagtgcaaaacgccacaggggcagcgcctggtgaatcagtggataaaacaacccctgatggacaagaataggattgaggaacggctcaatctggttgaagcgtttgtggaggatgccgaactcagacagactctccaggaagatctgcttaggcgtttcccagacctgaatcgactcgcaaagaagttccagcggcaagcagcgaatctgcaggattgttaccgcctataccaaggcattaatcagctgcctaatgtgatccaggctctggaaaagcacgagggaaaacatcagaaactcctgctcgctgtcttcgtgactccgctcacagacctccgcagcgacttttcaaagttccaggagatgattgagactaccctcgacatggatcaggtcgaaaatcacgagttcttagttaaacccagctttgacccaaatttgtcggagctgagagagataatgaatgatctggaaaagaaaatgcagagcaccctcatcagcgctgcccgcgacttgggcctggaccccggaaagcaaatcaagctcgacagctctgcacaatttgggtattacttcagagtcacttgtaaggaggagaaggtccttcgaaataacaagaacttctccactgttgatattcagaagaatggtgtgaagttcaccaactccaagcttacctcactcaacgaggaatataccaaaaataagactgaatacgaagaggcacaagacgccatcgttaaagagatcgtcaacattagcagcggatacgttgagccaatgcagacactaaatgacgtcttggcacagttggatgccgttgtgagcttcgctcacgtgtctaacggcgctcctgtgccttacgtcagacctgcgatcttggagaagggccaaggccgtataattcttaaggcatcaaggcacgcctgtgtggaggttcaggacgaaatagccttcatacctaatgacgtgtattttgagaaggacaagcagatgttccatattattacaggccccaacatgggaggtaaaagtacctacatcagacaaaccggcgtgatcgtactgatggctcagattgggtgttttgtcccatgcgaatccgccgaggtttccattgtggattgtatcctcgctcgcgtgggagctggagactcacagcttaagggggtgtccacattcatggccgagatgctggagaccgcttcaatactgaggtctgcgacaaaggacagcctgatcatcatcgacgagctgggaaggggcacaagtacttatgatggcttcgggttggcctgggcgatcagcgaatatatcgcgacaaaaattggggctttttgcatgtttgctacccactttcacgaacttacggcactggccaatcagatccctaccgtgaacaacctgcatgttacagccctgacaaccgaggaaacacttacaatgctttaccaagtgaaaaagggcgtttgtgatcagagtttcggaatccacgtggccgaattagccaactttcccaaacacgtgatcgagtgcgccaagcagaaggcgctggagttggaggagttccagtatatcggtgagtcccaggggtatgacatcatggaacctgcggccaagaaatgctacctggaaagggaacagggtgaaaaaataattcaggaattcttgtcaaaggtgaaacagatgccattcaccgaaatgtctgaggaaaatataaccataaaactgaagcagttaaaagcagaagtaatcgctaagaataacagcttcgtgaacgaaatcataagtaggattaaggttaccacgtag

SEQ ID NO: 5421 - DNA, 2805 bp, Artificial Sequence
  derived and/or modified sequence
atggcagtgcagcctaaagagacgctccaactggagagtgctgccgaggtgggtttcgttaggttctttcagggaatgcctgaaaaacctactacaaccgtgaggctttttgaccgaggcgacttctacactgcccacggagaggacgccctactggcagcgcgtgaagtattcaagacacagggcgtgataaaatatatggggccagccggagcgaaaaatctgcagtccgtggtgctgtcaaagatgaactttgaatcatttgtgaaggatctgctcttggtgcgtcagtaccgagtggaagtttacaagaacagagctgggaacaaggcctctaaagaaaatgattggtaccttgcttacaaagcctcccctggaaatctgtcccaattcgaagatattcttttcggcaataatgacatgtctgcatccattggagtggtcggcgttaaaatgtccgctgtagatggtcagaggcaggtgggggtggggtatgttgatagtatacagcggaagttaggcctgtgcgaatttcctgataatgaccaattttctaacttggaggccctgctgatccaaataggacctaaggagtgcgttctcccaggaggcgaaacagctggggacatgggcaaattgcggcagataatccaaaggggaggaattcttattactgaaaggaagaaggccgacttttctaccaaagatatataccaggacctcaacagactgttgaagggtaagaagggggaacagatgaattcagcagttctccccgagatggagaaccaggtcgcagtgagtagtctctctgccgtaattaagtttctcgagctgctcagcgacgattccaattttggacaattcgagttaacgacttttgatttctcccagtatatgaaactcgatatcgccgcagtccgggcactgaatctattccagggatccgtcgaagacacgacaggttcccaaagcctggccgcactgcttaataaatgtaagactccgcagggccaacgtctcgtcaaccagtggattaaacagccgctgatggacaaaaaccgcattgaggagcggcttaatctggtagaagctttcgtcgaagacgccgaactgaggcagaccctccaggaggatctacttcggcgatttcctgacctaaaccggctggcgaagaaattccagcgtcaggcggctaatctccaggattgctatcgactgtatcagggcattaatcagttgcccaacgtgatccaggcactggaaaagcacgagggaaaacatcagaagctgctcctggctgtattcgtgacacccctgacagacctgagatctgactttagcaagttccaggagatgatagaaacgacattggatatggaccaagtagagaatcacgagttccttgttaaacccagcttcgaccctaacctgagtgagcttcgagaaatcatgaacgatcttgaaaagaagatgcagagcaccctgatcagtgccgctagggacctgggactggaccccggtaagcagattaaactggactcaagcgcccaattcggctactatttcagagttacttgcaaagaagaaaaagtgctgaggaacaacaaaaacttctccactgttgacatccaaaagaacggcgtgaaatttacaaactcaaagcttaccagcttgaatgaagaatacacaaagaataagactgagtatgaggaggctcaggatgccattgtgaaagaaatcgtgaacattagttcaggatacgtggaacccatgcagactcttaacgacgtactagcacagcttgatgcggtggtctcatttgctcatgtctcgaacggcgctccagtcccttacgttcgccctgctatattagagaagggacaggggagaattattctgaaagcctctaggcacgcatgtgttgaagtccaggacgagatcgcatttataccgaatgatgtttatttcgagaaagacaagcagatgtttcacattattactggacctaacatgggcggtaaaagtacctatatcagacagaccggcgttatcgttctgatggcgcagattggatgcttcgtgccttgtgaaagcgccgaagtaagcatcgtggattgtatactggctcgcgtgggcgctggtgactcccagctcaaaggtgtgtccacctttatggcagaaatgctagaaacggcttctatcctgaggtccgcaaccaaagatagtttgatcattattgacgagctcggcaggggcactagtacatacgatggcttcgggctggcttgggctatcagtgagtatatcgctactaaaattggcgctttttgtatgttcgccacgcactttcatgaactcaccgcactggctaaccaaattcccactgtgaacaacctccatgtgaccgccctgacaaccgaggaaaccctcaccatgctgtaccaggtaaaaaaaggtgtgtgtgaccagagttttgggattcatgtggccgagttggccaacttcccaaaacatgtaatcgagtgcgccaagcagaaggcactggaactggaagagttccagtatattggagagagtcagggctatgacattatggaacctgccgcaaagaaatgctatttagagcgggagcaaggggaaaagataatccaagagtttctatccaaagtgaagcagatgcccttcacagagatgagtgaggagaacattactatcaagcttaaacagctcaaggcagaggtaattgcaaagaataattcctttgtaaacgagattatcagccgcataaaggtgaccacgtag

SEQ ID NO: 5422 - DNA, 2805 bp, Artificial Sequence
  derived and/or modified sequence
atggccgtgcagcccaaggagaccctgcagctggagagcgccgccgaggtgggcttcgtgagattcttccagggcatgcccgagaagcccaccaccaccgtgagactgttcgacagaggcgacttctacaccgcccacggcgaggacgccctgctggccgccagagaggtgttcaagacccagggcgtgatcaagtacatgggccccgccggcgccaagaacctgcagagcgtggtgctgagcaagatgaacttcgagagcttcgtgaaggacctgctgctggtgagacagtacagagtggaggtgtacaagaacagagccggcaacaaggccagcaaggagaacgactggtacctggcctacaaggccagccccggcaacctgagccagttcgaggacatcctgttcggcaacaacgacatgagcgccagcatcggcgtggtgggcgtgaagatgagcgccgtggacggccagagacaggtgggcgtgggctacgtggacagcatccagagaaagctgggcctgtgcgagttccccgacaacgaccagttcagcaacctggaggccctgctgatccagatcggccccaaggagtgcgtgctgcccggcggcgagaccgccggcgacatgggcaagctgagacagatcatccagagaggcggcatcctgatcaccgagagaaagaaggccgacttcagcaccaaggacatctaccaggacctgaacagactgctgaagggcaagaagggcgagcagatgaacagcgccgtgctgcccgagatggagaaccaggtggccgtgagcagcctgagcgccgtgatcaagttcctggagctgctgagcgacgacagcaacttcggccagttcgagctgaccaccttcgacttcagccagtacatgaagctggacatcgccgccgtgagagccctgaacctgttccagggcagcgtggaggacaccaccggcagccagagcctggccgccctgctgaacaagtgcaagaccccccagggccagagactggtgaaccagtggatcaagcagcccctgatggacaagaacagaatcgaggagagactgaacctggtggaggccttcgtggaggacgccgagctgagacagaccctgcaggaggacctgctgagaagattccccgacctgaacagactggccaagaagttccagagacaggccgccaacctgcaggactgctacagactgtaccagggcatcaaccagctgcccaacgtgatccaggccctggagaagcacgagggcaagcaccagaagctgctgctggccgtgttcgtgacccccctgaccgacctgagaagcgacttcagcaagttccaggagatgatcgagaccaccctggacatggaccaggtggagaaccacgagttcctggtgaagcccagcttcgaccccaacctgagcgagctgagagagatcatgaacgacctggagaagaagatgcagagcaccctgatcagcgccgccagagacctgggcctggaccccggcaagcagatcaagctggacagcagcgcccagttcggctactacttcagagtgacctgcaaggaggagaaggtgctgagaaacaacaagaacttcagcaccgtggacatccagaagaacggcgtgaagttcaccaacagcaagctgaccagcctgaacgaggagtacaccaagaacaagaccgagtacgaggaggcccaggacgccatcgtgaaggagatcgtgaacatcagcagcggctacgtggagcccatgcagaccctgaacgacgtgctggcccagctggacgccgtggtgagcttcgcccacgtgagcaacggcgcccccgtgccctacgtgagacccgccatcctggagaagggccagggcagaatcatcctgaaggccagcagacacgcctgcgtggaggtgcaggacgagatcgccttcatccccaacgacgtgtacttcgagaaggacaagcagatgttccacatcatcaccggccccaacatgggcggcaagagcacctacatcagacagaccggcgtgatcgtgctgatggcccagatcggctgcttcgtgccctgcgagagcgccgaggtgagcatcgtggactgcatcctggccagagtgggcgccggcgacagccagctgaagggcgtgagcaccttcatggccgagatgctggagaccgccagcatcctgagaagcgccaccaaggacagcctgatcatcatcgacgagctgggcagaggcaccagcacctacgacggcttcggcctggcctgggccatcagcgagtacatcgccaccaagatcggcgccttctgcatgttcgccacccacttccacgagctgaccgccctggccaaccagatccccaccgtgaacaacctgcacgtgaccgccctgaccaccgaggagaccctgaccatgctgtaccaggtgaagaagggcgtgtgcgaccagagcttcggcatccacgtggccgagctggccaacttccccaagcacgtgatcgagtgcgccaagcagaaggccctggagctggaggagttccagtacatcggcgagagccagggctacgacatcatggagcccgccgccaagaagtgctacctggagagagagcagggcgagaagatcatccaggagttcctgagcaaggtgaagcagatgcccttcaccgagatgagcgaggagaacatcaccatcaagctgaagcagctgaaggccgaggtgatcgccaagaacaacagcttcgtgaacgagatcatcagcagaatcaaggtgaccacctag

SEQ ID NO: 5423 - protein, 894 aa, Artificial Sequence
  derived and/or modified sequence
MILLAVLFLCFISSYSASVKGHTTGLSLNNDRLYKLTYSTEVLLDRGKGKLQDSVGYRISSNVDVALLWRNPDGDDDQLIQITMKDVNVENVNQQRGEKSIFKGKSPSKIMGKENLEALQRPTLLHLIHGKVKEFYSYQNEAVAIENIKRGLASLFQTQLSSGTTNEVDISGNCKVTYQAHQDKVIKIKALDSCKIARSGFTTPNQVLGVSSKATSVTTYKIEDSFVIAVLAEETHNFGLNFLQTIKGKIVSKQKLELKTTEAGPRLMSGKQAAAIIKAVDSKYTAIPIVGQVFQSHCKGCPSLSELWRSTRKYLQPDNLSKAEAVRNFLAFIQHLRTAKKEEILQILKMENKEVLPQLVDAVTSAQTSDSLEAILDFLDFKSDSSIILQERFLYACGFASHPNEELLRALISKFKGSIGSSDIRETVMIITGTLVRKLCQNEGCKLKAVVEAKKLILGGLEKAEKKEDTRMYLLALKNALLPEGIPSLLKYAEAGEGPISHLATTALQRYDLPFITDEVKKTLNRIYHQNRKVHEKTVRTAAAAIILNNNPSYMDVKNILLSIGELPQEMNKYMLAIVQDILRFEMPASKIVRRVLKEMVAHNYDRFSRSGSSSAYTGYIERSPRSASTYSLDILYSGSGILRRSNLNIFQYIGKAGLHGSQVVIEAQGLEALIAATPDEGEENLDSYAGMSAILFDVQLRPVTFFNGYSDLMSKMLSASGDPISVVKGLILLIDHSQELQLQSGLKANIEVQGGLAIDISGAMEFSLWYRESKTRVKNRVTVVITTDITVDSSFVKAGLETSTETEAGLEFISTVQFSQYPFLVCMQMDKDEAPFRQFEKKYERLSTGRGYVSQKRKESVLAGCEFPLHQENSEMCKVVFAPQPDSTSSGWF

SEQ ID NO: 5424 - protein, 178 aa, Artificial Sequence
  derived and/or modified sequence
MARAPLRPENTIVRGSANQCQDTYRAEELTGHTTGLSLNNDRLYKLTYSTEVLLDRGKGKLQDSVGYRISSNVDVALLWRNPDGDDDQLIQITMKDVNVENVNQQRGEKSIFKGKSPSKIMGKENLEALQRPTLLHLIHGKVKEFYSYQNEAVAIENIKRGLASLFQTQLSSGTTNEV

SEQ ID NO: 5425 - protein, 516 aa, Artificial Sequence
  derived and/or modified sequence
MILLAVLFLCFISSYSASVKGHTTGLSLNNDRLYKLTYSTEVLLDRGKGKLQDSVGYRISSNVDVALLWRNPDGDDDQLIQITMKDVNVENVNQQRGEKSIFKGKSPSKIMGKENLEALQRPTLLHLIHGKVKEFYSYQNEAVAIENIKRGLASLFQTQLSSGTTNEVDISGNCKVTYQAHQDKVIKIKALDSCKIARSGFTTPNQVLGVSSKATSVTTYKIEDSFVIAVLAEETHNFGLNFLQTIKGKIVSKQKLELKTTEAGPRLMSGKQAAAIIKAVDSKYTAIPIVGQVFQSHCKGCPSLSELWRSTRKYLQPDNLSKAEAVRNFLAFIQHLRTAKKEEILQILKMENKEVLPQLVDAVTSAQTSDSLEAILDFLDFKSDSSIILQERFLYACGFASHPNEELLRALISKFKGSIGSSDIRETVMIITGTLVRKLCQNEGCKLKAVVEAKKLILGGLEKAEKKEDTRMYLLALKNALLPEGIPSLLKYAEAGEGPISHLATTALQRYDLFHN

SEQ ID NO: 5426 - protein, 17 aa, Artificial Sequence
  derived and/or modified sequence
FLYACGFASHPNEELLR

SEQ ID NO: 5427 - DNA, 2682 bp, Artificial Sequence
  derived and/or modified sequence
atgatcctgctggccgtgctgttcctgtgcttcatcagcagctacagcgccagcgtgaagggccacaccaccggcctgagcctgaacaacgaccgcctgtacaagctgacctacagcaccgaggtgctgctggaccgcggcaagggcaagctgcaggacagcgtgggctaccgcatcagcagcaacgtggacgtggccctgctgtggcgcaaccccgacggcgacgacgaccagctgatccagatcaccatgaaggacgtgaacgtggagaacgtgaaccagcagcgcggcgagaagagcatcttcaagggcaagagccccagcaagatcatgggcaaggagaacctggaggccctgcagcgccccaccctgctgcacctgatccacggcaaggtgaaggagttctacagctaccagaacgaggccgtggccatcgagaacatcaagcgcggcctggccagcctgttccagacccagctgagcagcggcaccaccaacgaggtggacatcagcggcaactgcaaggtgacctaccaggcccaccaggacaaggtgatcaagatcaaggccctggacagctgcaagatcgcccgcagcggcttcaccacccccaaccaggtgctgggcgtgagcagcaaggccaccagcgtgaccacctacaagatcgaggacagcttcgtgatcgccgtgctggccgaggagacccacaacttcggcctgaacttcctgcagaccatcaagggcaagatcgtgagcaagcagaagctggagctgaagaccaccgaggccggcccccgcctgatgagcggcaagcaggccgccgccatcatcaaggccgtggacagcaagtacaccgccatccccatcgtgggccaggtgttccagagccactgcaagggctgccccagcctgagcgagctgtggcgcagcacccgcaagtacctgcagcccgacaacctgagcaaggccgaggccgtgcgcaacttcctggccttcatccagcacctgcgcaccgccaagaaggaggagatcctgcagatcctgaagatggagaacaaggaggtgctgccccagctggtggacgccgtgaccagcgcccagaccagcgacagcctggaggccatcctggacttcctggacttcaagagcgacagcagcatcatcctgcaggagcgcttcctgtacgcctgcggcttcgccagccaccccaacgaggagctgctgcgcgccctgatcagcaagttcaagggcagcatcggcagcagcgacatccgcgagaccgtgatgatcatcaccggcaccctggtgcgcaagctgtgccagaacgagggctgcaagctgaaggccgtggtggaggccaagaagctgatcctgggcggcctggagaaggccgagaagaaggaggacacccgcatgtacctgctggccctgaagaacgccctgctgcccgagggcatccccagcctgctgaagtacgccgaggccggcgagggccccatcagccacctggccaccaccgccctgcagcgctacgacctgcccttcatcaccgacgaggtgaagaagaccctgaaccgcatctaccaccagaaccgcaaggtgcacgagaagaccgtgcgcaccgccgccgccgccatcatcctgaacaacaaccccagctacatggacgtgaagaacatcctgctgagcatcggcgagctgccccaggagatgaacaagtacatgctggccatcgtgcaggacatcctgcgcttcgagatgcccgccagcaagatcgtgcgccgcgtgctgaaggagatggtggcccacaactacgaccgcttcagccgcagcggcagcagcagcgcctacaccggctacatcgagcgcagcccccgcagcgccagcacctacagcctggacatcctgtacagcggcagcggcatcctgcgccgcagcaacctgaacatcttccagtacatcggcaaggccggcctgcacggcagccaggtggtgatcgaggcccagggcctggaggccctgatcgccgccacccccgacgagggcgaggagaacctggacagctacgccggcatgagcgccatcctgttcgacgtgcagctgcgccccgtgaccttcttcaacggctacagcgacctgatgagcaagatgctgagcgccagcggcgaccccatcagcgtggtgaagggcctgatcctgctgatcgaccacagccaggagctgcagctgcagagcggcctgaaggccaacatcgaggtgcagggcggcctggccatcgacatcagcggcgccatggagttcagcctgtggtaccgcgagagcaagacccgcgtgaagaaccgcgtgaccgtggtgatcaccaccgacatcaccgtggacagcagcttcgtgaaggccggcctggagaccagcaccgagaccgaggccggcctggagttcatcagcaccgtgcagttcagccagtaccccttcctggtgtgcatgcagatggacaaggacgaggcccccttccgccagttcgagaagaagtacgagcgcctgagcaccggccgcggctacgtgagccagaagcgcaaggagagcgtgctggccggctgcgagttccccctgcaccaggagaacagcgagatgtgcaaggtggtgttcgccccccagcccgacagcaccagcagcggctggttc

SEQ ID NO: 5428 - DNA, 534 bp, Artificial Sequence
  derived and/or modified sequence
atggcccgcgcccccctgcgccccgagaacaccatcgtgcgcggcagcgccaaccagtgccaggacacctaccgcgccgaggagctgaccggccacaccaccggcctgagcctgaacaacgaccgcctgtacaagctgacctacagcaccgaggtgctgctggaccgcggcaagggcaagctgcaggacagcgtgggctaccgcatcagcagcaacgtggacgtggccctgctgtggcgcaaccccgacggcgacgacgaccagctgatccagatcaccatgaaggacgtgaacgtggagaacgtgaaccagcagcgcggcgagaagagcatcttcaagggcaagagccccagcaagatcatgggcaaggagaacctggaggccctgcagcgccccaccctgctgcacctgatccacggcaaggtgaaggagttctacagctaccagaacgaggccgtggccatcgagaacatcaagcgcggcctggccagcctgttccagacccagctgagcagcggcaccaccaacgaggtg

SEQ ID NO: 5429 - DNA, 2682 bp, Artificial Sequence
  derived and/or modified sequence
atgattcttctcgcggtcctgtttttgtgctttattagctcatatagtgcttcagtcaaggggcacacaacagggctcagcctgaataacgatagactgtacaaactgacttactccacagaggtgctgctggatcgcggcaaggggaagcttcaggattctgtcggctaccggatatcatcaaatgtggatgtggccctgctgtggcgcaacccagacggggacgatgaccagttgattcagatcaccatgaaagacgtcaacgtagagaatgtaaatcagcaacgcggcgagaaatccatcttcaaggggaagtcccccagtaagataatgggcaaagagaatctggaggccttgcagagacctaccctgctgcacctgatccatggtaaagttaaagagttttacagttatcaaaacgaagccgtagcgatagaaaatatcaagagaggcctggccagtctcttccaaacccagctgtcaagtggaacgaccaacgaggtggacattagtggcaattgcaaggtaacataccaggcacaccaggacaaggtcataaagatcaaggccttagattcttgtaaaatagccagaagtggatttactacgccaaaccaggtgctcggcgtgtcttccaaggcgaccagcgttaccacctacaaaattgaggacagtttcgttatagccgtgctggcggaggagactcacaacttcggattgaacttcctccagacaatcaaggggaagattgtgagcaagcagaagttggagctgaaaactaccgaagctgggccacgcctgatgtcgggtaaacaagccgcagcaatcatcaaggccgtggatagtaagtacacagcaattcccatcgtcgggcaggtatttcagagtcactgtaaaggatgtccctcgctcagtgaactgtggcggtccacacggaaatacctacagccggacaatttgtctaaggccgaggccgtgcgtaactttttggcttttatacagcatcttcgcacagccaaaaaggaggagatcctgcagattctaaaaatggagaacaaggaggtcctcccacagctggtcgacgccgtgacaagcgcccagacctctgactctctcgaggcgattcttgactttctggacttcaaaagcgactcctctattatattgcaggaacggttcctgtacgcgtgcggcttcgcatctcaccccaacgaggagctactgagggccctgatctccaaatttaagggatccattgggtccagtgatattcgggagacagtcatgattatcactggcacgttggtgcggaagttgtgccagaatgagggctgtaagctgaaggcagtggttgaggcaaagaaactcatcctgggcgggttggagaaagccgaaaaaaaggaagatacacgcatgtacctactcgcccttaagaacgccctgctgccggaagggattccttctctattgaaatatgccgaggccggagagggtcccatttctcatttagctaccaccgctttgcagcgatatgatctgccctttattacggacgaggttaagaaaactctgaaccgcatttaccaccagaaccggaaagtccacgagaagactgtgcggactgcagcagccgccataattttgaacaataacccttcttatatggacgttaaaaatattctcttaagtatcggcgaattgccacaagagatgaacaagtatatgctagccatagtgcaggacattctgcgcttcgagatgcccgcgtcaaagatagttagaagagttctcaaagagatggtggcacataattacgataggttctcccgtagcgggagtagcagcgcatacactggctacatcgagcggagtcccagatccgcatccacgtactcacttgatatcctctacagcggctccgggatccttcgcaggtccaacctgaacatattccagtacataggaaaggccggcctgcacggctcacaggtggtgatagaagcccagggcctggaggcactcatcgccgctaccccggacgagggcgaagagaacttggacagctatgctggaatgagtgctatactgttcgacgtgcagctgcgcccagtaactttttttaacggctatagcgatctgatgagtaaaatgctttcagcctcgggcgatcccatctcagtcgtgaagggcctaatcctgctcattgaccattcccaggaactccagcttcaatctgggctcaaggctaacatagaggtgcagggaggtcttgctatcgacatcagcggcgctatggagttctctctatggtaccgggagtctaaaacccgagtgaaaaatcgagttaccgttgttataacgaccgacatcaccgtggacagctcatttgtgaaggcgggtttggaaacttctacggagactgaagccggtctggagttcatcagcacagtgcagttttcccagtatccttttctggtctgcatgcagatggataaggatgaggcgccgtttcggcagtttgaaaagaaatacgagcgactgtccaccgggcggggttatgtttcccagaagcgaaaggagtctgtgctcgccgggtgtgagtttcctcttcaccaggaaaattcggaaatgtgcaaggtggtgtttgcccctcagcccgatagtacctcatcaggctggttc

SEQ ID NO: 5430 - DNA, 2682 bp, Artificial Sequence
  derived and/or modified sequence
atgatattattagcggtattatttctatgttttatatcgtcgtattcggcgtcggtaaaaggtcatacgacgggtttatcgctaaataatgatcgactatataaattaacgtattcgacggaagttctactagatcgtggtaaaggtaaattacaagattcggtaggttatcgtatatcgtcgaatgtagatgttgcgttattatggcgaaatccggatggtgatgatgatcaactaatacaaataacgatgaaagatgtaaatgtagaaaatgttaatcaacaacgaggtgaaaaatcgatatttaaaggtaaatcgccgtcgaaaataatgggtaaagaaaatttagaagcgttacaacgaccgacgttactacatctaatacatggtaaagttaaagaattttattcgtatcaaaatgaagcggttgcgatagaaaatataaaacgaggtttagcgtcgctatttcaaacgcaactatcgtcgggtacgacgaatgaagttgatatatcgggtaattgtaaagtaacgtatcaagcgcatcaagataaagttataaaaataaaagcgctagattcgtgtaaaatagcgcgttcgggttttacgacgccgaatcaagttttaggtgtttcgtcgaaagcgacgtcggtaacgacgtataaaatagaagattcgtttgtaatagcggtattagcggaagaaacgcataattttggtctaaattttttacaaacgataaaaggtaaaatagtatcgaaacaaaaactagaattaaaaacgacggaagcgggtccgcgtttaatgtcgggtaaacaagcggcggcgataataaaagcggttgattcgaaatatacggcgataccgatagtaggtcaagtatttcaatcgcattgtaaaggttgtccgtcgttatcggaactatggcgttcgacgcgaaaatatttacaaccggataatttatcgaaagcggaagcggtacgtaattttttagcgtttatacaacatctacgtacggcgaaaaaagaagaaatactacaaatattaaaaatggaaaataaagaagtactaccgcaattagtagatgcggtaacgtcggcgcaaacgtcggattcgttagaagcgatactagattttctagattttaaatcggattcgtcgataatattacaagaacgttttctatatgcgtgtggttttgcgtcgcatccgaatgaagaactattacgtgcgctaatatcgaaatttaaaggttcgataggttcgtcggatatacgagaaacggtaatgataataacgggtacgttagttcgtaaattatgtcaaaatgaaggttgtaaactaaaagcggtagtagaagcgaaaaaactaatattaggtggtttagaaaaagcggaaaaaaaagaagatacgcgaatgtatctattagcgttaaaaaatgcgttattaccggaaggtataccgtcgttactaaaatatgcggaagcgggtgaaggtccgatatcgcatttagcgacgacggcgttacaacgatatgatctaccgtttataacggatgaagtaaaaaaaacgctaaatcgaatatatcatcaaaatcgaaaagtacatgaaaaaacggtacgaacggcggcggcggcgataatattaaataataatccgtcgtatatggatgttaaaaatatattactatcgataggtgaactaccgcaagaaatgaataaatatatgttagcgatagtacaagatatactacgttttgaaatgccggcgtcgaaaatagtacgacgagttctaaaagaaatggtagcgcataattatgatcgtttttcgcgttcgggttcgtcgtcggcgtatacgggttatatagaacgatcgccgcgttcggcgtcgacgtattcgctagatatattatattcgggttcgggtatactacgtcgatcgaatctaaatatatttcaatatataggtaaagcgggtttacatggttcgcaagttgtaatagaagcgcaaggtttagaagcgttaatagcggcgacgccggatgaaggtgaagaaaatttagattcgtatgcgggtatgtcggcgatactatttgatgtacaactacgtccggtaacgttttttaatggttattcggatctaatgtcgaaaatgctatcggcgtcgggtgatccgatatcggtagtaaaaggtctaatattattaatagatcattcgcaagaattacaattacaatcgggtctaaaagcgaatatagaagtacaaggtggtctagcgatagatatatcgggtgcgatggaattttcgctatggtatcgtgaatcgaaaacgcgtgttaaaaatcgagtaacggtagtaataacgacggatataacggtagattcgtcgtttgtaaaagcgggtttagaaacgtcgacggaaacggaagcgggtctagaatttatatcgacggtacaattttcgcaatatccgtttctagtatgtatgcaaatggataaagatgaagcgccgtttcgtcaatttgaaaaaaaatatgaacgtttatcgacgggtcgtggttatgtatcgcaaaaacgaaaagaatcggttctagcgggttgtgaatttccgctacatcaagaaaattcggaaatgtgtaaagtagtttttgcgccgcaaccggattcgacgtcgtcgggttggttt

SEQ ID NO: 5431 - DNA, 2682 bp, Artificial Sequence
  derived and/or modified sequence
atgattcttctggctgttctgttcctgtgttttatctcctcatactccgcatcggtgaagggacataccactggtctgtccctgaataacgatcggctctacaaactgacttactcaacggaggtgctgcttgatcgcggaaaaggtaaactccaggactccgttggctaccggatcagctcaaacgtggatgtggcactgctctggagaaatcctgacggtgacgatgatcaactgattcagatcactatgaaagatgtcaatgtggaaaacgtgaatcagcaaaggggagaaaagtcaatctttaaaggaaagtcaccttcgaagattatgggtaaagaaaaccttgaagcacttcaaagacccacgcttctgcatcttatacatggtaaagtgaaagagttctatagctaccaaaacgaggcagtggcaatcgaaaacataaaacggggactggcctcacttttccaaacgcaactctcttctggcactactaacgaggtggacattagcggtaactgtaaggtgacctaccaagcccatcaggataaggtcatcaagattaaagcccttgactcatgcaagatcgcacggtcaggcttcacgaccccaaaccaggtcctgggtgtcagcagcaaggccacctccgtgactacctacaagattgaagattcgtttgtgattgcagtgctggctgaagaaacccacaatttcgggcttaacttccttcaaaccatcaagggtaagattgtgtcgaagcaaaagctggaacttaagaccacggaagcagggccacgcctcatgtccggtaaacaagccgcggcaattatcaaggctgtggactcaaagtacactgctattcccattgttggccaggtgtttcagtcgcattgtaagggctgcccatcgctctccgaactgtggcgttcaactcggaagtacctccagcctgacaatcttagcaaggcagaagcagttaggaactttttggccttcatccagcatctccggaccgcaaagaaagaagagatacttcaaatcttgaaaatggaaaacaaagaagtgcttccgcaactggtggatgcggtgaccagcgcacaaacctcagattcgctggaggccattttggattttcttgacttcaaatctgattcctcaattatcctccaagaaagatttctttacgcatgtggctttgcatcgcaccccaacgaagagctcttgcgcgcgcttatcagcaagtttaaggggtccataggatcgagcgatattcgagagactgtcatgatcattactggtacccttgtgcgaaagttgtgtcagaacgaaggatgtaagctgaaggcagtcgtcgaggcaaaaaagctgatcctcggcggtcttgaaaaggctgaaaagaaagaggacacccggatgtacctcctggcactgaagaatgccctcctcccggaaggaattccatccctgctgaagtacgcagaagcaggagaaggtcccattagccacttggccactaccgctctgcagcgttacgacctgccattcatcactgatgaagtgaaaaagaccctgaacagaatataccatcagaacagaaaagtccacgaaaagactgtgcgcaccgcagctgccgcgataattctgaataacaacccaagctacatggacgtgaaaaacatcttgctgtccatcggtgagctgccacaggagatgaataagtacatgttggcaatcgtccaagatatactgcgattcgagatgccggcctcgaagattgtgcgacgggtgctcaaggagatggtggcacataactacgaccgattttcgcgcagcgggagctcatcggcctatactggatacattgaacggagccctcgctccgcctccacttattcgcttgatatcctttactcgggatccggaatacttcggcgatccaatctgaacattttccaatacataggaaaggcaggactgcacggatcgcaggtcgtgattgaagcacagggccttgaagccctcatcgctgcaactccagatgagggagaagaaaatcttgactcctatgccggtatgtcggcaatccttttcgatgtccagctgcggcctgtcacgtttttcaatggatactcggatctcatgtccaagatgctcagcgcatcgggtgatcctattagcgtcgtgaaaggtctgatcctgctcatagatcattcacaagaacttcaactccaaagcgggcttaaggcaaacattgaggtgcaaggaggactcgcgattgatatcagcggagcgatggagtttagcctgtggtaccgcgaatcgaaaactagagtgaaaaatcgtgtgactgtcgtgattacgactgacatcacggtcgattcgtcgtttgttaaggccgggctcgaaacctcaacggaaaccgaggccggacttgaattcatatcgactgtccagtttagccaatacccttttctggtgtgcatgcaaatggacaaagacgaggcaccatttaggcagtttgaaaagaagtacgaacggctgagcacgggtcgcggttacgtcagccaaaagaggaaggaatctgttctcgcgggttgtgaatttccccttcatcaagagaactctgaaatgtgcaaagtggtgtttgcaccacaacctgactccacttcctccggatggttc

SEQ ID NO: 5432 - DNA, 2682 bp, Artificial Sequence
  derived and/or modified sequence
atgatcctactcgcagtgttgtttctctgtttcatcagcagttatagtgcctcggtgaagggtcataccactgggctctcactgaataatgaccgtctctataagctcacatactccaccgaagtcctcctggatagagggaaaggcaaactgcaggatagtgtgggctatcgaatcagttccaacgtggacgtggccttgttatggcggaaccccgacggcgatgatgaccagctgatccaaattactatgaaagacgtgaacgtagagaatgtgaaccagcagcgcggcgagaagagcatatttaagggcaagagcccaagtaaaatcatggggaaggagaacttggaggccctccagcgtcctactctgctccacctgattcacgggaaggttaaagagttttatagctaccagaatgaggccgttgccattgagaacattaaacgagggcttgcctctttgttccaaactcagttgtcctcagggacgaccaatgaggttgatatctctgggaactgcaaggttacatatcaggcccatcaagacaaagttatcaaaatcaaagccctggactcctgcaagatagctaggtccggttttactacacccaatcaggttctgggggtctcgagtaaagccacttctgtaactacatataaaattgaggacagtttcgttatcgctgtcctcgcagaggagacacacaacttcggtctcaatttcttacaaactatcaagggcaagatcgtgagcaagcaaaagttggaactcaagacaacagaagccgggcccaggcttatgtcaggtaaacaagcagctgcgattatcaaggccgtcgactcaaaatatactgccatacccatagttgggcaagtcttccagagtcattgcaaagggtgcccatctctgtctgagctctggcggtcaactagaaagtacctgcagccggacaacttgtcgaaggctgaggctgtcagaaactttctcgcctttatccagcatttgagaaccgctaaaaaggaggagatcttacagatcttgaaaatggaaaacaaggaagtacttcctcagcttgtggatgccgtcacttcagcccaaacttcagattcgctcgaagcaatcctcgacttcctggatttcaagagcgattcttccatcatcctgcaggagcggtttctgtacgcttgtgggtttgcatcccaccccaacgaggaattgctgagagccttgatatccaagttcaaaggctcaatcggatcctctgacataagggaaacagtaatgattatcacaggtacgcttgtgcggaagttgtgccagaatgagggctgtaagttaaaggctgtggttgaagcaaagaaactgatactgggcggactcgagaaggccgagaagaaagaagatacccggatgtatttgctggcccttaagaatgctttgctaccagagggcatcccctccttgctgaagtacgccgaggccggggagggccccatctcacacctggccactaccgcactgcagcggtacgacttaccttttatcaccgatgaggtcaagaagacattgaataggatctatcatcagaacaggaaagtccacgaaaaaaccgtgcgcaccgccgccgccgccattattttgaataataacccaagttacatggacgtcaagaacatcttgctgagcatcggtgaactcccccaggagatgaacaaatacatgctggcaatcgtgcaggatattttgcgattcgagatgccagcatcaaaaatcgtgcggagagtgttaaaggagatggtagcccataattacgacaggttctcgcgctcaggcagcagtagtgcatatactgggtatatcgagagatccccccgtagcgcaagtacttactcactggacatcctctatagtggctcgggaatattgcgacgttcaaatcttaacatttttcagtatatcggcaaagctggccttcacggctcacaggttgttatcgaagctcagggccttgaagcactaatagctgctactccggacgagggggaagagaatctggatagttacgccgggatgagcgctatcctctttgatgtacagctgcgccctgtgacattctttaatggttattctgatctcatgtcaaagatgttaagcgcgtctggggatcccatcagtgttgttaagggactcatactgctgattgaccacagtcaagaactccaactacagtccgggctgaaggccaacattgaggtccaagggggactggctattgatatcagcggcgcaatggagttctcgttatggtatcgggaatcaaagactcgggtaaagaatagggtcactgttgttattaccaccgacatcaccgtggattcaagctttgtgaaggcgggcctggaaacatccaccgaaactgaggccggattggagtttatttctacagtacagttttcacagtacccattcctggtgtgcatgcaaatggacaaagacgaagctccttttcgacaatttgagaagaaatacgagcgcttaagtactggccgaggctacgtgtcccagaagaggaaggaatccgtgctcgcgggctgtgaattcccactgcaccaagagaacagtgaaatgtgcaaggtggtgtttgcgccccagccggactcaacctctagcggttggttc

SEQ ID NO: 5433 - DNA, 2682 bp, Artificial Sequence
  derived and/or modified sequence
atgattctgctggcagtgcttttcttgtgcttcatctcatcctactcggcgtccgtgaagggccacaccacgggactgtcgttgaataacgatagactgtataaacttacttatagcaccgaagtgctgcttgaccggggaaaaggaaagctccaggattccgtgggataccgcatttcctcgaacgtcgatgtggcgttgctgtggcgcaacccagacggcgacgacgatcaactgattcagatcaccatgaaggacgtcaacgtggaaaatgtgaaccagcagagaggcgaaaagtccatcttcaaggggaaatcaccgtcaaaaatcatgggtaaggagaaccttgaagcgctccaacggcctactcttctgcatctgattcatgggaaggtcaaggaattctactcataccagaacgaagctgtcgcaatcgagaacattaagaggggactggcttcactgtttcaaacgcagctcagcagcggcaccactaacgaagttgacatttctggaaattgcaaagttacctaccaggctcaccaagacaaagtgatcaagataaaggcgctggactcatgcaagatcgcacggagcggattcaccaccccgaaccaggtgctgggggtgtcaagcaaggcgacctcggtgacgacttacaaaattgaggattcgttcgtgatcgcggtgctcgccgaagaaactcataactttgggctgaatttcctccaaactatcaaaggcaagatcgtgtcgaagcaaaaactggaactgaaaaccacggaagccggtcctcggctgatgtccgggaagcaagcagcagccatcatcaaggcagtggatagcaaatacacggcaatccctattgtgggacaggtgtttcagtcccattgcaaaggatgcccgtcgctgagcgaactgtggagatccacccggaaatacctccagcctgacaacctgtccaaggcagaggccgtcaggaatttcctggccttcatccagcacttgcgcaccgcgaagaaggaggagatcctccaaatcctcaagatggagaacaaggaggtcctgccgcaactggtggatgctgtcacttcggcccagacctcggatagcctcgaagccatcttggatttcctcgacttcaaatcagactcctcgataatcctccaagagaggtttttgtacgcttgtggatttgcgtcccacccaaacgaggaactgctgcgcgccttgatttcgaagttcaaaggatcaatcggttcgagcgacatccgagaaactgtcatgatcattacgggaacccttgttagaaagttgtgccaaaacgagggttgtaaactcaaggctgtggttgaggccaaaaagctcatactgggaggtcttgagaaggctgaaaagaaggaagatactcgcatgtacctgctggcgctgaaaaatgcccttcttcccgagggaattccgtccctgctgaagtacgccgaagcgggagaaggcccaatctcccaccttgccactacggcgctgcagagatacgacctgcccttcatcaccgacgaagtgaaaaagaccctgaaccggatctaccatcagaatcggaaagtgcacgaaaaaactgtgcgcactgctgcggcagctatcatcctgaacaacaacccttcgtacatggacgtcaaaaacatcctgctttcgatcggcgagttgccgcaggagatgaataagtatatgctcgctatcgtgcaagatatcctccggtttgaaatgcctgcgtcgaagattgttagacgcgttttgaaggagatggtcgcccacaattacgatcgcttttcgcggtcgggatcctcgagcgcctacaccggatacatcgaacgatccccaagatccgccagcacctactcacttgacatcctctactccggctcaggaatcctccgccgctcgaaccttaacatcttccagtacatcggtaaggctggccttcacggatcacaggtggtgatcgaagcccagggactcgaagcactcatcgcagcaacccccgacgagggagaagaaaatctggattcgtacgctggtatgagcgccatcctgttcgacgtgcagctgcgtccggtgactttcttcaatgggtactctgatctgatgtcaaagatgctgtcggcgtcaggcgatccaatcagcgtggtgaaggggctgatcctgctgatcgaccatagccaagaactgcaactccagagcggcttgaaagccaacatcgaagtgcaggggggacttgcgatagacatctccggcgcaatggagttctctctctggtaccgcgaatcaaagacccgggtgaagaatcgggtcaccgtcgtgatcaccactgacatcaccgtggattcgtctttcgtgaaggcgggactggagactagcactgaaaccgaggctggactggagtttatctccaccgtccagttcagccagtacccattcctcgtgtgtatgcagatggataaggacgaggcaccatttcgccagttcgagaagaagtacgaaagactttcaaccggacgtgggtatgtttcacaaaaacggaaggaaagcgttctcgccggatgcgagttcccactgcaccaggaaaatagcgagatgtgcaaagtggtctttgcaccacaaccggactctacgtcgtcaggctggttc

SEQ ID NO: 5434 - DNA, 2682 bp, Artificial Sequence
  derived and/or modified sequence
atgattctactggccgtgctgtttctctgctttatcagttcttatagcgccagcgtgaaggggcatacaaccggactgtcacttaataatgacagactttataaacttacgtacagtactgaggtacttctggatcggggaaaggggaagctacaggactccgttggatataggatttcctctaacgtggacgtcgctctgctctggcgcaatcccgacggcgacgacgaccagctgatacagatcacaatgaaggacgtgaatgtcgagaacgttaaccagcagcgaggggagaaaagcatctttaaaggtaaatcacccagtaagatcatgggcaaagagaaccttgaggccctgcagagaccgaccctgttgcacttaatccacggcaaggtaaaagaattttactcataccagaacgaggcagtcgccatcgagaacataaagcgcggcctcgcgtccctcttccagactcagctcagtagcggcactaccaacgaggttgacattagcggcaattgcaaggtgacataccaggcgcatcaggacaaggtgatcaagattaaggccctggactcttgtaagatcgcaaggagtggtttcactacgccaaatcaggtgctgggagtgagctctaaagccacctctgttacaacttataaaattgaggattcatttgtcatcgcagtgcttgcagaggaaactcacaatttcggtcttaactttctccaaacgattaaaggaaagattgtgtctaaacagaaattggaactgaagaccaccgaggccgggccaagattaatgtctggtaagcaagccgctgccattatcaaggccgtcgattcaaagtacaccgcgatccccattgtcggacaggttttccagtctcactgcaaaggatgtccgtcactgtccgaactctggcggtcgactcgaaagtacctacaacccgataacctcagtaaggccgaagctgttcgaaattttttggccttcatccaacacctgcggactgccaaaaaagaggagatcctgcagatcttaaagatggaaaacaaggaagtgctgccccaacttgtggacgccgtcacgtctgcacagacgtccgattccttagaggcaatccttgatttcttggatttcaagtcagactcaagcatcattcttcaggaacgtttcctatatgcttgcggcttcgcctctcaccctaacgaagagctcttgagagccctgatctcgaagtttaagggtagcattgggagctcagacatccgtgagacggttatgatcatcacaggtacactcgtccggaaactatgccagaacgaggggtgtaaactcaaggctgtagtcgaggctaagaaacttattctgggtggccttgagaaagcagagaagaaagaagatactcgcatgtacctgctggccttaaaaaatgccctgctgccggagggcatacctagtctgctgaaatatgccgaagccggggagggccccatctcacatctcgcaacgaccgccctgcagagatatgatctgccgtttattactgatgaggtgaagaaaaccctcaacaggatatatcatcaaaatagaaaagtacacgagaagactgttcgaaccgccgcagccgctattatattaaacaacaatccaagctatatggatgtgaagaacatcctgttatccatcggggagctgccacaagaaatgaacaaatacatgttagccatcgtacaagacatcttgaggttcgagatgcctgcttcaaaaatcgtgaggcgggtgctcaaagagatggtggcccacaactacgacaggttctccaggagtggcagcagctccgcctataccggctacatcgaaagatcgcctcgatctgcttccacatatagcttggacattctctattcaggaagtggtatactcagaagaagcaacttgaatatcttccagtacatagggaaagcaggcctgcacggctcccaggtggttattgaggctcaggggcttgaggctttaatcgccgccacccccgatgagggagaagagaatctggacagctacgctggcatgtcggctatcctctttgatgtgcaactgcgtcctgttacgttcttcaacgggtattccgatctcatgtcaaagatgctatccgccagtggagatcctatttctgtggtgaaagggcttatcttactcatagatcacagtcaggagttacagctgcagtcaggattgaaagctaatatcgaagtacagggcggcttggctatcgacatttcaggcgccatggagttctccctctggtaccgggagtccaaaacccgcgttaagaacagagtgaccgtggtgatcactacagatatcacagtcgactcctctttcgtgaaggcaggattggaaactagcacagaaacagaagccggcctggagttcatctcaacggttcaatttagccagtacccattcctggtgtgtatgcaaatggataaggatgaggctccctttagacagttcgaaaagaaatacgagcgcttgtccacgggcagaggatacgtgagtcagaaacggaaggaatcagtcctggccggttgtgagtttccactgcaccaggagaattctgagatgtgcaaggtggtgtttgccccgcagccagacagtacgtcctctggttggttt

SEQ ID NO: 5435 - DNA, 2682 bp, Artificial Sequence
  derived and/or modified sequence
atgatcttgctcgcagtgctttttctctgcttcatttcctcctactcggcctctgtcaaaggacatactaccggtttgtcactgaacaatgatcgactgtacaaactgacgtactcaaccgaggtgcttcttgatcgcggcaagggaaagctccaagattcagtgggttacagaatcagctcaaacgtggacgtggcgctcctgtggcgaaacccagacggagatgacgaccaactgattcagataacgatgaaagatgttaacgtcgagaacgtgaaccaacagcgaggcgaaaaatccattttcaaaggaaaatcaccctctaaaatcatgggaaaggaaaaccttgaggccctccaaagaccaacccttctgcatttgattcacggcaaggttaaggagttttacagctaccagaacgaggctgtggcaattgaaaacataaagcgcggtcttgcatcactgttccaaactcaactttcctcggggactactaacgaagtcgatatttcaggtaactgcaaagtgacttatcaggcgcatcaagataaagtgattaagattaaggccctggactcatgcaagattgcgagatcgggctttacgacccctaaccaggtcctcggagtgtcgtccaaggcaacctccgtgaccacctacaagattgaagattcatttgtgatcgcagtgcttgccgaggagactcataactttggcctcaacttcctgcagactattaagggtaaaatcgtgtcgaaacaaaaactggaacttaagaccaccgaggcaggacccagactgatgtcgggtaagcaagccgcagccatcataaaagccgtggactcaaagtacaccgcaataccgatcgtcggacaagtgtttcagtcgcactgtaagggatgtccatcactttcggagctttggagaagcactcggaagtaccttcaacctgacaatctttcgaaggcagaagccgtgcgaaactttcttgcctttattcagcaccttagaaccgcaaagaaggaagaaatacttcagatcttgaagatggaaaacaaagaagtccttcctcagcttgtggatgccgtcacttccgcccagacctccgactcgcttgaggcaatactggattttctcgatttcaaaagcgactcctccattatactgcaggagcgcttcctttacgcatgtggcttcgcttcacatccaaacgaagagctgctgcgcgctctgatttccaagtttaagggttcaattggctcgtcagatattagagagactgtgatgatcattaccggtaccctggtgaggaaactgtgtcagaatgaaggatgtaaactgaaggcagtggtggaagcaaagaagctgattctgggaggtcttgaaaaggcggagaaaaaggaagataccagaatgtacctgcttgcacttaagaatgctctgcttcctgaaggaatcccatcccttctgaaatacgcagaggcaggcgagggacctatctcacatctggctactaccgcactgcagcgttacgacttgccctttatcactgacgaggtcaagaaaactcttaacagaatctaccaccaaaaccggaaagttcacgaaaagacggttagaacggcggcagcggcaattatcctgaacaacaacccttcttatatggatgtaaagaacatcctcctctcaattggagaacttccacaagagatgaacaaatacatgctggctatcgtgcaggacattctccggtttgaaatgccagcgtcgaagattgtccggcgtgtcctgaaggaaatggtcgcccacaactacgacaggttttcacgtagcggtagctctagcgcatacaccgggtatattgaacggtcgccacgttcggcctccacttacagcctcgatatactgtactccggttccggaatactgagaagatcgaacctgaacattttccaatacattggtaaggcaggtctgcatggatcccaagtggtgattgaagcacagggccttgaagctctcattgcagccaccccagacgaaggggaggaaaacctggattcgtacgcaggcatgtcagcaatattgtttgatgttcagctcagaccagtaacctttttcaacggatacagcgacttgatgtccaagatgctgtcggcatcgggggatcctatttcggtggtgaaaggcctcatacttttgatagatcattcgcaggaacttcagctgcagtcaggtctgaaagccaacattgaagttcaaggtggtcttgcaatcgatatttcgggggcaatggaattttccctttggtacagagagtcaaaaactagagtgaagaaccgggtcaccgtggtcatcactaccgatattacggtggattcctcgttcgtcaaggccggtctggaaacgagcaccgagactgaggcaggtcttgaattcatcagcactgtccaattctcgcaatatccttttctggtgtgtatgcaaatggataaggatgaagcacccttccggcaatttgaaaagaagtacgagaggctttccactgggagaggatacgtgagtcaaaagagaaaggagtccgtgctcgccggatgtgaatttcctctgcatcaagagaactcggaaatgtgtaaggtggtgttcgcacctcagccggatagcactagctccggttggttc

SEQ ID NO: 5436 - DNA, 2682 bp, Artificial Sequence
  derived and/or modified sequence
atgattctgctcgctgtgctctttctgtgttttatctcctcctattcggccagcgtgaaaggtcataccacgggcctttcattgaacaatgatcggctgtacaagctcacttacagcaccgaggtcctcctggataggggcaagggtaagctgcaagactccgtcggatacaggatttcatccaatgtggacgtggccctgctctggcgtaaccccgatggagacgatgaccagttgattcagattactatgaaggatgtgaatgtcgaaaacgtgaaccagcaacgcggtgaaaagtccattttcaagggaaaatctcccagcaagataatgggcaaggaaaacctggaagccctgcaaaggccaactctgctgcatctcatccacggaaaggtgaaagagttttacagttaccagaacgaggccgtggcgattgaaaacataaagagaggtctggcgtctctgttccaaactcagctgtctagcggaaccaccaatgaagtggatatctcagggaattgtaaagttacctaccaggcacatcaagacaaagtgatcaaaatcaaggccctcgacagctgtaagatagcacgctcggggtttaccactccaaatcaagtgctgggagtctcaagcaaggcgacttcagtaactacttacaagatcgaggactcctttgtgatcgcagtccttgctgaagaaactcacaacttcggactcaacttccttcaaacgattaagggcaaaatagtgtcgaagcagaaactggaactgaaaaccaccgaagccgggccccgtctgatgtccggaaagcaagcagcagccatcataaaggcagtcgatagcaagtacaccgcaattcctatcgtcggacaagtctttcaatcgcattgcaagggctgcccatccctgagcgaactctggagaagcaccagaaagtacctgcagccagataacctttcaaaagcagaggccgtgcgaaactttctggcgtttattcaacatctgcgcaccgcgaagaaagaggaaatcctgcaaattctgaagatggagaacaaggaggttcttcctcagctcgtggacgcagtgacttctgcacagacctctgattcgttggaagcaattctcgacttccttgactttaagtcggattcatcgataatacttcaagagcgttttttgtatgcttgcggatttgcatcgcaccctaatgaggaattgctcagagcattgatctccaagtttaaggggtcgattggctcgtcagatatcagggaaactgtcatgattatcactggaacccttgtgcgcaagctctgccagaatgaaggttgtaaactgaaggcggtggtcgaagcaaagaaacttatcctcggtgggcttgaaaaggcagagaaaaaggaagatacccggatgtaccttttggctctcaaaaacgcactgttgccggagggaatcccctcgcttcttaagtacgcggaggcaggtgagggacccatttcgcacttggccacgacggccctccaaaggtacgatcttcctttcattaccgatgaagtcaaaaagacgcttaatagaatttaccatcagaatcgcaaggtccacgaaaagactgtgagaaccgcagcagcagctataatccttaacaacaatccgagctacatggacgtcaagaatatactgctttcaattggtgaactgccacaagaaatgaacaagtacatgctggccatcgtgcaggacatcctgcgcttcgaaatgccagctagcaaaatagtcagacgtgtgctcaaggagatggttgcacataactacgacaggttctcaagatcgggttcttcatcagcatacactgggtacatcgaacgcagccctcggagcgcatcgacttattcgcttgatatcttgtactccgggtccggcatcctgagacggagcaacctgaatatcttccagtacattggaaaggccggacttcatgggagccaggtggtgatagaggcacagggtcttgaggcactgattgcggccactcctgacgaaggtgaggaaaaccttgattcttacgcaggaatgtccgcgatcctgtttgatgtgcaattgcgcccagtgacctttttcaacgggtactccgatttgatgagcaaaatgctttcagcatcgggcgaccccatttcggtggtgaaaggcctgatcctgctgattgatcatagccaggaactccagttgcaatccgggcttaaggcaaacatagaagtccaaggcggcctggctatcgacatctccggagcgatggaattctccctttggtaccgggaatccaaaacccgcgtgaagaacagagtgactgtggttattactaccgatataaccgtcgattcatcatttgtaaaagctggtctggagacttctactgaaactgaggcggggctcgagttcatatcgacggtgcagttctcgcaatacccattcctggtctgtatgcaaatggataaagatgaagcgccctttagacaatttgaaaagaaatacgaacgcctttccaccggacgcggctatgtgtcgcaaaagaggaaggaatcagtgctggcgggatgcgaatttcctctccaccaggagaattcggagatgtgtaaggtggtttttgcacctcaaccagatagcacttcgtcaggatggttt

SEQ ID NO: 5437 - DNA, 2682 bp, Artificial Sequence
  derived and/or modified sequence
atgattcttctggctgtcctgtttttgtgtttcatctcatcttacagcgccagcgtgaagggacacaccactggtttgtccctcaacaacgatcggctgtacaaactgacctactcgaccgaagtcctccttgatagggggaagggtaaattgcaagatagcgtaggatacagaatatcgagcaatgtggatgtagcgcttctctggcgtaatcctgatggggatgacgaccaactcatccagataactatgaaggacgtgaatgtggaaaatgtcaaccagcagcgaggagaaaagtctatcttcaaagggaaatcgccttccaagattatgggaaaggagaacctcgaagcactgcagcgacctactcttttgcatcttatccacggaaaggtgaaggagttttactcgtaccagaatgaagcggtcgcaatagaaaacataaaacgcggtctggctagcctgttccaaacccaactctcatcaggaactaccaacgaagtggacataagcgggaactgcaaggtaacttaccaagcacaccaggataaggtgattaagattaaggcgctcgattcatgtaagattgcacgcagcggattcaccactcccaatcaggtccttggtgtgtcctcgaaagctacctcagtgaccacttacaagattgaggattcgttcgtcattgctgtcctggcggaagaaacccacaattttggccttaacttccttcaaactatcaagggaaagattgtgtccaagcagaagttggaactgaaaactaccgaggcaggacccagactgatgtctggcaagcaagcggcagcaatcatcaaagccgtggactccaagtacaccgccatacctattgtgggccaagtgtttcagtcacattgtaagggatgtccttcgttgtcggagctttggcgatccactcgcaagtacctgcagccagataatctctccaaggccgaggcggtgcggaactttttggcattcatccaacatctgaggactgcaaagaaggaagagattcttcagatcctcaagatggaaaacaaggaagtgcttccccaactggtggatgccgtgacttccgcacagacttccgattccctggaggcgattcttgattttctggatttcaagtccgattcctcgattattctccaagaaagattcctgtacgcctgcggatttgcatcccatccaaatgaagaactcctcagggcgcttattagcaagtttaagggttcaattgggtcatcggacattcgggaaactgtcatgattatcactggcacgctggtgcgcaaactttgccaaaatgaaggatgtaagctgaaggcagttgttgaagcaaagaagctgattcttggcgggcttgaaaaagcagaaaagaaggaggacacgcgaatgtacctgcttgcgctgaagaacgcactgctgccagaagggatcccaagcctgcttaagtatgcggaagcgggagaaggaccaatcagtcatctggcaaccactgcactccagcgttacgaccttccctttatcacggacgaggtgaagaaaacccttaatcggatttaccaccaaaacagaaaagtgcacgaaaaaaccgtgcgcactgcagcagcagcaattatcctcaacaacaacccctcttacatggatgtgaagaatattctgctttcgatcggtgaacttcctcaagagatgaacaagtacatgcttgccattgtgcaggacatccttcgatttgagatgcctgcctcaaagatcgtcaggcgcgtgctgaaggagatggtcgcgcataactacgatcggttctccaggtccggatcatcctcagcctacaccggctacatagagaggagcccaagatcagcatcaacctactccctggacattctttactccgggagcggaattcttaggcggtcgaacctgaatatctttcaatacataggcaaggctggactccatgggtcacaagtggtcatcgaagcccaaggtcttgaagcattgattgcagctactcccgacgaaggagaagaaaaccttgactcgtacgctggaatgtcggcgatccttttcgatgtgcaactgcgacctgtgacctttttcaatggatacagcgatctcatgagcaagatgcttagcgcgtccggtgacccgatttcagttgtgaaaggtcttatactgctgattgatcatagccaggaacttcaactgcagtcaggcctgaaggcaaatatcgaggtgcaaggaggtctggcaattgatatatcaggcgcaatggagtttagcctctggtatcgcgaatccaaaacccgtgtgaaaaacagggtgactgtggtgattactacggatataaccgtggattcgtcatttgtgaaggctgggctggaaacttcgaccgaaacggaagcaggactggagttcatttcaactgtccaattttcacagtacccatttctggtgtgtatgcaaatggataaggatgaagccccttttcgtcaatttgaaaagaagtacgagcgactctcaaccggacggggatacgtctcgcaaaaacggaaggagtcggtgttggcaggttgtgaatttccacttcaccaagagaacagcgagatgtgcaaggtggtgtttgcacctcaacctgatagcacttcatcgggttggttc

SEQ ID NO: 5438 - DNA, 2682 bp, Artificial Sequence
  derived and/or modified sequence
atgatccttctggcagtgctgttcctttgtttcatatcatcgtactcggcctccgtcaaggggcacactacgggccttagcctgaacaacgacaggctttacaagctgacttacagcactgaagtgctcctggatcggggaaaagggaagctgcaagattcggttggttaccgtatctcatcaaatgtggacgtcgcactgctgtggaggaatcctgatggggacgatgatcaactgatacagataaccatgaaagatgtgaacgtcgaaaacgttaatcagcagaggggggagaagagcatctttaaagggaagagcccgagcaagattatgggaaaggaaaatctggaagcactccagcggccaaccctgctgcatcttattcatgggaaagtcaaagaattctactcgtaccaaaatgaggcggtcgcgattgagaatatcaaacggggtttggcatccctgtttcagacccaactctcgtcggggacgactaacgaggtggacatctcaggtaattgcaaggtgacctatcaagcgcatcaggacaaggtgataaagattaaggcactggattcgtgtaagatcgcaagatcagggtttaccactcccaatcaagtgcttggtgtgtcgtccaaagcaacgtccgtcaccacgtacaagattgaagattcctttgtgattgcggtgcttgctgaggaaacccacaacttcggattgaacttccttcagactatcaaggggaaaatagtctcaaagcaaaaacttgaacttaagaccaccgaagcaggaccaaggttgatgtctggtaagcaggccgccgcgattatcaaggccgtggattcgaagtacactgctattccaattgtcggacaagtttttcaatcgcattgcaagggttgtccgagcctttcggaactttggagaagcactcgaaaatacctgcagcctgacaacctttcgaaagctgaagcagtgcgcaactttctggcatttatccaacatttgagaaccgccaagaaggaagaaattctgcagattctgaaaatggagaataaggaggtgctgccacagcttgtggatgcagtcacttccgcacaaactagcgactccctcgaagctatcctggactttcttgatttcaaatcggactcatccatcattctgcaagaaagattcctgtacgcatgtggcttcgcatcgcatccgaacgaagagttgctccgcgcactgatttcgaagtttaagggaagcattggatcgtcggatatcagagaaaccgtgatgatcataaccggtaccctcgtccggaagctctgccaaaatgagggatgtaaactgaaggcagtggtcgaagcaaagaaattgatactggggggactggagaaggcagaaaagaaggaagatactcgtatgtatttgctcgcactcaagaacgcacttctgccagagggcatcccttccttgctgaaatatgccgaggcgggtgaaggacctatatcacacctggcaactaccgcccttcaacgctacgacctcccatttatcaccgacgaggtgaagaaaacgctgaacagaatttaccaccaaaatagaaaggtgcatgaaaagactgttcgaaccgcagcagcagctattatcctgaacaacaacccttcatacatggatgtgaaaaacatcctgctctccatcggagaactccctcaagagatgaataagtacatgctggccatagtgcaggatatccttaggtttgagatgcccgcatcgaagattgtgaggcgagtgctgaaagaaatggtggctcataactacgaccgattcagccggagcgggtcgagcagcgcctacaccggatacattgaacgatcaccccggtcagcctccacctactcccttgacattctttactctggttcggggatcctccggcgcagcaaccttaacatatttcaatacataggcaaagcaggtctgcatggctcgcaagtcgtgattgaagcacagggactcgaggcacttattgcagccacccccgacgagggtgaggagaacctcgactcgtacgcaggaatgtctgcaattctttttgatgttcagctgcgcccggtgactttctttaacggttattccgatcttatgtcgaaaatgctttccgcgtccggagatccaatttcggtcgtcaaaggccttatcctgcttattgatcattcccaagagcttcaacttcaatcggggctcaaggctaacatcgaggtgcaaggtggactggcgatcgatatttctggtgcaatggagttttccctttggtaccgtgagagcaaaactcgagttaagaatagagtgactgtcgtcattactactgatataactgtggattcctcctttgtgaaagcaggccttgaaacgtcgactgaaaccgaagcgggacttgagttcatctcgaccgtgcagttctcccaatacccatttctggtgtgtatgcaaatggataaggatgaggcaccatttagacagtttgagaagaagtacgaaagactctcaactggacggggttacgtctcgcaaaagcggaaagagtctgtgttggctggctgcgaatttcccctccaccaagaaaattccgaaatgtgtaaggtcgtgttcgctccccagccagattcgacgtcgtccggatggttc

SEQ ID NO: 5439 - DNA, 2682 bp, Artificial Sequence
  derived and/or modified sequence
atgatccttctggccgttctgttcttgtgctttattagcagttattccgcctccgtgaagggccacaccaccgggctttcgcttaacaatgatagactgtacaagctgacatattccactgaagtcctgctggaccgcggtaaaggcaagttacaagatagcgtaggataccggataagttcaaacgtggacgtggcactcctatggcgcaatccagatggcgacgacgatcaattgattcagatcaccatgaaggacgtgaatgttgagaatgttaaccagcagcgcggtgaaaaatctatattcaaggggaagagtccaagtaaaattatgggaaaggagaatctggaagctcttcagcggcccaccctgctccatttaattcatgggaaagtgaaagaattctattcatatcagaatgaggccgttgctatcgaaaacattaaaagggggctggcgtcgctcttccaaacacaactgtcatccggcacaaccaatgaggttgacattagcggcaactgtaaggtcacgtaccaggcacaccaagacaaggtcattaagatcaaagcattggacagctgtaagattgctaggtcaggatttactacgcctaatcaggtgctcggggttagtagcaaggctacatctgtcaccacatacaagattgaggactctttcgtgatcgctgttctcgcggaagagactcacaactttggtttgaactttttgcagaccatcaaggggaaaatcgtgtctaaacagaagctggagcttaagacaactgaagcgggaccacggcttatgagcggaaagcaagcagccgctattataaaggctgtagatagcaagtatactgcaattcccatcgtggggcaagtcttccagtcccattgtaagggctgtccatcccttagcgagctgtggcgctcaacacgcaagtatctccaacccgataacctttcgaaggcagaggcagtgaggaatttcttagcttttatccaacacctgagaacagccaagaaagaggaaatcctacaaattcttaagatggaaaataaagaggtcttaccccagctggttgatgccgtcacctcagctcaaacctccgattcgttagaggccatacttgatttcctggactttaaatctgattccagcataatcctgcaagagcgcttcttgtacgcgtgcggattcgccagtcatccgaatgaagagttgctgcgcgccttgatcagcaaatttaaaggctctattggctcctctgacattagagagacagtgatgattattacaggtaccctggttcgaaagctttgccagaacgaaggctgcaaactgaaagcagtcgtggaagccaagaagctaattcttgggggtctggaaaaagcagagaaaaaggaggatacacggatgtatctgctagcactcaaaaacgcactgctaccggaaggcatacctagcttgctcaagtatgccgaagccggcgagggccccatatcgcatctggccactactgcccttcagcgctacgatctcccatttatcacagacgaggtcaaaaagaccctcaacagaatctatcatcaaaatcggaaagtgcacgaaaagaccgtgcgcactgcagcggctgctataatcttgaataataacccaagttacatggatgttaaaaatattttactgtccatcggtgaattgcctcaagagatgaataaatacatgctggcgatcgtccaggatatccttagatttgagatgcccgcctccaaaatcgtccggagagttctcaaggaaatggtcgcccacaactacgacagattttctcgctctggctcatcaagtgcgtacacaggatacattgaacgcagtccgcgcagtgcttctacatactctcttgatatactgtattccggaagcggaatcctgcggagaagcaacctaaacatttttcagtatatcggcaaggctggcctacacggtagccaggtggtgattgaggcccagggccttgaggcactcattgccgcaacccccgatgaaggcgaggaaaatctggattcttatgccggcatgtctgcaatcttgttcgatgtgcagttgcggcctgtgacttttttcaatgggtatagtgacttgatgtccaaaatgctctccgcttcaggcgaccctataagcgtggtgaaggggctaatactgctgattgaccatagccaggagttgcagttgcaaagtgggctgaaggcaaacatcgaggttcaaggaggccttgccatcgacattagcggggcaatggagttcagtctttggtatagagaaagcaagacacgtgtgaaaaaccgagtcacggtagtgataaccacagatatcaccgttgacagtagttttgtgaaggctggattggaaacatcaaccgaaactgaagccggcctcgagtttataagcacagtccagtttagtcagtacccctttttagtgtgtatgcaaatggacaaagatgaggctccgttcagacagttcgagaaaaagtacgagcgactgtccacgggacgcggatacgtgtcccaaaagcgcaaagagagtgttctggccggctgcgagttcccactgcatcaggagaactcggagatgtgtaaggtagttttcgcaccccagcctgactccacatcgagcgggtggttt

SEQ ID NO: 5440 - DNA, 2682 bp, Artificial Sequence
  derived and/or modified sequence
atgattcttcttgctgttctgtttctgtgttttatcagcagttattccgcctcagtgaaaggacacactaccggcttatccctgaataatgacagactgtacaaactcacctacagcaccgaagtgctcctcgaccgggggaagggaaagctccaggatagcgtcggctaccgcatttccagcaatgtcgacgtggccctgttatggcgaaacccggacggcgacgacgaccagttgatacagattactatgaaagacgtgaatgtcgagaacgtgaaccaacagaggggcgaaaagtccatcttcaaggggaagtctccttccaagatcatgggcaaagaaaatctggaagccctacagagacccaccttactacatttaattcatggtaaagtgaaagaattttatagctatcagaatgaggcggtcgcgatcgaaaacattaaaagaggtctggcttcgctcttccaaacccagctgagctccggtactactaatgaggtagatatttctgggaattgcaaggtaacatatcaagctcaccaggataaagtcatcaagattaaagctctcgattcctgcaagatcgccagatcagggtttaccacccctaaccaagtgctgggtgtgtcttctaaagcaacaagcgtaaccacctacaagattgaggattcttttgtgatagccgttctggccgaagaaacccacaacttcggcctcaacttcttgcaaacgattaaaggcaagattgtcagcaagcagaagctggagcttaagacgacagaggcgggcccccgtttaatgtctggcaagcaggccgctgcgattattaaggccgtggattccaagtacaccgccatacccattgttgggcaggtgttccagtcacactgtaagggatgtccatcactctcggaactgtggcggtcaacgagaaaatatctgcagcccgataacttgtccaaagccgaagctgtgagaaattttttggcctttatccagcacttgcgcactgcaaaaaaagaagagattctccagatattgaaaatggagaataaagaggtgctgccgcagcttgtggacgctgttacctcagctcagacaagcgacagcctggaagctattctggacttcttagatttcaagtcagattcctccatcattctgcaggaaagattcttgtatgcctgcggtttcgccagtcaccctaacgaagaactcctgcgtgccctgatctcaaagtttaaagggtctattgggtcttctgatatcagagagacagtcatgataattacaggcactcttgtgagaaagttatgccaaaatgagggctgcaaactaaaggccgtggttgaagcgaagaagctgattctgggaggtctggaaaaagcagagaagaaggaagacacccggatgtaccttcttgctttgaagaacgcacttctacccgaggggataccctccctgctcaagtacgcggaagccggggaaggtcccataagtcacctggccacaacagcccttcagagatacgacctcccattcatcactgacgaagtgaagaaaaccctcaatcggatttatcaccagaacaggaaggtgcacgaaaagacagtgcgtacagctgcggctgcaatcattcttaacaataacccaagctacatggatgtgaaaaatattctgctttccataggagagctgcctcaggagatgaacaagtatatgttggctatcgtacaggacattctgaggttcgagatgccagcctccaagatagtgcgacgagtattgaaggagatggtggcccacaactatgacagattctcacggtcagggagcagctcagcctatactgggtatatcgagcgctctccacggtcagcatcaacatattctctggacatactgtacagtggctccggcatcttaaggcggtccaacctaaatatctttcagtatattgggaaagccgggttacacggaagccaagtggtcattgaggcccaggggctggaggcactcatcgctgcaactcctgatgagggggaggaaaacctggatagctatgctggaatgtctgccatcctattcgacgttcagctgagaccagtgaccttttttaacggttatagcgacctgatgtcaaagatgctgtcagcctccggtgatcctatctctgtggttaaagggctgattctcctaatcgaccacagccaggaacttcagctgcagagtggccttaaagccaacattgaggtgcagggcgggcttgcaatagatatttctggagccatggagttttccctgtggtatagggagtccaaaacaagagtgaagaatagagtgacagttgtcataacaaccgacatcaccgtggactcttcctttgtgaaagccggtctcgagaccagcaccgagacggaagcaggcctggagtttataagcactgtccagttttcacagtatccgttcttagtttgcatgcaaatggataaggacgaagccccgttccggcagttcgagaagaagtacgaacgtctaagcacaggccggggatatgtttctcagaagcggaaggaatcagtgctggccggatgtgaattccctctccaccaggaaaatagcgagatgtgcaaggttgtctttgcccctcagcctgattctacatcgtccggttggttc

SEQ ID NO: 5441 - DNA, 2682 bp, Artificial Sequence
  derived and/or modified sequence
atgattctcttagccgtcttgtttctgtgttttatatccagttacagcgcctccgtaaaagggcatacaaccggcttgagcttaaataacgatcgcctgtataagttaacctattcaactgaagtgcttttggacagaggaaaagggaagctgcaagatagtgtcggctatagaatctcttctaacgtcgatgtggccctgctctggaggaaccctgacggagacgatgaccagctcattcaaataacaatgaaagatgtgaacgttgagaacgtgaaccaacagagaggtgaaaaatccatcttcaaaggaaaaagccctagcaagattatggggaaagagaacttggaggccctgcaacggcctaccctattgcaccttatccacggcaaggtcaaagagttttacagttatcagaacgaggcggtagccatagaaaacattaagagggggttggcaagtttgtttcagactcagctctcatcaggaacaacaaatgaggtggacattagtggaaattgcaaggtgacttatcaagctcaccaggataaggtcatcaaaattaaagccttagactcctgcaagatcgcgcggtctggcttcactacccctaaccaagtcctgggggtctcctctaaagcgacctctgttacaacgtacaagatcgaggatagcttcgtcatcgctgtgctggctgaggagactcacaacttcggtctgaacttccttcagaccatcaaagggaaaatcgtctctaagcagaaattagagctgaagacaacagaagctggacctcgcttgatgtccgggaagcaggcggctgctatcatcaaggcggtggactcgaaatacacggccatacccatcgtcggccaagttttccagtctcattgtaaaggatgtcctagcctctctgagttatggaggagcactaggaagtacctacagcccgataatctgagcaaagccgaagccgtgagaaactttttggcattcattcagcacctgcgtaccgcaaagaaggaggaaatcttgcagatcctgaagatggaaaataaggaggtgttgccccagctggtggatgcggttacatctgcgcagacatccgactccctggaggccatcctggacttcctagacttcaagagcgatagctcaatcatcctgcaggagcggtttctctatgcatgtgggtttgcatctcacccaaacgaagagcttctgagggctctcatatccaagtttaagggcagcattgggagtagcgatattagggaaactgtcatgatcattactggtactctggttaggaaactgtgccaaaacgaggggtgtaagttgaaggccgttgtggaggctaagaagctgattttaggcggactagaaaaggctgaaaagaaggaggacactcgcatgtatctgttagcacttaaaaacgcactgttgccagaaggcatccccagtttgctgaagtacgccgaggccggggagggccctatttcccacctggccacaaccgcactgcagcgctacgaccttccgttcatcaccgatgaagtgaagaagactcttaacaggatttaccaccagaaccgtaaggttcatgaaaagactgtgcggacagccgccgccgcaatcatactgaataacaatccaagctatatggacgtcaagaacattctgctgagtatcggagagctgccacaagaaatgaacaaatacatgcttgccatcgtgcaggacatcctgagattcgagatgcccgcatccaagatcgtccgcagggtgttgaaagaaatggtcgctcacaactacgacagattcagtcgctctggatcttcctctgcgtacaccggctatatcgaaaggtcgccgcgcagcgcgtccacatattccctggatatcttatattctggttcaggtattcttcggcgatccaatctgaacatcttccagtatatcggcaaagctggactccacggcagccaggtggtgatcgaggcccaggggctcgaagctctaatcgccgctacacccgacgagggagaggagaacctggacagctacgcgggtatgtccgcaattctctttgacgtgcagttgcgacccgtcacctttttcaacgggtactcagacctgatgagtaagatgctgtcagctagtggcgatcctatttccgtcgtgaaagggctcatcttgttgatcgatcattcgcaggaactgcagttgcagtctggcctgaaggccaacatcgaagtgcagggcgggctggcaatcgatattagcggcgctatggagttttccttgtggtaccgcgagtccaagaccagggtcaagaacagagtaaccgtagtgattacaaccgatattacagtcgactccagtttcgtgaaggctggcctggagaccagcacagaaacagaagccggcttggaatttatatccacagtccaattttcccagtatcctttcctggtgtgtatgcaaatggataaggacgaagcaccgtttagacagttcgaaaaaaaatatgagcgtttgtctactgggcgtggttacgtgtcacagaagcgaaaggagtctgtgttggcaggatgtgaattcccgctgcaccaagaaaacagtgaaatgtgtaaagtcgttttcgctcctcagccagactccacttcctccggatggttc

SEQ ID NO: 5442 - DNA, 2682 bp, Artificial Sequence
  derived and/or modified sequence
atgattctgctggccgtcctgttcctgtgctttatctctagctactctgccagcgttaagggccacacaactgggctatctttaaataatgatcgcctttacaagcttacttatagcacagaggtccttctggaccgaggtaaaggtaaattgcaagacagcgtgggctataggatcagctctaatgtggacgtcgccttgttatggagaaaccccgacggcgacgacgaccagctgattcagattacaatgaaagatgtcaacgtggagaacgtgaaccaacagagaggggaaaaatccattttcaagggcaaaagccctagcaaaatcatgggtaaagaaaatctagaagctcttcagcgacctacattgcttcatctcattcatggaaaagtgaaagagttctatagctaccagaatgaggccgttgctatcgaaaatatcaagcgaggtcttgccagtctgttccagactcagttgtcgagtgggacaacaaatgaagtcgacatttcagggaactgtaaggtcacctaccaggcccatcaagataaagttatcaagattaaggctctcgacagttgcaagatcgcaagatcaggtttcactaccccaaaccaagtcctgggcgtctctagtaaggccactagcgtaacaacttataagatagaagactctttcgtcatcgccgtgcttgcggaggagactcataattttggactcaattttttacagacaatcaagggaaagatcgtttcaaaacagaaactggagcttaagacgacggaagctggaccccgtttgatgtccggcaagcaggcggccgcaatcatcaaagccgtggatagcaagtacacagcaattccaatcgttggccaggttttccagagccactgtaaaggctgccccagcctttccgagttgtggcgttccacaagaaaatacctgcagcctgacaacttgtcaaaagccgaggccgtcaggaactttctcgcattcatacaacacttgcggacggcaaagaaggaggagattttgcagatattgaagatggagaacaaagaagtcctgccacagctggtcgacgctgtgacatcggcccaaacctctgattccctcgaagcaatactcgactttctggacttcaagagcgactctagcattatacttcaggaaagattcctgtatgcctgcggattcgcttcccatcctaatgaagagctgctacgggcactgatctctaaattcaagggctcaatcgggtctagcgacattagggagaccgtcatgatcataactggcacgttggtacggaaactgtgtcagaatgaggggtgtaagcttaaagctgtcgtcgaggcaaagaagctcatcctcggagggctcgaaaaagctgagaagaaggaggatacccggatgtaccttcttgccctgaagaacgccctgctacccgagggcatcccctcactgctcaaatacgccgaggctggtgagggacctatctcgcacttggcgactaccgctctgcagcggtacgatcttcctttcatcactgacgaagttaaaaagacactgaaccgaatctaccaccagaacaggaaagtacacgagaaaaccgtgcgcaccgccgcagctgccatcatcctcaacaataatccctcctatatggatgttaagaacattctgttgtctattggtgagctccctcaggaaatgaataaatacatgcttgccattgtgcaggacatcctgcgttttgagatgcccgcaagtaaaattgtcagaagggtcctgaaggagatggtcgcccacaactacgataggtttagcaggtcaggctccagctctgcctataccgggtacattgagcgttcccctaggagcgcctcaacttactcactcgatatcctttactctggcagcgggatactgagacgaagcaatctaaacatcttccagtatatcggcaaagcaggcctgcatggcagccaggttgtgatcgaagcgcagggactcgaagcgctcattgcagctacacccgatgagggcgaagaaaacttggattcgtacgctggcatgagcgccatcctcttcgacgtccagctcaggcctgtgacgttcttcaacgggtactctgatctcatgtcaaaaatgttgtccgcatcaggtgatccgattagcgtcgtcaaggggctcatcctattaatcgatcacagccaggaattgcagctgcagagcggcttgaaggccaacatcgaggtgcagggcggactcgctattgatattagcggagctatggaattctccctgtggtacagagagtcaaaaacgagagtcaagaatagagtgactgttgtgataactacagacatcactgtggactcatcgttcgtgaaagctggcctcgaaacgtccactgaaactgaggcaggcctagaatttatatccacagtccagtttagtcagtatccctttctggtgtgcatgcagatggataaagatgaagccccatttaggcagttcgaaaagaagtacgagcggctctccacagggcggggatacgtgtcccagaagcgcaaggagagcgtgctagccggctgcgagttccccctgcaccaggagaacagcgagatgtgcaaggtggtctttgcacctcaaccagattctacatctagtgggtggttt

SEQ ID NO: 5443 - DNA, 2682 bp, Artificial Sequence
  derived and/or modified sequence
atgatcttattagcagtgctcttcttatgcttcatcagtagctacagcgcaagcgttaaaggacacactacaggactgagtttgaacaatgatcgcctttataagctgacgtatagtactgaagtcttactcgaccgaggcaaaggcaaactccaagatagcgttgggtaccggatctcctccaacgtggatgtggccttgctctggcgtaaccctgatggtgatgatgaccagcttatccagatcaccatgaaagacgttaatgttgagaacgttaatcagcaaagaggcgagaagtccattttcaagggtaaatcccccagcaagatcatgggcaaggagaacctggaagctctgcaaaggcccactctgcttcatttgatccacggaaaagttaaggaattttattcttaccaaaacgaggccgttgcgattgaaaacattaaacggggcctggcttctttattccagactcaactgagctccggtacaaccaatgaggtggatatttctggaaattgcaaggtcacgtaccaagcccatcaggacaaggtgatcaaaatcaaagccctcgatagctgtaagatcgcgagatccggcttcacaacgccaaaccaggtgttgggggtctccagtaaagcgacaagcgtgaccacttacaagatcgaagactcattcgtaatagctgtgctggccgaggagacccacaacttcggcctgaacttccttcagacgataaagggtaaaattgtcagcaagcagaaacttgagctgaagaccacggaggccggccctcggttaatgtccggaaaacaggccgctgcgatcatcaaagccgttgacagcaaatacaccgcgattcctatcgtgggacaggtgttccaaagccattgtaagggatgcccgagcctctcggaactttggcgaagcaccagaaagtacctgcagcctgacaacttgtccaaggccgaggcagtccgaaacttcttggcctttattcaacatttgcgcactgccaaaaaagaagagatcctccagatcctgaagatggagaacaaagaagttttacctcagttagtcgatgccgtcacatcagcccagacatcggactcactggaggctattctggactttctggactttaaatctgattcatcaattattctgcaagagcgttttctctacgcctgcggattcgcttcccaccccaatgaggaactgttgcgggccttaattagcaaattcaaaggttctattggctcaagcgacatcagggagacagttatgattattacaggtacactcgttcgaaagctgtgtcagaacgaggggtgtaagctgaaagcagttgtagaggctaaaaaactgatcctaggcggacttgagaaggctgaaaagaaagaggatacccgaatgtatctgctcgcccttaagaacgccctgctgcctgaagggattccatcccttcttaaatacgccgaggccggcgagggtcccatctctcacctggcaacaacggctctgcagagatacgacctgccattcattactgacgaagttaagaaaactctgaacaggatatatcatcaaaacaggaaggtccacgagaagaccgtccggacagccgccgctgcgataatactgaataacaacccctcatacatggatgtcaagaacatcctgctgtcgatcggcgaactgccgcaggagatgaataagtacatgctggctatagttcaggacatccttcggtttgagatgccagctagcaagatagtgcggcgagtgctgaaggaaatggtggcacataattacgaccgctttagtcgctcagggagctcgtctgcctacaccggatatatagagagatctcccaggagcgcatcaacgtatagccttgacatcctgtattctggcagcggcatcttacggcgctcaaacttgaatatatttcaatacatcggaaaggcaggcctccacggttctcaggtggtgatagaagcgcagggattagaggccctgatcgcagccaccccagatgagggagaggaaaacctggacagctatgctggcatgagtgctattcttttcgatgtgcagcttcgacccgttacattttttaacggttacagcgacctgatgagtaagatgctgagtgccagcggggatcccatctctgttgtgaagggccttattcttctcattgatcatagccaggaactgcaattgcagtcagggttgaaagctaacatagaagttcagggcgggcttgctatcgacataagtggcgcgatggagttcagcctttggtacagggagtccaagacccgggtgaaaaatcgggtcaccgtggtgattacaacagacataacagtggattctagcttcgtgaaggccggtttggagacttcaaccgaaaccgaggctggccttgagtttatctctacggtccagttctcacagtacccattcctcgtctgcatgcagatggacaaagacgaggccccatttcgccagtttgagaagaaatacgagcggctgtctacaggacgtggctacgtttctcagaagagaaaggagtcggtgctagccgggtgcgagtttcctctacatcaagagaattcggaaatgtgcaaggtagtatttgccccacagcccgactccacatcaagcggctggttt

SEQ ID NO: 5444 - DNA, 2682 bp, Artificial Sequence
  derived and/or modified sequence
atgatacttctggctgtactgtttctgtgtttcatatcctcctactctgccagcgtgaagggccataccacaggcctgtccctgaataacgacagattgtataagttgacctactccacagaggtcctgctggatagagggaaaggaaagctccaagattcagtcggctaccggattagctccaacgtggatgttgccctgctgtggaggaatcccgatggcgacgacgaccagctgattcaaattactatgaaagacgtaaacgtggagaacgtgaatcagcagcgaggtgaaaagagcatcttcaaaggtaaatctccctcaaaaatcatgggtaaggagaatctggaagccttgcaacgaccaactctacttcacctgattcacggcaaggtgaaggagttctatagctatcagaatgaggccgtggcgatagaaaatatcaagcgaggtctcgcctctctttttcagacgcagctcagtagtggaaccacgaatgaggtcgacatttccggaaattgcaaggtgacctatcaggcccaccaagataaagtgatcaagattaaagcgcttgattcttgtaaaatcgctcgtagtggctttaccacaccgaatcaggtgctgggggtaagctcaaaagctacctccgtaaccacctacaaaatagaggatagctttgtcatcgctgtactggcagaggaaacacataatttcggtctgaatttcctccagactatcaaggggaagatagtctccaagcagaagttggagcttaagaccacagaggccggccctcgactaatgagcggcaaacaggcagctgccatcatcaaggcggttgactctaaatacacggccatccctatagtgggccaggtcttccagagccattgcaagggctgcccatcattgtcagagctctggcggagcactcgtaagtatctccaacctgataatctttcaaaagcggaagcagtgaggaattttttggctttcatccagcatctccgcactgccaaaaaagaggagatattacagattctgaaaatggaaaacaaagaggtgctgccgcaactagtggacgccgtgaccagtgcccagacaagcgattctttggaggcgatcttggattttctggactttaagagcgactcatccatcatactgcaggagaggttcttgtatgcgtgcggattcgcttcgcatcctaatgaggagcttctccgcgccctcatttcaaagttcaaggggagcatcggatccagcgacatccgcgaaaccgtcatgatcattaccggtacactagtgcgtaaactttgtcagaacgaggggtgcaagttaaaagcagtggtggaagctaagaagttaattctgggcggactggagaaggccgaaaagaaggaggacacaagaatgtatctgctggctctgaaaaatgcattactccctgagggtatccccagtttgcttaagtatgccgaagccggtgagggccccatctctcatctggccaccaccgccttacagaggtacgatctgcccttcatcaccgatgaagtgaagaaaacattaaatagaatctatcaccagaacaggaaagtccacgaaaaaactgtgaggactgccgccgcggctataatactaaataacaatccatcgtacatggacgtgaaaaatatcttactgtcaatcggcgagctgccccaggagatgaacaaatatatgcttgccattgttcaggacatactccggtttgagatgcctgcgtcaaaaatcgtcaggcgcgttttgaaggagatggtggctcacaactacgaccgcttcagtcggtcaggctcatcctccgcctataccgggtacattgagaggtcccctcgctccgcgtctacttactcattggacattctatactcggggagtggcattcttcgtaggtccaacctgaacatttttcagtatataggaaaggccgggctccatgggtctcaggtggtgattgaagcacagggtctggaggccctgatcgccgccacacccgacgagggggaagaaaaccttgattcctacgctgggatgtctgccatactatttgacgttcagttgcgccctgtcaccttcttcaacggatacagcgacctgatgagcaagatgctgtctgcgtctggcgaccctatcagcgtggtgaaagggctcattctactgatcgatcattcgcaagagcttcagctgcagtctggactcaaggctaatatcgaagtgcagggggggttagccattgatatttcaggcgctatggagttcagtctttggtaccgcgaaagtaagaccagagtcaagaatagggttactgtggtgattaccacggacatcaccgtggattccagcttcgtcaaggctggactggagacatccactgaaaccgaggccggtttggagtttatatctacggtgcagtttagccagtacccatttctggtgtgcatgcaaatggataaagacgaggctccctttagacagtttgagaaaaaatacgaacggttgagtactggacgaggatacgttagccaaaagcggaaggaaagcgtgctggccggttgtgagttccctctgcaccaggaaaactcagaaatgtgcaaagtagtattcgctcctcagccagacagcacttcatccggatggttc

SEQ ID NO: 5445 - DNA, 2682 bp, Artificial Sequence
  derived and/or modified sequence
atgattctgctcgcggtgctgtttctttgcttcatctcctcatacagcgcctcagtgaaaggacataccaccggactgtcactaaataatgatagactctacaagctgacatactcaacagaggtgctgctggatcggggcaaagggaaactgcaagactcagtcgggtatcgcatctcgagtaatgttgatgtggctcttctttggagaaatcccgatggcgatgacgatcaactgatacagattacaatgaaggacgtaaacgtggaaaacgtaaaccagcagcgcggggaaaaaagtatcttcaagggaaaaagcccttcaaaaatcatgggtaaggagaatcttgaggcattgcagcggcccaccctcctccacctaattcatggtaaggtgaaagaattctactcctatcagaacgaggccgtcgccatcgaaaacatcaagcgtggactggcctctctgtttcagactcagctctcgtccgggacaaccaatgaggtggacatttccggaaactgtaaagtgacttaccaggcccaccaggacaaagttataaagattaaggccctggattcttgtaagatcgcgagatcagggttcacgactcccaaccaggtgctcggcgtgtcttctaaagctacgagcgtgacgacatataaaattgaggatagctttgtgatcgcagtcttggcggaggaaacccacaattttggcctcaactttctgcagactatcaaagggaagatcgtcagcaagcagaagctcgaacttaagaccacagaggcaggccctaggcttatgtctggcaagcaggcagctgctattatcaaggctgtggactctaagtacacggccattcccatcgtcggacaagtattccagtcacactgcaaggggtgtcccagcctgtccgagctgtggagaagtacccgcaagtatttacaaccagataatctgagcaaagccgaagccgttcgaaattttctggcttttatacagcatctgcggactgctaagaaggaagaaatcctccaaatacttaagatggaaaataaggaggttctcccccagctggtcgacgctgtaacttcggcgcagacaagtgatagtctcgaggctatcctcgatttcctcgatttcaagtcagactcttccatcatccttcaagaaaggttcctgtacgcgtgcgggttcgcatctcatccaaacgaggagttgctccgggcacttattagcaagttcaagggtagcattggatcgtcagatattcgtgagactgtcatgatcattacaggcacacttgtgaggaagctgtgccagaatgaggggtgtaagctgaaggccgtggtagaagcgaagaagcttattctgggaggcctggaaaaagcggagaagaaggaggatacacgtatgtacctactggcgctcaagaacgcgcttctgccagagggaatcccttcactgctaaagtacgctgaggctggcgagggccccatttcccacttggccaccaccgctcttcagcggtacgatcttccattcattactgatgaggtgaaaaaaacccttaaccgcatctatcatcagaacagaaaggtccacgagaagacagtgcgcaccgcagccgctgccattatattaaacaacaaccctagctacatggacgtcaagaatatcctcctgagtattggagaactgccacaggaaatgaacaaatatatgctggctattgtgcaggacattctccgatttgaaatgccagcgtcgaaaatcgtccggagagtgctcaaggagatggtggcacacaactacgatcgtttttctcgttctgggagctcttccgcctataccggctacattgaaaggtcccctaggtcagcgtccacgtattctcttgacatattgtactctggcagtggcattcttcgcaggtctaacctcaatatttttcagtatataggtaaagccgggcttcatggatcccaggtggtgatcgaagcacaaggtctggaagcgctgattgcagcaactcccgatgagggagaggaaaatctggatagctacgctggcatgtccgccattttattcgatgtgcagctgcggcctgtgaccttctttaacggctactctgatctcatgagtaagatgctgtcagcgtctggcgaccctatcagcgtcgtcaagggactcatcctcctgatcgatcattctcaggagctgcagctgcagtccggcctgaaggccaatattgaggttcagggaggtctggccatcgatatctccggcgccatggaattcagcctgtggtatcgagagagcaagaccagggttaagaacagggtcaccgtggtaattaccaccgatattaccgtggactcctcctttgtcaaagcagggttggaaactagcacagagacggaggcagggcttgaatttatttcgaccgtacagttcagtcagtacccttttctggtgtgcatgcagatggataaagatgaggcccctttccgacagttcgaaaaaaagtacgaacggctttcaacgggtagaggttacgtgagccagaaaagaaaggaatccgtgctcgcggggtgtgagttccccctgcaccaggaaaacagcgaaatgtgcaaggtggtctttgctccccagcccgatagtactagttccgggtggttt

SEQ ID NO: 5446 - DNA, 2682 bp, Artificial Sequence
  derived and/or modified sequence
atgattcttttagccgtgttgtttttgtgcttcataagctcatactccgcttctgttaaaggacacacgactggactatcattgaacaacgataggttgtataagttgacttattccaccgaagttcttcttgatagaggcaaagggaaacttcaagactcagtaggttatcggatctctagtaatgtggacgtagctctcctttggaggaatccggatggagatgacgatcaacttattcagataacgatgaaggacgttaatgtagagaacgtgaatcagcagcgtggtgagaagtcgattttcaaggggaagtcccctagtaagatcatgggtaaggagaatcttgaggcactccaaagacctactttacttcaccttatacacggaaaagtgaaagaattttattcgtatcagaacgaagctgtagccatcgagaatatcaagaggggactagctagcttatttcaaacccaattatctagtggtactacaaatgaagttgatatttccgggaattgcaaggttacgtaccaggcgcaccaagataaggttatcaagataaaggctcttgattcctgtaaaatcgctagatctggatttactacccccaatcaagtcctcggggtttcatcaaaggccaccagtgttactacgtataaaattgaggattcatttgtgatcgcagtcctcgcggaagaaacacacaactttggtttgaacttcttgcaaactatcaagggaaaaatcgtgagtaagcaaaagttggaactcaaaaccactgaggcaggtccacgtctcatgtctggcaagcaggctgcggctattattaaagctgtggattccaaatatacagcaatcccgatcgttggacaggtattccaatctcattgcaaggggtgcccgagcttgtccgaactttggcggtcaacacgtaagtatctgcaaccagataatctttccaaagccgaagcggtcagaaattttttggcatttattcagcaccttcgtactgctaagaaggaagagattctgcagatacttaaaatggagaacaaagaagttctgcctcagcttgtggacgctgtgacctccgcccaaactagtgatagccttgaggcgatactcgattttttggatttcaaatctgattcctcgattattctacaagagcggttcctttatgcttgcggatttgctagtcatccaaacgaagagttgctgagggctctaatttccaagttcaagggttctataggctccagcgatattagagagactgttatgattatcacgggcactttggtgcgtaaactttgccaaaacgagggatgtaaactaaaggcggtcgtggaggcaaagaagttgattctgggtggtcttgaaaaggccgagaagaaagaagatactcggatgtatctactggctctaaagaacgcgctgttgcccgaaggaattccaagtttgcttaagtatgcagaggcaggggagggtccaatttcccatcttgcaaccaccgcactccaacgctatgatcttcccttcatcacggatgaagtgaagaaaaccttgaatcgaatttatcatcagaaccgaaaggtccatgagaagactgttaggactgccgccgctgccattatcctgaacaataacccgagctatatggatgttaaaaacatccttttgtctataggggaactccctcaagaaatgaataaatacatgttggccattgtgcaagatattttgcgatttgaaatgccagcctcgaaaattgtgaggcgagttctcaaggagatggttgcacataattacgacagattttctcgaagcgggtcttccagtgcctatactggttatattgagaggagcccaaggtctgctagtacatactcattggatatcctctattcaggttcaggcattctgcgaagatcaaatcttaacatttttcaatacattggaaaggctggattgcatggatctcaagtagttatcgaggctcaggggttggaagctttaattgctgctactccagatgaaggggaggagaacctagattcctatgctggaatgagcgcaatactgttcgatgttcagctcaggccagttaccttctttaacggctactcagacctgatgtctaagatgttgtcagcttccggtgatcctataagtgttgtaaaaggcctgattcttttgattgatcattcacaggaattacaactgcaatcagggcttaaggctaacatcgaggttcaagggggacttgctatcgatatttcaggtgctatggagttctcgctctggtacagagaatcaaaaactcgcgtgaaaaacagggtgactgtggttatcacaacggatataaccgttgatagctcctttgttaaggccggactggaaacatctacagaaacagaggctggcttggaattcatctctacagttcaatttagtcagtacccttttttggtctgcatgcaaatggacaaggacgaggctccttttaggcaatttgagaaaaagtacgagagattatctaccggaaggggatacgttagtcagaagcgaaaggaaagtgttctcgctggatgtgaattccctctgcatcaagagaactctgagatgtgcaaggttgttttcgctccacagcctgatagtacctcatcgggctggttt

SEQ ID NO: 5447 - DNA, 2682 bp, Artificial Sequence
  derived and/or modified sequence
atgattttattggctgtcctcttcctctgtttcatttcctcctactcggcatccgtgaagggacatacgacagggctttctctgaacaacgacaggttatacaaacttacttactccaccgaggtgctgttggaccgaggcaaagggaaacttcaggacagtgtgggatatagaatcagctcaaacgtcgacgttgctctcctatggagaaatcccgatggtgacgatgatcaacttatccaaataacgatgaaggatgtgaacgtggagaatgtgaatcagcaacgaggggagaagtctatctttaaggggaagtcaccatcaaaaataatggggaaagaaaatttggaagccctccagaggccaactcttctgcaccttatccatggaaaggtgaaggaattctacagctatcagaacgaagctgttgcaattgagaatattaagcgtggactggcttctctgtttcagacgcagctgtcgtctggtacaaccaatgaggtcgacatctcagggaactgcaaggtgacctaccaggctcaccaggataaggtaattaaaatcaaggctttggactcctgcaagatcgctagaagtggattcaccacacctaaccaagtgctcggcgtatcatctaaagctacaagcgtgacaacctataagatcgaagactccttcgtcattgctgtcctggctgaagaaacccacaacttcggactcaatttcttgcaaactatcaagggcaagatcgtgtccaaacagaagctcgagctcaagaccaccgaagccggtcctagactcatgtccggcaagcaggctgccgccataataaaagccgttgactcgaaatacactgccatccccattgtgggacaggtcttccaatctcactgcaaggggtgtccttcactgagcgagttgtggcgcagcacccgcaagtatctccagcccgataaccttagcaaagctgaagccgtgaggaattttcttgcttttatacagcacctccggaccgcaaaaaaggaagagattctgcagattctgaagatggagaacaaggaagtactcccacaactggtcgacgcggtgaccagtgcgcagactagtgactcacttgaggcaatcctagacttccttgatttcaagagcgactcttcaataatactgcaggagagattcctatacgcatgcggattcgccagtcacccgaatgaggagctactccgggcgcttatctccaagttcaaaggaagcatcggaagctcagatatcagagaaactgttatgatcatcacaggcactcttgtaagaaaactttgccagaacgaggggtgcaagctgaaagccgtggtggaggccaaaaaactcattttaggcggcctagaaaaagctgaaaagaaggaggacacccgaatgtacctgttggccttgaagaacgccttgctccccgaaggaatccctagccttctgaaatacgccgaagccggtgaaggtcccatttcgcatctcgcgactacagccctgcagagatatgatttgcctttcattacagatgaggttaagaagacattgaacaggatctatcaccagaaccgaaaagtgcatgaaaagaccgtgcggacagctgcagccgcgattatcttaaataacaatccctcttatatggatgtgaaaaatatcctcctctctataggcgagctgcctcaagaaatgaataaatacatgctagcgatcgtgcaggatattttgagattcgagatgcccgcaagtaagattgttcgtcgcgtgctgaaagagatggtcgctcacaattatgaccgcttttcgcggtccggcagctcctctgcctacacagggtatatagagaggagtcctaggtctgcttccacttactcactagacattctatactccggtagcgggattttgcgtaggtcaaacttgaatatttttcagtatatcggaaaggccgggctgcacgggagtcaagtcgtcattgaagcacaaggcctcgaggctctgatcgccgcaacccccgatgagggcgaagagaatctcgattcatatgcaggcatgagcgcgattctatttgatgttcaactgcgccccgtgacattttttaacggctacagcgatctaatgtctaagatgctgagtgcctcaggagatcctatctcagtggtaaaaggactgatcctacttatcgaccattcgcaggagttgcagctccagtcggggctaaaggctaacatcgaagtccaaggggggctggcaatagatatcagtggggctatggagttcagtctgtggtacagggaaagcaaaactcgggtgaagaacagggttacagtcgttataacgacggacattaccgtggattcgagcttcgtgaaagccggactggagacctccactgagacagaggcgggactggagtttatctcaaccgttcagttctcccagtacccgtttctggtttgtatgcaaatggacaaggatgaggcgcccttccggcagtttgaaaaaaagtatgaaagactctccaccggcaggggctacgtgagccaaaagcgtaaagagtctgtcctggcgggctgtgagttcccacttcatcaggaaaacagtgaaatgtgcaaggtggtcttcgccccccagcccgattccacctcctctggttggttc

SEQ ID NO: 5448 - DNA, 2682 bp, Artificial Sequence
  derived and/or modified sequence
atgatcttgctcgcggtcctcttcctttgttttatctccagctactcggccagtgtgaaagggcataccaccggactctccctcaacaacgatcggctctacaagctgacctactccactgaagtgctgctggacagaggaaagggaaagttgcaggattccgtgggatacagaatatcgtcgaacgtggacgtggccctgctttggcgcaaccctgacggggacgacgaccagctgatccagatcaccatgaaagacgttaacgttgaaaacgtgaatcagcagcggggagagaagtccatcttcaagggtaaaagcccgtccaaaatcatgggaaaggaaaacctggaagctctgcaaagacctactctcttgcacctgatccatggcaaggtgaaggagttttactcgtaccagaatgaagcggtcgcgatcgaaaacatcaaaagaggactggcttcgcttttccagacccagctgtccagcggtaccaccaacgaggtcgacatctcggggaactgcaaggtgacctaccaggctcaccaggacaaggtgatcaaaatcaaggctctcgattcttgcaagatcgcgcggtcaggattcaccactcccaatcaggtgctgggcgtgagcagcaaagcgacctctgtgaccacttataagatcgaggacagctttgtgatcgcggtgctcgcagaggaaacccacaatttcgggctcaactttctgcagaccatcaagggaaaaatcgtgtccaaacaaaagctggagctcaaaaccaccgaggccggacctagattgatgtcaggcaagcaagcggccgccattatcaaagcagtcgactcgaagtacaccgctatcccgatcgtgggtcaagtgttccagtcacactgcaagggatgccctagcctgtcagagctgtggagatcaactagaaaatacctgcagccagacaacctgtcgaaggctgaggccgtgcggaacttcctggccttcatccagcacttgagaaccgccaagaaggaagagatcctgcagatcctgaagatggagaataaggaagtcctgccccagctcgttgatgctgtgacctccgcacagacctcggactcgctggaggcgatcctggacttcctggacttcaaatcagactccagcatcatcctccaagaacggtttctgtacgcatgtggttttgcatcccaccctaacgaggaactcctgagggcgcttatcagcaaattcaaaggatccatcggatcctcagacatccgcgagactgtgatgatcattacgggcactctggtgcggaaactctgtcaaaacgagggatgcaaactgaaagctgtcgtggaagcgaagaaacttatactggggggactggagaaggcagaaaagaaggaggacaccagaatgtacttgctcgcgctgaaaaatgcactgcttccggaaggtatcccaagcctgctgaagtacgccgaagccggagagggtcctattagccacctggcgactacggcgctccagaggtacgatctgcccttcatcaccgacgaggtgaaaaagaccctcaatagaatctatcatcagaaccggaaggtgcatgaaaagactgtccgcaccgccgccgctgcgatcatccttaacaataacccatcctacatggatgtgaagaatatcctgctctcgatcggggagctgccgcaagagatgaataagtatatgctggcaatcgtgcaggatatcctccgctttgagatgcctgcctccaagatcgtccggcgcgtgttgaaggaaatggtcgcccataactacgatcgcttctctcgctccggaagctcctcagcctacaccgggtacattgaacggtccccccggagcgcttccacctactccctggacatcctgtattccggatcgggtatcctgcgaagatcaaacctcaatatcttccagtacatcggaaaggccgggttgcacggctcccaagtggtgatcgaagcacaaggcctggaagccctcatcgcggcgaccccagacgagggagaagaaaacctggatagctacgctggcatgtcagccatcctcttcgacgtacagctgcggcctgtgactttcttcaacgggtactcagacctcatgtccaagatgctttctgcatccggagatcccatctccgtggtgaagggcctgatcctcctgatcgaccattcacaggagctccaactgcaatcgggacttaaagccaatatcgaagtgcaaggaggactggcgatcgacatctccggagcaatggagttcagcctgtggtacagagaatcgaaaactcgcgtgaagaatagggttaccgtcgtcatcaccaccgatattactgtggattcatcattcgtgaaagctggtctggaaaccagcactgagactgaggcggggctcgaattcatctcgaccgtgcagttttcacagtacccgttcctcgtctgtatgcaaatggataaggatgaagcaccattccgccaattcgagaagaagtacgaaagactgagcaccggacgcggttatgtcagccaaaaaaggaaggagtcggtgcttgcagggtgcgaattcccgcttcatcaggagaattcagaaatgtgcaaggtcgtgttcgccccgcagccggactcaacgtcatcgggatggttt

SEQ ID NO: 5449 - DNA, 2682 bp, Artificial Sequence
  derived and/or modified sequence
atgatactcctcgctgtcttgttcctgtgcttcatctcctcttacagcgcgtccgttaagggccacacgaccggtctcagtttgaacaacgacaggctttacaagctgacctactccactgaagttctgctcgatcggggaaagggtaagttacaggactctgtcggttaccgtatctcgtccaatgttgacgtcgccctactttggcggaaccccgacggcgacgatgaccagctcattcagatcactatgaaggacgtgaatgttgagaacgttaaccagcagcgcggagagaagtccatttttaagggaaagtccccttccaagattatgggcaaggagaatttggaggctctgcagcggcctaccctcctgcatctgattcacggcaaggtgaaggagttctattcttaccaaaatgaagctgtggccatcgagaacatcaagagagggctggcctcgttgtttcaaacccagctctcttccggaaccacgaacgaggtggacatctccggcaattgtaaggttacctaccaggcccaccaagacaaagtcatcaagattaaggccctcgatagctgcaagatcgcccgctctggtttcaccaccccgaaccaagtcctcggagtgagcagtaaggccaccagtgttaccacgtataaaatcgaggacagtttcgtcatcgctgtcctcgccgaggaaacccataattttggcctgaacttcttgcaaacgatcaagggtaagatcgtttcgaagcaaaagttggagcttaagacaactgaggcgggtccgaggctgatgtcaggtaagcaggcagccgctatcatcaaggccgttgattccaagtacactgccatacctatcgtgggccaggtcttccaatcgcattgcaagggctgcccgtcactgtctgagttgtggcgctctactaggaagtacttgcaaccggacaacctttctaaggccgaggctgtccgcaacttcctcgccttcatccagcaccttcggacggcaaagaaggaggaaatcctgcagatcctaaagatggagaataaggaggttcttccccagcttgtcgacgctgtcacttccgcccagacttccgattcccttgaggcgatcctggacttcctcgacttcaagtctgattcctctataatcctgcaagagcgtttcctctacgcctgtggattcgcctcccatcccaacgaagagttgttgcgcgccctaatctcaaagttcaagggctccatcggtagctctgacatccgggaaacggtgatgatcattactggaacattggtacgaaagctttgccagaacgagggatgtaagctcaaggccgtcgtcgaagcaaagaagttgatcctcggtggtctcgagaaagccgagaaaaaggaggatacccgaatgtatctgttggcgctgaaaaatgccttattaccagagggtattccctcccttctgaaatacgctgaagcgggggagggtcccatttcccatctcgcgacaaccgctctgcagcggtacgatctccccttcattaccgacgaggtaaagaagaccttaaaccgcatctaccaccagaaccgaaaggtccatgaaaagaccgtccgtaccgcagcggcggccatcatcctcaacaacaaccctagctacatggacgtgaagaatatcttgctctccatcggtgagcttccacaggaaatgaacaagtacatgttggccatagtgcaagacattctgcgcttcgagatgcctgcctccaagattgttcgccgcgtgttaaaggaaatggttgctcacaactacgaccgcttctcccgttctggctcctcctccgcgtacaccggttacatcgaacgttccccgaggtccgccagcacttacagcttagatattctttattctggctccggtattcttcgacgttcgaatcttaacatcttccagtacatcgggaaagccggactgcacggctcccaggtggtcatcgaagcgcagggccttgaagctctgatcgctgctacgcccgacgaaggcgaggagaacttggactcgtacgccggtatgagcgccatcctcttcgatgtacagctacggcctgttacattcttcaacggctactccgacttgatgtccaagatgcttagtgctagcggcgaccctatctcggtggttaaaggactgatcttgctcattgatcattcccaggagttacagctccagtctggcctgaaagcaaatatcgaagttcagggtggcttggctatagatatcagcggggcgatggagttcagcctgtggtacagagagagcaagacgcgtgtcaagaaccgcgtcaccgtcgtcattaccaccgacatcacagtggactcgtcattcgtgaaagccggtcttgaaacgagcaccgagacggaagcgggtctggagttcatttcgaccgttcagttcagccagtatccatttttggtctgcatgcagatggacaaggatgaagctccattccggcaatttgagaagaagtatgagcggctgtctaccggtcgcggttacgtttcgcagaagcgcaaggagtcggtcttggcaggctgtgaatttccccttcatcaagagaactctgagatgtgtaaggtggtgttcgccccccagcccgactcgacctcttccggctggttc

SEQ ID NO: 5450 - DNA, 2682 bp, Artificial Sequence
  derived and/or modified sequence
atgattctgctcgcggtgctgtttctgtgctttatcagctcatacagcgctagtgtcaagggccatactaccggactgtcactcaacaacgacagactgtacaagctgacctactccactgaagtgcttctcgatcgcggcaagggaaagctgcaggattcagtgggatacaggatctccagcaatgtggacgtggctctgctgtggagaaatcctgacggagacgacgatcaactcatccagatcacgatgaaggacgttaatgttgaaaatgtgaaccagcagaggggagaaaagtctatctttaagggaaagtccccatcgaaaatcatgggcaaagaaaacctggaggcgctgcaacggcccaccctcctgcacttgattcacggtaaagtgaaagaattctacagctaccagaacgaagctgtcgctatcgaaaacatcaagcgcggactggcgtccctgtttcagactcagttgtcctccggaactaccaatgaggtcgatatctcaggaaattgtaaagtcacttaccaggcccaccaggacaaggtgatcaaaatcaaggcccttgactcatgcaagattgctcggtccggatttactaccccgaaccaggtgctgggagtgagcagcaaagcgacctccgtgactacctacaaaatcgaggactcattcgtgatcgcagtattggctgaggagactcacaacttcggcctgaattttctgcagacgatcaagggcaagatcgtgtcgaagcagaagctggagctgaaaaccaccgaggccgggccccggctgatgtccggcaagcaggcggcggccattatcaaagcggtggactccaagtacaccgctattcccatcgtgggtcaggtgttccaaagtcactgcaagggatgtccatcgctctccgaactctggaggtcaacccggaagtacctccaaccggacaatctgtccaaggcggaagccgtgagaaactttctggccttcatccaacacctccgcaccgcaaagaaggaggagatccttcagatcctgaaaatggaaaacaaagaggtgctcccccagctcgtggatgccgtcacttcagcccaaactagcgattccctggaggcaatactcgactttctcgacttcaagtctgacagctctatcatcctccaggagcgcttcctgtacgcatgcggcttcgcgtcccatcccaatgaagaactccttagagccttgatctcgaagttcaagggatccatcggaagctcggatatccgggagacggtcatgatcattactggtaccctggtgcggaagttgtgccaaaacgaaggctgcaagttgaaggcagtggtcgaggcgaaaaaactgatcctgggcggccttgagaaggctgagaagaaagaagatactagaatgtaccttctggccctgaaaaatgcgttgctgccggagggcattccgtccctcctcaagtacgcagaagcgggggagggaccgatctcccacctggcaaccacggcgctgcaaaggtatgaccttccgtttatcaccgacgaagtgaaaaagactctcaaccggatttaccaccaaaaccggaaagtccacgagaaaaccgtccggaccgccgcagcggcaattatcctcaacaataacccgtcgtacatggacgtgaaaaacatcctcctgtccatcggagagctcccgcaagagatgaacaaatacatgctggctatcgttcaggacatactccgcttcgaaatgccggcgagcaaaattgtgagaagagtccttaaagaaatggtggctcacaactacgatcgcttttcccggtccggaagctcgtccgcatacacgggatacatcgagagaagcccacgctcggcctcaacgtactcgctggacatcctgtactcgggatcaggtatcttgcggaggagcaacctcaacattttccagtatatcggaaaagctgggctgcacggctcacaagtggttattgaagctcaaggactcgaagccctgatcgcagcgactccggatgaaggagaagagaatctggatagctatgcgggaatgtccgctatcctgttcgacgtgcagcttagacctgtgaccttcttcaacgggtactcggatctgatgtccaagatgttgtcggcctcgggggacccgatttcagtcgtcaagggcttgatccttctcatcgatcattcgcaggaactccagctgcaatcgggactgaaggctaacatcgaggtgcaagggggactcgcaatcgatatatcgggcgcgatggagttctccctttggtaccgggagagcaagacccgcgtgaaaaatcgggtcactgtggtcatcaccactgatatcactgtcgactcctcgttcgttaaggccggcctcgaaacctctaccgagactgaggccggactggagtttatcagcacggtgcagttctcacagtatccgttcctggtctgtatgcagatggacaaagacgaggctccattccggcagttcgagaagaaatacgagcgcctcagcactggacggggatacgtgtcacaaaagagaaaagagagtgtccttgcagggtgcgaattcccactccaccaagagaactcggagatgtgcaaggtggtgttcgcgccccagccagactcgacctcatcggggtggttc

SEQ ID NO: 5451 - DNA, 2682 bp, Artificial Sequence
  derived and/or modified sequence
atgattctgctggccgtgctgttcctttgtttcatctccagctacagcgcatcagtgaagggtcacactaccggactttcgctgaacaatgatagactctacaagctgacctattccaccgaggtgcttctcgacaggggaaagggcaagctccaagactcggtcggttacagaatctcctcgaacgttgacgtggccctcctgtggcgcaatccggacggagacgacgatcagctcatccaaatcaccatgaaggacgtgaacgtcgagaacgtgaaccagcagcgcggcgaaaaatcgatcttcaaaggaaagtcaccctctaagattatgggaaaggaaaacctcgaagccctgcagcggcccaccctcctgcatctcatccacggaaaggtcaaagagttttacagctaccaaaatgaagcagtggcaattgaaaacatcaagcgaggacttgcatcgctcttccaaactcagctctcaagcggaaccaccaacgaggtggacatctccggcaactgcaaggtcacctaccaagctcaccaggacaaggtgatcaaaatcaaggccctggattcgtgcaagatcgctcggtccggcttcaccaccccgaatcaggtcctgggagtgtcgagcaaggcaacttcggtgactacttacaagatcgaggattcattcgtgatcgccgtattggctgaggaaacccacaatttcggtctgaacttcctccagactatcaagggaaagatcgtctccaagcagaagctggagctgaaaaccaccgaggcgggaccgcggctcatgagcggaaaacaagcggcagcgatcatcaaagccgtggattcgaagtacaccgcaattccgatcgtgggacaagttttccagtcgcattgcaagggttgtccgagcctctcggagctgtggcggtcaacgagaaagtacctgcagccggacaatctgtcgaaagccgaggctgtgcgcaatttccttgccttcatccagcatctccggactgccaagaaggaggaaatcctgcagatactgaagatggagaataaggaggtgctgccgcagctcgttgacgctgtcacctcagcccaaaccagcgactccctggaagctatcctggacttcctcgacttcaagtccgactcctccatcattctccaagaacggttcctttacgcctgcggtttcgcgagccatcctaatgaggagctgctgcgcgcactgatttccaagttcaagggctcgatcggctcgtcggatattagggaaacggtcatgattatcactggaactctggttaggaagctgtgccagaatgaaggatgtaagctgaaagctgtggtcgaagccaagaaactcattcttggcggactggaaaaagcagaaaagaaggaagatacccgcatgtatctgctggccctgaagaacgcactcctgccagaaggaatcccgtccctcctgaagtatgcggaggcgggagaaggacctatcagccacctggccaccaccgccctgcagcgctatgacctcccgtttatcacggatgaggtgaaaaagaccctcaaccgcatctaccatcaaaatcggaaggtgcatgaaaagacggtgcggactgccgcagcggccatcattctgaataacaacccatcgtacatggatgtgaagaacatcctcctgtcgattggggaactgccacaggaaatgaataagtacatgctggcgattgtgcaggatatcttgcggtttgagatgcctgcgtcaaagattgtgcgcagggtcctcaaggaaatggtggcacataactacgatcgtttctcacgcagcggttcctcgtccgcctacaccggctacatagagaggtcacctagatcggcctcaacctactccctggatatcctttactcaggatcaggaatcctccgaagatcgaatctcaatatctttcaatacatcggcaaggcggggcttcacggaagccaagtggtgatcgaagcccaggggctggaggccctgatcgctgctactccggacgaaggagaggaaaacttggactcatacgcaggcatgtccgcaattttgttcgacgttcaacttcgtccagtgactttcttcaacggctactcagacctgatgtcgaaaatgctctcggcatcaggggacccgatctcggtggtgaaggggctgattctcctgatcgatcactcccaagaactccagctgcagtccggcctgaaggcgaacatcgaggtgcagggaggactggcgatcgacatctcaggcgcaatggaattttcgctctggtacagagagtccaaaactagagtgaagaacagagtcacggtcgtcatcactaccgacatcaccgtggattcctccttcgtcaaggccggactggagacgtccaccgaaactgaggccggactcgagttcatctccactgtgcagttctcgcagtatccgttccttgtctgtatgcaaatggataaggacgaggcgccgtttcgccagttcgaaaagaaatatgagcgactgtctaccggccggggatacgtctcgcaaaagcgcaaggagagcgtgctggccgggtgcgagttcccgcttcaccaggaaaactccgagatgtgcaaggtggtgtttgcgccgcaaccagactctacttcgtctggatggttc

SEQ ID NO: 5452 - DNA, 2682 bp, Artificial Sequence
  derived and/or modified sequence
atgatcctcctagctgtgttattcttgtgtttcatttcttcctacagtgcaagcgtgaaaggccataccaccgggctgtcattgaacaatgataggctgtacaagctgacttattcaacagaggtactgctggacagagggaagggcaaactccaggattcggttggctaccgcattagctcaaacgtggatgtcgccctgttatggaggaaccctgatggggatgacgatcagctgatacagatcacaatgaaggacgtgaatgtggagaatgttaaccaacagaggggcgaaaagtccatcttcaaaggcaagtcaccctctaagatcatgggaaaggagaaccttgaagctctgcagcgccccacactgttgcatctgattcacggcaaagtgaaggagttctatagttaccaaaacgaagccgttgccatcgagaacattaaaaggggacttgcctccctgtttcagacacagctaagctcaggaacgacgaatgaggtcgacatcagcggaaattgcaaagttacttatcaggcccatcaggacaaggtgattaaaatcaaagctttagattcatgtaaaatcgcacgaagcgggttcactacccctaaccaggtactcggtgtctctagcaaagctacttctgttacgacttataaaatcgaagatagtttcgttatcgccgtgctggccgaggagacccacaacttcgggttgaacttcctgcagaccattaagggcaagatagtgagtaaacaaaagctcgagcttaagaccaccgaggccgggcctcgtctaatgagtgggaagcaggctgctgcgatcatcaaggctgtggattcgaaatatacagctatcccgatcgtgggacaagtattccagtcacattgtaagggctgccctagtctcagtgagctctggcgttccactaggaagtacctccagccggataacctcagtaaggccgaagccgtgcggaatttcctggcctttattcaacacttgcggacagccaaaaaggaggaaatcttgcagattctgaagatggagaacaaagaggtcttgccacagcttgtggacgccgtaacatcggctcagactagtgactcccttgaggccatattggatttccttgacttcaagtccgatagttccattattctccaggagcgttttttgtatgcctgcggctttgcatcacatccaaatgaggagctgttgagagcactgatctctaaatttaagggttcgatcggctcatctgatattagggagactgtgatgatcattactggaacactggtgagaaaactgtgtcagaatgaaggctgtaagctgaaggcagttgtcgaagccaagaaactgatcctgggagggctggaaaaagctgaaaagaaggaagacacccggatgtatctgctcgctttgaaaaacgcacttctgccagaggggattccaagccttctcaaatacgcagaagcaggggagggccctattagccatctggcgactacagccctgcagcggtatgacctcccctttatcaccgacgaagtcaagaaaactcttaatcgcatttatcatcagaaccgaaaggtccacgaaaagacggtccgaacagccgccgcggccataatacttaacaataatcctagctacatggacgtaaagaatattcttctcagtataggggagttgcctcaagaaatgaacaaatacatgctcgctatagtgcaggacatcttgcgcttcgagatgccagccagcaagattgttagacgggtgctgaaagagatggtcgcgcataactacgacaggtttagcagatcagggagcagtagcgcttacaccggctatattgaacggtccccccgctccgcatctacttactcactggatatattgtacagtggttcggggattctaaggagatccaacttgaacatcttccagtacataggcaaggccggcttacacgggtcccaggtggtgattgaggcccagggcctggaggcactgatcgctgcaactccggacgagggtgaagaaaacctcgattcttacgccggcatgtccgctatactgttcgacgttcagttgcgccctgtgacattctttaatggatattctgatctcatgtcgaaaatgctttctgcctctggcgaccccatcagcgtagtgaagggactcatccttttgattgatcatagtcaggagctgcagctccagtcgggattaaaggcaaacatcgaggtgcaagggggcttagcaattgacatctccggggcgatggagtttagtctatggtacagagagagcaagacacgtgttaagaacagagtgacagttgtgattaccactgatatcacagtcgacagctctttcgtaaaggccggcctggagacatccactgagacggaggccggcctggaatttataagtactgtacagtttagccagtacccctttctcgtctgcatgcagatggataaggatgaagcaccttttcgacagtttgagaaaaagtatgaacgactttccactggacggggatatgttagccagaagagaaaggagtccgtgctcgccggttgtgaattcccactgcatcaggagaatagcgagatgtgcaaggtggtttttgcacctcaacccgatagcacctcatccggatggttc

SEQ ID NO: 5453 - DNA, 2682 bp, Artificial Sequence
  derived and/or modified sequence
atgattctgctcgccgttttatttctgtgcttcattagctcatacagtgcaagcgttaaaggtcacacaacaggtctgagcctcaataatgatcgactctacaagctgacatactctacagaggtgcttctggacaggggtaaaggcaagctgcaggattccgtaggataccggattagctccaatgttgacgttgccttgttgtggcgaaaccccgacggtgacgacgatcagcttatacagataaccatgaaggacgtcaatgtcgagaacgtcaaccaacagcggggagaaaagtcgatatttaaaggaaagtcacccagcaagattatgggcaaagagaatttagaggctctacagaggccaaccctactccatcttattcacggcaaggtgaaggagttctattcctatcaaaacgaggcagttgcaatagagaatattaagagggggctggcgagcctcttccagacccagctgtcaagcgggactacaaatgaggtggatatctccggaaactgcaaggtcacataccaggcccaccaggataaggtgattaaaatcaaagcactcgatagttgtaagattgcccggtcaggctttactactcctaaccaggtactcggagtatcatctaaggctacatcagtaacgacctataaaatcgaggacagttttgtcatagccgttttggctgaggaaactcacaatttcgggctaaacttcctgcagaccatcaagggcaagattgtctctaaacagaagctagaactaaagactaccgaggcaggaccacgcctcatgtccggaaaacaggctgccgccatcataaaggccgtggattccaaatataccgcgatccctattgtggggcaggtgttccagtcccattgtaaagggtgcccctccttgtctgagctttggcgcagtaccaggaaatacctgcagcctgacaaccttagcaaggccgaggccgtgcggaatttcctagcttttatccagcacttacggactgccaagaaagaggaaatactgcagattctgaagatggagaataaagaggtcctcccacagctggtggatgcagtgacttctgctcagacatctgattcactggaggccatcctcgactttcttgactttaaaagtgatagctctattattctgcaagaaagatttctttatgcgtgcggcttcgcctcccatccaaacgaagagttactgcgagccctgatctcaaagttcaaaggctccatcggatcctctgacatccgcgaaaccgttatgatcatcaccggtactctggtgcgcaagttgtgtcagaatgaagggtgtaaactaaaagcagtcgttgaagctaagaagttgatcctgggcggactggagaaggcggaaaaaaaagaagatacgaggatgtatctgctggcactcaagaacgccctgcttcctgaggggattccttctctcctcaagtacgctgaagcaggcgagggcccaatctctcatctagcaacaaccgcattgcagagatatgatctgccatttattaccgacgaggtgaagaagaccctgaaccggatttatcaccaaaacaggaaagtgcacgaaaagaccgttagaacagccgctgccgccattattctgaacaacaacccctcctatatggatgtgaagaatatattgctctccatcggcgaactacctcaggagatgaacaaatacatgctggcaattgtacaggacatcctgagattcgagatgccggcatcaaaaatcgtgcggcgtgtcttgaaagagatggtcgcacacaactacgatcggttctcccgctcagggtcaagttccgcgtatacgggctacatagagcgaagtcctcgctccgcatcgacctattccttggatattttgtacagtgggagcggcatattgagacggagcaacctgaatattttccaatatatagggaaagcaggattgcacgggtcccaagtggtgatcgaagctcagggactggaggcactgatagctgctacacctgacgagggggaagagaaccttgacagctatgcggggatgtctgccattttatttgatgtgcagcttcgtccagttaccttctttaatggatattcagatttaatgagtaaaatgctctcagcatccggggatcccatttccgttgttaagggactgatcttgctaatagaccacagccaggaactgcagctccagtccggcctcaaagccaacatcgaagttcaggggggcctagccattgatatctccggcgctatggagttctctctgtggtaccgggagagtaagaccagagtaaagaaccgagtcacggtcgttatcacaacagacatcacagtagactcctcttttgttaaggccggcctcgagacatctacagagacagaagctggcctggagtttattagtaccgtgcagtttagtcaatatcctttcctggtgtgtatgcagatggacaaagacgaggccccttttcggcaattcgaaaaaaagtatgagagacttagcaccggacgaggatatgtctcccagaaaaggaaagaatccgtgctggccgggtgcgagttccctctgcaccaagagaactctgaaatgtgtaaggtggtcttcgcaccgcagccagactcaacttcctcaggctggttc

SEQ ID NO: 5454 - DNA, 2682 bp, Artificial Sequence
  derived and/or modified sequence
atgatcctgctggccgtccttttcctgtgcttcattagcagctactcggccagcgtcaagggccacaccaccggactctcacttaacaacgacaggttgtacaagctgacctacagcaccgaggtgttgttggaccggggtaagggaaaactccaggacagcgtgggttaccggatctccagcaatgtggacgtggcgctcctgtggcggaatccagacggggacgatgatcagcttatccagattactatgaaagatgttaatgtggagaatgtgaaccagcagcgcggggaaaaaagcatcttcaagggaaaatctccatcgaaaatcatgggcaaggagaacctcgaagccctccaaaggccaactcttctgcatctcatccacggaaaagtgaaggagttctattcgtaccagaatgaggcagtggcgatcgaaaacatcaaacgtggactggcctcgctgttccaaacccagctgtcgtctggcacgaccaacgaagtcgatatttccgggaattgcaaggtgacgtaccaggctcatcaggacaaggtgatcaagataaaggctttggactcatgcaagatcgcacggtcggggtttacgactccaaaccaagttcttggcgtgtcgtccaaggcaacgtctgtcactacctacaagattgaggacagttttgtcatcgccgtgcttgcggaggagacgcacaatttcggactcaatttcctgcaaactattaagggaaagattgtgagtaagcagaagctggaattgaaaaccactgaggcagggcccagactcatgtcaggcaagcaagccgcagcaatcatcaaggccgtcgactccaagtatactgccatccccatcgtgggccaggtgttccagagccattgtaaagggtgcccttccctctccgaactgtggagatcgactcgcaaataccttcaaccggataacttgtccaaggctgaagctgtgcgcaacttcttggctttcatccagcacctgcgcactgcgaagaaggaggagatcctccaaattctcaagatggaaaacaaagaggtgttgccgcagctggtagacgccgtcacgtcagcccaaacctcggactcgctggaagcaatcctcgatttcctggacttcaaatccgacagttcgatcatcctgcaagaacggttcttgtatgcttgcggctttgcgtcccatccgaacgaagagctgctgagagccctgataagtaaattcaaaggatcaatcggatcatccgacatccgagaaaccgtcatgattatcactggaactcttgtgcgcaaactttgccaaaatgaggggtgtaagctcaaggcggtggtcgaagccaaaaaactgatcctgggtggcctggagaaggcggagaaaaaggaggatacgcgtatgtacctcctggccttgaagaacgcactcctgccggaaggaattccgtcgctcttgaagtacgctgaagcgggcgaaggaccgatcagccacttggccaccaccgctctccagcggtacgatctgccgtttatcaccgacgaagtgaaaaagacgcttaaccgaatctaccaccagaatcgcaaggtccacgagaaaaccgtgaggactgctgccgcggcaatcattctgaacaacaacccttcctacatggatgtgaagaacatcctcctttcgataggagagcttccccaggaaatgaacaagtacatgctcgcgatcgtccaagacatcctgagatttgaaatgccggcatccaaaatcgtgcggagagtgcttaaggaaatggtggcgcacaattacgatagattctcccgcagcggctcatcgtcagcatacactgggtacatcgaaagatccccacgctcagcaagtacctattcacttgacatcctgtattcgggatcaggtattctccggcggagcaatctcaacatcttccaatacatcggaaaggcgggactgcacggatcgcaggtggtgatcgaggctcagggtctggaggcactcatcgctgcgaccccggatgagggcgaggaaaacctggactcgtacgcgggaatgtcggccatccttttcgatgtgcagctccggccggtgactttctttaacgggtactcggacctgatgagcaagatgctgtcggcgtcgggtgacccaatctctgtggtcaagggactcatcctgcttattgaccattcgcaggaactgcaactgcagtcaggcctgaaagctaatatcgaggtccagggaggcctggccatcgatatctccggagcaatggaattctccctgtggtaccgcgaatctaagaccagggtcaagaacagggtgactgtagtgataaccaccgatatcactgttgattctagctttgttaaggccggacttgaaacctccaccgagactgaagcgggactcgaattcatctccactgttcagttctcacaatacccgttcctggtgtgtatgcagatggataaggacgaagcccctttccgccaattcgagaagaagtacgaacggctctccaccggacgcggatacgtgtcccaaaagagaaaagaatccgtcctggctggctgcgaattcccactgcatcaggagaactccgaaatgtgcaaggtggtctttgcgccgcaacctgactccacctcctcgggatggttt

SEQ ID NO: 5455 - DNA, 2682 bp, Artificial Sequence
  derived and/or modified sequence
atgatccttctggctgtgttgtttttgtgcttcatcagcagctatagtgcatctgtgaagggtcacactacgggcctttcattgaacaacgaccgcctgtacaaactcacttactccacggaagtcctgctggaccgcggcaaaggaaagctgcaagattcagtgggttacagaatatccagcaacgtggacgtggcactcctgtggcgcaacccggacggtgacgacgaccaattaatacaaataaccatgaaggacgtcaacgtcgagaatgtgaatcagcagcgaggggagaaatcaatcttcaaaggcaaatccccctcaaaaattatggggaaagaaaatcttgaagccttgcagcgacccacactgttacacctgatccatgggaaggtgaaagaattttatagctaccagaatgaagctgtggctatagagaacatcaagcggggtctcgccagcctgttccagactcaactcagtagtgggaccacaaatgaagtagatatctcagggaattgcaaagttacctatcaggcccaccaagacaaggtcataaagattaaggcattggactcgtgcaagattgcccgatcagggttcacaactcctaaccaggtgctgggggtgtcgagtaaagcgacctccgtgacaacctacaaaatagaagatagcttcgtgatcgcagttcttgcagaggagacccacaacttcggtctgaatttcctgcagaccattaaggggaagattgtctctaagcagaagttggagctgaagacgactgaggctggtcctcgcctgatgagcggaaagcaggcagctgcgattataaaagcagtggactccaagtatacagccattccaattgtgggtcaggtttttcagtcccactgcaaggggtgtccaagtctgagcgagctttggcgaagcacacgtaagtacctccagcctgataacttgtctaaggcagaggctgtgcgcaacttcctggcgttcattcagcatctgcgcactgccaaaaaggaggagattttacaaatactaaagatggagaataaggaggtgctgccgcaacttgtcgacgcagtgacgagcgcccagactagcgattctttggaagcaatccttgacttccttgacttcaagtcggatagctcaattattctgcaggagagattcctatatgcctgtggctttgccagtcatccaaatgaagagctcctacgagcgctcatatctaagtttaaggggtccatcggaagcagtgatatccgtgaaactgtgatgatcattacaggcacgctggttcggaaactgtgccagaacgaggggtgtaaattgaaagccgtggtggaggctaagaagctcattctgggcggtcttgaaaaggcagagaagaaggaagacaccaggatgtacctgctggccctgaagaatgccctgttgccagagggcatcccaagcctgctgaagtacgcggaagctggtgagggtcccatttctcacctggcaactaccgctctccagcgatacgatttgccattcataaccgatgaggtcaagaaaaccctgaatagaatataccaccagaatcgtaaggtgcacgagaagacagtcagaacagctgcagctgctattattctaaataacaacccaagctacatggatgtcaaaaacattttgttaagtatcggggagctgcctcaggagatgaataagtatatgttggcaatcgtacaggacatcctcaggtttgaaatgcctgcttcgaaaattgtgagaagggtgcttaaggaaatggttgcgcataattacgaccgcttttctaggagcggctcaagcagtgcatacaccggatacatcgaaaggtctcccagatccgcctccacctactccttagatatcctgtatagcggctccggtatactgcggagatctaatcttaatattttccagtatattgggaaagcgggcctacacggatctcaagtcgtgattgaagcacaaggactggaggcattaatcgctgccactccagatgagggggaggaaaatctggatagttacgccgggatgtcagcaatactgttcgatgtgcaattacgtccagttaccttcttcaacggctactccgacctaatgtccaagatgttatccgcttcaggggacccaatcagcgtcgtcaagggtctgattctgttgattgatcattcacaggagctccaactgcagtccgggttgaaagcaaatatcgaagtacagggagggctagccattgatattagcggagctatggaattctctctgtggtaccgtgagtcgaagacacgcgtcaagaaccgcgtgacagtggtcataacgacggatattacagtggactcatctttcgtgaaggccggcctcgaaacaagcaccgaaaccgaagcaggtctggagttcatatctacggtacagtttagtcagtatccattcctggtttgtatgcagatggataaagacgaggccccattcaggcagttcgaaaagaagtacgaacggctcagtaccggtaggggttacgtgagtcaaaagcggaaggagtcagtactggccggatgcgagtttcctctgcatcaggaaaactccgagatgtgcaaggtcgtgttcgccccccagcctgattctacatcaagtggttggttt

SEQ ID NO: 5456 - DNA, 2682 bp, Artificial Sequence
  derived and/or modified sequence
atgatcctgctggccgtcctgtttctgtgtttcatctcatcatactccgcgtctgtcaagggacatactaccggtctgtcactgaacaatgatagactgtacaagctcacttactcgacggaagtactcctcgacagggggaagggcaaactccaagattcggttggataccggatctcctcgaatgtggacgtggcgttgctgtggcggaacccagatggagatgacgaccagcttatccaaatcaccatgaaggatgtcaacgtcgaaaatgtgaatcagcaacgcggggaaaagtccattttcaaaggcaagtccccatcaaagatcatgggcaaggagaacctggaggctctgcagcgcccaaccctgctccacctgatccacggtaaggtcaaagagttctactcataccagaatgaggccgtggcgatcgagaacatcaagcggggcctcgcgagtctgttccagacccagttgtcctcggggactactaacgaagtcgacatcagcggaaactgcaaggttacctaccaagctcatcaagacaaggtgatcaagatcaaagcacttgactcctgcaaaatcgcccgctccggttttaccaccccgaaccaggtcttgggagtgtcatccaaagcgacctcggtgaccacgtacaagatcgaagattcgtttgtcatcgcggtgctggccgaagaaacccacaacttcggattgaatttcctgcagaccatcaagggaaagatcgtgtcgaagcaaaagttggaactcaaaaccactgaagccggaccgagactgatgtctggaaagcaggcggccgcgatcataaaggcagtcgactccaagtacactgcgatcccgattgtgggacaggtgttccagtcccactgcaaaggctgcccgagcctcagcgaactttggcggtccactagaaagtatctgcagcctgacaacctgtcaaaggctgaagctgttcgcaacttcctggccttcatccagcacctcaggactgccaagaaagaggaaattctgcaaatcctcaaaatggagaataaggaggtgctcccccagcttgtggacgcagtgactagcgcgcagacgtcggattccctggaggcaatcctggatttcctggactttaagtctgatagtagcatcatcctgcaagagcgattcctctacgcctgcggatttgcttcgcaccccaatgaagaactcttgcgcgccttgatctcaaagttcaagggatcgatcgggagctctgatatccgggaaactgtgatgatcattaccgggactctggtgcgtaaactctgtcagaacgagggttgcaagctgaaggcagtcgtggaagcaaagaagttgattctcgggggcctggagaaagccgagaaaaaagaggatacccgcatgtacctcctggcactgaagaacgccctgcttcctgaaggaatcccaagccttcttaagtacgcggaagccggagagggcccgataagccatctggcgactactgccttgcagcggtacgatcttcctttcattactgacgaggtgaagaaaacgctgaaccgcatttaccatcaaaatcgcaaagttcatgagaaaacggtgaggactgcagcggccgccattatcctgaacaacaacccgtcgtacatggatgtaaagaatatcctcctgagcatcggagaactgcctcaggagatgaacaagtacatgttggctatagtccaagacatcctgagattcgaaatgccggcctccaaaatcgtgcgacgggtgttgaaggagatggtagctcacaactatgatcgcttctcgcggtctgggagctctagcgcatacactggctacatcgaacggtcaccgagaagcgctagcacctactcattggacattttgtactccggttccggcattctgagaaggtcgaatctcaacattttccaatacattggcaaagcgggactccacggctcgcaagtggtgatcgaagcccaaggactggaagccctcatcgctgcaacgcctgacgagggggaggagaatctggattcgtacgcaggcatgtctgccatcctctttgacgtccaactgcgcccggtgaccttctttaacggatactcagaccttatgagcaagatgctgtccgcatccggtgacccgatttccgtggtgaagggattgatcctcctcatcgaccattcgcaggaacttcagctccagtctgggctgaaggccaatatcgaggtccagggtggcttggctatcgacatctcgggcgccatggaattcagcctgtggtaccgcgaaagcaagactcgggtgaagaatcgggtgaccgtggtgataaccacggacatcactgttgactcctcgttcgttaaggcgggactggagacttcgaccgagacggaagctggattggaattcatctcaactgtgcagttctcccagtacccgttcttggtctgtatgcagatggataaagacgaagccccattccgccagttcgagaagaagtatgaaaggctgtcgaccggacggggatacgtctcgcaaaaaagaaaggaatcggtcctggccgggtgcgagttcccattgcaccaagaaaacagtgaaatgtgcaaggtggtgtttgccccacagcccgactcgaccagctcgggatggttt

SEQ ID NO: 5457 - DNA, 2682 bp, Artificial Sequence
  derived and/or modified sequence
atgatcctcctcgcggtcctcttcctttgcttcatctcctcttactcggccagcgtgaaggggcatactacgggactttcactcaacaacgatcgcctgtacaagctgacttattcgaccgaggtgctgctcgatcggggcaagggcaagctgcaggattcggtgggctacagaatttcgtcaaacgtcgatgtggcactcttgtggcgcaacccggacggagatgatgaccagttgatccaaatcactatgaaagatgtgaacgtggagaatgtgaatcagcagagaggagagaaatcgatattcaagggcaaatccccctcaaaaatcatgggaaaggaaaacttggaggccctgcaacggccaaccctccttcacctgatccacggaaaggtgaaggaattctatagctaccaaaacgaagccgtggccattgaaaacatcaagaggggtctggcgtcgctgttccagacccaactgtcatccgggaccactaatgaggtggacatctcgggcaactgcaaggtgacctaccaggcgcaccaggacaaggtgatcaagatcaaagccctggactcgtgtaagatcgccagaagcggattcactacccctaaccaggtgcttggagtctcctcgaaagctactagtgtcaccacttacaagatcgaggattcattcgtcatcgcggtgctcgctgaggaaacccacaattttggcctgaacttcctgcagaccatcaagggaaaaatcgtgtcgaaacagaagttggaactgaagaccactgaagctggccctcgactcatgtctggtaagcaggctgccgccatcatcaaggccgtggacagcaaatatactgccatccccatcgtggggcaggtgttccagagccactgcaagggttgcccgagcctgtcggagctgtggcgctcaacccggaagtacctccaacctgacaatctgtccaaggccgaggctgtcagaaatttcctggcgtttatacagcatctgaggactgctaagaaggaggagatcctccaaatcctcaagatggagaataaagaggtcctgccgcagttggtggacgcggtgacttcggctcaaacttcagactcgctcgaagcaattctggattttcttgactttaagtctgactcatcgatcattctgcaagaacggttcctgtacgcgtgcggctttgcgtcgcatccaaacgaagagctgctccgcgcccttatctcaaaattcaagggcagcatcgggtcgtcagatatccgggagactgtcatgatcataactgggactctggtgcgcaagctctgtcaaaatgaaggctgtaaattgaaggcggtggtggaggctaaaaagctcatcctgggaggactcgaaaaagctgagaagaaggaagatacgcggatgtacctccttgctctgaagaacgccctgctgcctgaagggatcccatcactgctcaagtacgccgaggcgggcgagggtccaattagccaccttgccactaccgcactgcagcggtacgacctcccgttcattactgatgaagtgaagaaaaccctgaaccggatctaccaccagaaccgcaaagtgcacgaaaagacggtgcgcactgcggctgcggccatcatcctgaacaacaatccgtcgtacatggatgtgaagaatatcctcctcagcatcggagaattgcctcaggaaatgaacaaatacatgctggcaatcgtgcaagacatcctccggttcgaaatgccggcgtccaaaatcgtgcggcgggtcttgaaggagatggtcgctcataactacgacagattctcgaggagcggttcatcatccgcgtacactggatacatcgaaaggagcccgcgaagcgcatcaacttactcactcgatatactttactcgggttcgggaatcctgaggcgttctaatctgaacatttttcaatacatcggtaaggctggcctgcacggctcgcaggtcgtcatcgaagctcagggactcgaagcactcatcgctgcgactccagatgaaggggaagaaaatctggactcgtacgcaggaatgtcggcgatcctctttgatgtgcagctgcggcctgtgaccttcttcaatggatactcggaccttatgtcgaagatgctcagcgcgtccggagatccaatttctgtcgtgaaggggctgatcctgctgatcgaccattcgcaggagttgcaactgcaatccggactcaaggccaacatcgaggtgcaagggggcctcgcgattgatatctccggcgccatggagttcagcctctggtaccgggaatcaaagactagagttaaaaacagagtcacggtggttatcaccactgacatcaccgtggactccagcttcgtcaaggccggtctggagacttccaccgaaactgaagcaggactcgaattcatctcaaccgtgcagttctctcaatacccgttcctcgtttgcatgcagatggacaaagacgaggcgccattccgccaatttgagaagaagtacgagaggctgtcgaccggtcggggatacgtcagccaaaaacgcaaggagtcagtgctcgccggctgcgagttcccgctgcatcaagagaactcggagatgtgtaaggtcgtgttcgccccacagcctgacagcacctcgtcggggtggttt

SEQ ID NO: 5458 - DNA, 2682 bp, Artificial Sequence
  derived and/or modified sequence
atgatcttactggccgtgttattcctgtgcttcatctcatcctacagtgctagcgtgaagggtcacaccactggcctttccctcaataacgaccgactgtataaactcacctacagcaccgaagtgctattggaccgcggcaagggcaagctacaggacagcgtgggttacagaatctcttctaacgtagacgtcgcacttctgtggagaaatccagacggagatgacgaccagctgatccagataaccatgaaagacgtcaatgtggagaatgtgaatcagcaacgcggcgagaagtccatcttcaaggggaagtctcccagtaaaatcatggggaaggagaacctcgaggctctgcagagacctaccctgctccacctgattcatgggaaggtgaaggagttttatagctaccaaaatgaagccgtagctatagagaacattaagcgtggtcttgccagcctctttcagacacagctgtcctcaggaaccacgaatgaggtggacatttcaggcaactgcaaggtgacttaccaagctcaccaagacaaagtgataaaaatcaaagctttagacagctgtaagattgcccgcagcggatttactacccccaaccaggttttaggtgtttctagcaaggccacctcagtgaccacttacaaaattgaggactctttcgtgatcgctgtgctggctgaggagactcataacttcggactgaatttcctccagaccattaaggggaagattgtgagcaaacagaagttggagcttaaaacaaccgaggccggcccccgtttgatgtctggtaaacaagctgctgcgattatcaaagcggtcgactcgaagtacaccgccatacccattgtcggtcaggtgttccagagccactgcaagggctgcccatccctgtccgaactgtggcgttcgaccaggaaatacctccaaccagacaatttatcgaaggccgaggccgtacggaatttcctggcttttattcaacaccttcgtaccgccaaaaaagaggagatactgcagatcctgaaaatggaaaataaggaggtcttgcctcagctggtggatgccgtgacatccgcccaaacaagtgacagcctagaagccatcctggacttcctggatttcaagagcgacagcagcatcattcttcaggagagattcctttatgcctgcggctttgcatcccatccgaatgaggagctcctgcgagccctgatttctaagtttaagggttcaataggatcctctgatattagggagactgtgatgattataacaggaacgctcgtcaggaagctgtgtcagaacgagggatgcaaactcaaagcggtcgtggaggccaaaaaactcattctcggtggacttgagaaggctgagaaaaaagaagatacccgcatgtacctactggccttaaagaacgccctcctgccagaagggataccgtcattgctcaagtatgctgaagctggtgaaggccctatcagtcatcttgccaccaccgccttgcagcggtacgacctgcccttcattacagatgaggtgaaaaaaaccctcaaccgcatctaccaccagaataggaaggtgcacgaaaagacggtgcggactgccgctgcagcaatcatccttaacaataaccccagttatatggacgtaaagaatattctcctctcaattggcgaattaccgcaagagatgaataagtacatgttagcaatcgtgcaggatatcctgcggtttgaaatgcccgcatccaagatcgtgaggagggttctgaaggagatggtcgcgcacaactacgataggttcagcagaagcgggagctcttcggcctatactgggtacattgaaagatcaccgagaagtgcctctacctattcactggacattctgtatagcggctccgggattctgcggaggagcaacttgaacatcttccagtatattggaaaagccggtctacatgggtctcaggttgtgatcgaagcccaaggactcgaggccctgatcgctgccacgccagacgagggcgaagagaaccttgactcttatgcaggtatgtctgctatcctgtttgatgtgcaactgcgacccgtcaccttcttcaacggctacagcgacctcatgagcaagatgctgagcgcgtccggtgaccccatttcagtcgtgaaaggtctcatactacttatcgatcacagtcaggaactgcagctccaatccggattgaaagctaacattgaagtgcaggggggcctagcgatagatatcagcggggcgatggagttctccttgtggtaccgggagtcgaagacacgggtgaaaaatagggtgaccgtcgtgatcacaactgatataacagttgacagttccttcgtcaaagcgggcttggagacttccacagagaccgaagctggtctcgagttcattagcacagtccagttcagtcagtatccattcctagtctgcatgcagatggacaaagatgaggccccattccgtcagttcgagaagaaatacgaaagattaagcacagggcgtggctatgtgagccagaaaaggaaggaatcggtactcgccgggtgcgagtttccactccaccaagagaactcagagatgtgtaaggtggttttcgcccctcagcccgactcgacaagttccggctggttc

SEQ ID NO: 5459 - DNA, 2682 bp, Artificial Sequence
  derived and/or modified sequence
atgatcctgctggctgttctgttcctgtgcttcatctcctcatactcggctagcgtaaagggacacactactgggctgtcacttaacaatgacagactgtataagctgacttacagcacggaagtgctgctcgatcggggaaaggggaaattgcaggattcggtcggataccggatctcttccaatgtggacgtcgcgctgctgtggcgaaacccggacggagatgatgaccagctcattcagataactatgaaggacgtgaacgtggaaaatgttaatcagcaacgcggcgaaaagtccatcttcaagggaaaatcgccatccaagatcatgggcaaagagaatctggaggcgcttcagcggccgaccctgctgcatctcatccatggtaaagtgaaggagttctactcttatcagaacgaagccgtggccatcgagaacattaagcgcgggctggcctcgctcttccagacccagctctcgtcgggcaccactaatgaagtcgacattagcggtaactgtaaggtgacttaccaggcacatcaagacaaggtcatcaaaatcaaggccttggatagctgtaagatcgcgcgctcaggattcacgaccccgaaccaagtactgggagtgagcagcaaggctacctccgtgactacctacaagatcgaagattcgttcgttatcgccgtcttggccgaagaaacccacaattttgggctgaatttcctccagaccatcaagggcaaaattgtctctaagcaaaagttggaactcaagaccacggaggccggaccacgcctgatgtcgggcaagcaagcagcagcaatcatcaaggccgtggattcgaagtacactgcaatcccgatcgtgggacaggtgttccagtcacactgcaagggctgcccgtcccttagcgagctctggagatccaccagaaagtatctgcagcccgataacctctcgaaagcagaagccgtgcgcaatttcctcgccttcatccagcacctgcgcaccgcaaagaaagaagagatcctgcaaattctgaaaatggaaaacaaggaggtgcttccccaactggtggacgctgtgactagcgcacagacctcggacagcctcgaagccatcctggacttcttggacttcaagagcgactcatccatcatcctgcaggaacggtttctgtacgcatgtggattcgcttcacatccgaacgaagagttgctgagagcgctgatttccaagtttaaaggatcgatcgggtcgagcgacatcagggaaaccgtcatgatcattaccgggactctcgtcagaaagctgtgccaaaacgagggctgcaaacttaaagctgtggtggaagctaagaaattgatcctgggcgggctcgagaaagctgagaagaaggaggacacgagaatgtacctcctggcccttaagaacgctttgctgccagagggcatcccatccctgctgaagtacgcagaggcaggagagggaccaatctcccacctggccactactgcgctgcaacggtacgaccttcccttcattactgatgaggtgaagaaaaccctcaacagaatctatcatcaaaacagaaaagtccacgaaaagactgtgcggaccgcggccgccgcaattatcctcaataacaatccttcctacatggacgtgaagaacatcctgctctccatcggagaactccctcaagagatgaacaagtacatgttggcgatcgtgcaggacatcctcaggtttgagatgccggcctccaagatcgtgcgccgcgtactgaaggaaatggtagcccataactacgatcgttttagtcgctccgggtcatcaagcgcctacactggatacattgagcgctcgccccgctcggcgagcacctactcgttggacatcttgtactcaggttcgggcatcctccggcggtccaacctgaacatcttccagtacatcggaaaagcaggactgcatgggagccaagttgtgatcgaagcccagggactggaagcgttgatagccgcgactcctgacgaaggagaggaaaacctcgattcctacgccggaatgtcggcgattctctttgacgttcaactgcgccctgtgacctttttcaatggctactcagatcttatgtcgaaaatgctgtcggctagcggcgatccaattagtgtcgtgaagggtcttatcctgctgatcgatcactcgcaggagcttcagcttcagtcaggactcaaagccaacattgaagtgcagggagggctcgccatcgacatctcgggagcgatggagttttcattgtggtaccgcgagtctaagacccgggtgaaaaacagggtgaccgtagtcatcaccactgatatcacggtcgactcctcgttcgtgaaggcgggactcgaaacctcgactgagactgaagctggactggaattcatatcgacggtgcaatttagccagtacccgtttctggtttgtatgcagatggacaaggacgaagccccgttccgacaattcgaaaagaagtacgagaggctcagcacgggtcggggatatgtgtcacagaaacggaaggaatccgttcttgccggctgcgagttccctctccaccaagaaaatagtgagatgtgtaaggtcgtgttcgcgccgcagccggattccaccagctccggttggttc

SEQ ID NO: 5460 - DNA, 2682 bp, Artificial Sequence
  derived and/or modified sequence
atgatccttttggcagtgcttttcctttgcttcattagtagctactcagcatccgtgaaggggcatacgaccggactgtcactgaacaatgatagactgtacaaacttacgtactcgaccgaagtgcttctggatagaggtaagggaaagttgcaagatagcgtcggttacagaatcagcagcaacgtggatgtggcacttttgtggagaaaccctgacggtgatgacgaccaactgatacaaattactatgaaggatgtcaacgtggaaaatgtcaaccaacagaggggcgaaaagtccatctttaagggtaagtccccatcaaagattatgggaaaggaaaacctggaagcattgcagcggcctacgcttctgcatcttatacatgggaaggtcaaagagttctactcataccagaatgaggcagtcgccatcgaaaacattaagaggggactggcctctctgtttcagactcagcttagctccggaaccactaatgaggtggatatatccggcaactgtaaagtgacctaccaagcacaccaagacaaagtcatcaagatcaaagccctggactcctgtaagattgcaagatcgggattcaccaccccgaaccaggtgcttggtgtatcctctaaggcaacctcggtgacgacttacaagattgaagattcctttgtcattgcagtgcttgccgaggaaactcataactttggactcaattttctgcaaaccattaaggggaagatcgtctcgaaacagaagttggagctgaaaactaccgaggcaggtccacgtctcatgtccgggaagcaagcagcagcaatcatcaaagccgtggacagcaaatacaccgccattcctattgtgggtcaagtgtttcaatcgcattgtaaagggtgcccatccctcagcgagctctggagatccacccgcaagtacctgcagcccgataacctttcgaaagcagaggccgtgcggaattttctggcgttcattcagcatcttcgtactgcaaagaaggaagagatactgcagattctgaagatggaaaacaaagaagtgctgccgcaattggtggatgccgtgacgtctgcacagacctcagacagccttgaggcaatacttgactttttggacttcaagagcgacagctcgatcatccttcaggaacggtttctgtacgcctgtggttttgccagccatcctaacgaagagcttctgagagcacttatctcaaagtttaagggatcaattgggagctccgacatacgggaaactgtcatgataatcaccggaacccttgtccgaaaactctgccagaacgaggggtgcaaacttaaggctgtcgtcgaagcgaagaagctgatcctggggggtctggaaaaggccgagaagaaagaggacacccgcatgtaccttcttgccctgaaaaacgcacttctgcctgaagggattccatcgcttctcaagtacgcagaagcaggagagggcccgattagtcacctggcaaccactgcgctgcaacggtatgatctgcctttcattactgatgaggtcaaaaagaccttgaaccgcatataccaccagaacaggaaagtccacgagaaaacggtgaggaccgcagcggcggccattattctgaataacaaccctagctacatggacgtcaaaaacatcctgctttcaattggagaacttccccaagagatgaacaagtacatgctcgcgatcgttcaagatatacttcgatttgaaatgccagcatctaaaatcgtgagacgcgtgcttaaggaaatggtggcacataactacgataggttttctaggtccgggtcgtcgtcagcttacaccggttacattgaacggtcgcctcggtccgcctcgacttattcgctcgacattctgtacagtggaagcggtattcttcgccgctcaaacctgaacatttttcagtacattggtaaggctggtctgcacggatcccaagttgtgattgaagctcagggcctcgaagctctgatagccgcaaccccggatgagggcgaggaaaaccttgattcctacgccggtatgtccgcaatcctctttgatgttcaactgcgcccagtgactttcttcaatgggtattcagatcttatgtcgaagatgcttagcgcgagcggagatcctatctccgtggtgaagggacttattctgctcattgaccattcccaggaattgcagctgcagtccgggctgaaagccaatattgaggtgcagggcggacttgcaattgacattagcggagcaatggaattctcactttggtacagagagtcaaagactcgcgtgaagaacagagtgaccgtggtcatcactaccgacataaccgtggactcttcgtttgtcaaggctggcctcgaaacctccacggaaaccgaggcaggcctggagttcattagcactgtccaattctcacaatacccatttcttgtgtgtatgcagatggataaggatgaagccccatttcgtcaatttgagaagaagtacgaacggttgtccactggccgaggttacgtctcccagaagcgcaaagagagcgtccttgccggatgcgaatttcctctgcatcaggaaaacagcgagatgtgcaaggtcgtgtttgctcctcagcctgattctacctcatccggttggttt

SEQ ID NO: 5461 - DNA, 2682 bp, Artificial Sequence
  derived and/or modified sequence
atgatcctgctcgcggtgctgttcctgtgctttatctcttcttactcggcatcagtgaagggacatactactggcctgtcgctgaataatgatcgtctgtataagttgacgtactccaccgaagtgcttcttgacagaggaaagggtaaactccaagatagtgtgggttaccgtatttcgtcgaacgtcgatgtcgcattgctttggaggaaccccgacggagatgatgatcaactgattcagatcacgatgaaggacgtaaacgtggaaaacgttaaccagcaacggggcgaaaagtccatattcaagggaaagagcccttcaaagatcatgggcaaagaaaacctggaagcactccagaggccgactttgcttcatcttattcacgggaaggtgaaggagttttacagctaccaaaatgaggccgttgcgattgaaaacataaaacgagggctggcaagcctgtttcagacgcagctttcatccgggaccaccaacgaagtggacatttccggcaactgcaaggtaacctaccaagcacatcaggacaaggtcataaagattaaagctctggattcatgtaagatcgcccgctcgggcttcaccaccccaaatcaagtgctcggagtcagctcgaaggcgacctccgtgactacctacaaaatcgaggactcctttgtcattgccgtcttggctgaagaaactcacaatttcggacttaactttctgcagactatcaaggggaaaattgtcagtaagcaaaagttggagcttaaaacgaccgaagcaggaccccggctgatgtccgggaagcaggcagcagccataatcaaagcagtggatagcaagtacactgccattcccatcgtgggtcaggtctttcagtctcactgtaaaggatgtccctctctgtcggaattgtggagatcaacgcggaaataccttcagcctgataatctcagtaaggcagaagcagtccgcaactttctcgcatttatccaacaccttagaaccgcaaagaaggaggaaattcttcaaattcttaagatggagaataaggaggtccttccacaactcgtggatgcagtgacctccgcacagaccagcgactctctggaagcaattcttgattttcttgactttaagtcggattcatcgattattctgcaagaaaggttcctctacgcctgcggttttgctagccatccgaacgaagagttgctgagagctctgatctcgaaattcaaagggtcgataggttcctccgatattcgggaaactgtgatgataatcactggcacgctggtgcgtaaactttgtcaaaatgaaggctgcaagctcaaggctgtggttgaggcgaagaaactgattcttggcggattggagaaggccgaaaagaaagaggacacgagaatgtacctgctcgcgctcaagaatgctcttctcccagaaggcattccatcccttttgaagtacgcagaggcaggagaagggccaattagccatctggcaaccactgcactccagcgctacgatctgccattcatcactgacgaggtcaagaaaaccctgaaccgaatttaccatcaaaatcggaaggtgcacgaaaagaccgtgcgtaccgccgccgctgccatcatattgaacaacaatccaagctacatggacgttaagaacattctgctttccatcggagaacttccgcaagaaatgaacaaatacatgttggcgatagtccaggatattctccgatttgagatgcctgcatctaagatagtgcggagagtgcttaaagaaatggtggcacataactatgataggttttcgagatccggttcatcatccgcatacactggatacatcgaacgctctcccaggtcggcttccacttactcgttggacatcttgtacagcggaagcggaattcttcggagatcgaacttgaacatttttcagtatattggtaaagccggactgcacggatcccaggtggtcattgaagcacaaggacttgaagcacttattgccgccactccggacgaaggtgaggagaatcttgattcgtacgcaggtatgtccgcgatcctgtttgacgtacaactccgaccagtcaccttctttaacgggtatagcgatctgatgtcgaaaatgctttcggcgtcaggtgatcccatctcggtggtcaagggccttatcctcctcatcgatcattcacaagagctgcaacttcagtcgggcctcaaggcgaatatagaagtccagggaggactggcaatagacatctcgggtgcaatggaattttcgctgtggtaccgcgagagcaagactagggtgaaaaaccgcgtgactgtggtgattactaccgatattacggtggacagttcattcgtgaaagcaggactggaaacttcgaccgaaaccgaggcaggtcttgagttcattagcactgtccaattttcgcaatacccttttctggtgtgtatgcaaatggataaggatgaggcgcctttccgacaatttgagaagaaatacgaaagactgtccactggtcgcggctacgtgagccagaagcggaaagagtcggtgctcgcaggttgtgaatttccactgcatcaagaaaatagcgagatgtgtaaggtggttttcgccccacagcctgattcgacctcatccggatggttc

SEQ ID NO: 5462 - DNA, 2682 bp, Artificial Sequence
  derived and/or modified sequence
atgattctgcttgcggttctctttctgtgttttatatcctcctactccgcatctgtaaaaggacacaccactggcttgtcccttaataatgatcgactatataaattaacatattctacagaagttcttctggatcggggaaagggaaaactgcaagattcagtcgggtatcgtattagctctaatgttgatgtggcattgttgtggcgtaacccggatggagacgatgatcaactcattcagataactatgaaagatgtaaacgtcgagaatgtgaatcaacaacgaggcgaaaaatctatttttaaaggcaaaagtccatctaaaatcatgggcaaagagaacttggaagccttacagagacctacactgttgcatctcatacacggtaaagtcaaggagttctactcataccagaacgaggccgtagcgattgagaatattaaaagggggctggcttccctgttccagacgcaattgagttctggtacgacaaacgaagtagatatttccggtaattgtaaagtgacgtaccaggcgcatcaggataaagtcatcaaaatcaaggccctcgattcttgcaaaattgcgcgtagcggctttaccacacctaatcaggtgctcggagtttcgtcgaaagctacaagtgttacgacatataaaattgaagactcgttcgtaatcgccgtactcgcagaagaaacgcataattttgggctaaattttttacaaacgatcaaggggaagattgtaagcaagcaaaaattagaactgaaaacaaccgaggctggcccgagactcatgtcgggaaaacaagcggcggcaattatcaaggcagttgattctaaatatacggcgattcctattgtcgggcaagtcttccagagccactgtaagggttgcccttccctgtcagaattgtggcgctcaacgagaaaatatttgcagccggataatctgtctaaggcagaagcggtacgcaatttcttggcgtttattcaacacttgcgcactgcaaaaaaagaggagattttgcaaattcttaaaatggagaataaggaagttctgccacaactggtagatgcggtgacatcggcacagacgtcggattcattggaagctatccttgattttttggacttcaaatctgactcgtctatcatcttacaagagcgtttcctgtatgcatgcggcttcgcgagccatccaaacgaagaactgttacgtgcattaatttcaaaattcaaaggatcgattggatctagcgacatcagagagacggtgatgatcattactggcacccttgtcagaaagttgtgccaaaatgaaggttgtaaactgaaagcagtcgttgaagctaagaaactcatcttgggcggattagaaaaagccgagaagaaggaagatacacgtatgtatttactggctttaaaaaatgcgcttctgcctgaaggcattccttcattacttaagtatgcggaagctggcgagggaccgattagccacctcgcaacaacagccttgcagcgttacgaccttccattcattacggatgaagtcaaaaagacgctcaacagaatttaccatcaaaatcgcaaagtccatgaaaaaacagtgagaacggctgcggcagcaatcatcttgaataacaatccctcgtatatggacgtgaaaaacattcttttaagcattggcgaactgcctcaagagatgaataaatatatgctggcgatagtgcaagatattcttcgatttgaaatgccggcatctaaaattgttcgaagagtcctgaaggagatggtggcacataattatgacagattttctagaagtgggtcatccagcgcgtacacaggttatattgaacggagcccgagatcagcttcgacctattctctggacatactttatagcggatccggaattctgagaagatccaatcttaatatttttcaatacattggaaaggcaggcttgcacgggtcacaagttgtaattgaagcacagggacttgaagctcttatagccgcaacacctgatgaaggagaagaaaatctggattcttatgctgggatgtccgctatcctttttgatgtccagcttcgtccggttactttctttaatgggtattccgatttgatgagcaagatgctgagtgcgtccggagatccgatttcggtggttaagggcttgattcttctgattgaccacagccaagagctacagttgcaatccggtttgaaggccaatattgaagttcaaggcgggctggcgatcgatatctcaggtgccatggagttctcgttgtggtatcgagagagtaaaactcgtgtgaaaaatagggttacggtcgttatcacaacagatatcacggtagattcttcttttgttaaagcaggcctcgaaacatcaaccgaaacagaggccggactggaatttatctcaacagtgcagttttcacaatacccatttcttgtgtgcatgcagatggacaaggacgaggcgccgtttagacagtttgagaaaaaatacgaacgactgtctacgggaagaggatatgtaagccaaaaaagaaaagaaagcgtcttggccgggtgtgaattccctcttcaccaagaaaattctgagatgtgcaaagtggtttttgcaccacaaccggattcgacttcttcaggttggttt

SEQ ID NO: 5463 - DNA, 2682 bp, Artificial Sequence
  derived and/or modified sequence
atgatacttctagccgtgcttttcctatgcttcatctcctcatacagcgcttcagtgaaaggccacacaacaggactctcattgaacaacgaccgcctgtacaagctgacgtattcgaccgaggtccttcttgatcgtgggaagggcaaactccaggactccgttggatatcgcatttccagtaacgtggatgtggcacttctgtggaggaacccagatggcgatgatgatcagttgatccagataacgatgaaggacgttaatgtcgaaaatgttaaccagcagaggggcgaaaagtcaatcttcaagggcaaaagcccttctaaaattatgggaaaagaaaatctggaggccctccagcgcccgacacttttgcatctgatccatggaaaagtgaaggaattctattcatatcaaaatgaggccgtagcgattgaaaacatcaagagagggctagctagcctcttccagacacagctgagcagcgggaccaccaacgaagtggatataagtggcaactgtaaggtgacctatcaggctcaccaggataaagtcataaaaatcaaggccttggattcttgtaagattgcacggagcgggttcaccactcccaatcaagtcctgggagtgtccagtaaagccactagcgttacgacttacaaaatagaggattcgttcgttatagcagtgctcgccgaggagactcataattttggcctaaacttcctccagactattaagggaaaaattgtgtccaagcagaaactggagttgaagaccactgaggctgggcccaggctgatgtccggcaagcaggctgccgctataattaaggccgtggactctaagtacaccgctatacccatcgtaggccaggtgttccagtcccactgtaaaggttgcccctctctgtccgaactttggagatctactaggaagtacctgcagcctgacaacctcagcaaggctgaggctgttcgaaatttcctggcattcatccagcacctgcggacagctaaaaaggaagaaatcctgcagatcctgaaaatggagaacaaggaggtcctcccccagctcgtggatgctgtgaccagtgctcagacaagcgattccctcgaggccattctggactttttggacttcaaatcagatagttccataatactccaggaacggtttctgtacgcttgcggctttgccagtcacccaaacgaggaacttctgcgcgccttaatctccaagttcaagggcagtataggcagcagcgatattcgagaaactgttatgattatcaccggaaccctcgtcagaaaactctgtcaaaacgagggatgcaaactgaaggcagtggttgaagcaaagaagctgatcctgggcggccttgaaaaggctgaaaagaaagaagatacaaggatgtacctactggcactgaaaaatgccctattgcccgaagggatcccctcactcttgaaatatgccgaagccggagaggggcctatctcgcacctcgccactaccgctctgcaacgatacgatctgccatttatcactgatgaggttaagaaaaccctgaatcggatataccaccagaatcggaaggtgcatgaaaagaccgtaagaactgcagcggctgccatcattctgaacaacaacccctcatacatggacgtcaagaacattctgctctcaataggcgaactacctcaagagatgaacaaatacatgcttgccattgtgcaagacattttgaggttcgaaatgcctgcgtctaagatcgtccgccgtgtcctgaaagagatggtggcccacaattatgaccggttttcacgctctgggtctagctcggcgtataccggatacatcgagagaagcccacgtagcgcctcgacctacagcctggacatcctgtacagcggtagcggaatcttgcgccgctctaatctcaatatctttcagtacatagggaaagcaggcctgcacggttcacaagtcgtaattgaggctcaggggctggaggctcttatcgccgccacccccgacgagggcgaggagaatctggattcttacgctggtatgagtgcgatcctcttcgacgttcagcttaggcccgtgacttttttcaatggatattcagatctgatgagcaaaatgcttagcgctagcggtgaccctatcagcgtagtgaaaggcctcatcctattgatcgaccactctcaagagctgcagttgcagagcgggctcaaggctaatatcgaagtgcagggcggactggccatcgatataagcggtgcgatggagttctcactgtggtatagggagtctaaaactcgcgtgaaaaacagggtaactgtggttattacgaccgatatcaccgtggattcctccttcgtgaaagcaggattggagacaagtaccgagaccgaagctggcctggagttcatcagtacagtgcagttttctcaatatccttttctggtgtgcatgcaaatggacaaagacgaggcaccctttaggcagtttgaaaaaaagtacgagaggctgtctacaggtcgcggatacgtgtctcagaagaggaaagagtccgtgctggctggctgtgagttccccttgcaccaggagaactctgaaatgtgcaaagtcgtttttgccccccaacccgactcaacatcctctggctggttc

SEQ ID NO: 5464 - DNA, 2682 bp, Artificial Sequence
  derived and/or modified sequence
atgattcttcttgcagtgctctttctttgtttcatctcctcatactcagcgagcgtcaaaggtcacaccaccgggctcagcctgaacaacgatcgcctttacaaattgacctactcgactgaagtgctgctggatagaggtaagggaaaactccaggactccgtcggttacagaatctcgtccaatgtcgacgttgcgcttctttggcggaatccagatggagacgatgaccagctgatccagattaccatgaaggatgtgaatgtggaaaatgtgaaccaacagcggggcgaaaagtccattttcaaaggcaaaagcccttcgaagattatgggaaaggaaaaccttgaggcgctccaaagacctactttgcttcatttgatacatgggaaggtgaaggagttctattcctaccaaaacgaagcagtcgcaatcgaaaacataaaacggggactggcatccctgttccaaacccagctgtcgtccggaactactaacgaagtcgatatctcaggaaactgcaaggtcacttaccaagcccatcaagacaaggtcatcaaaatcaaggcactggattcctgtaagatcgccagatcgggattcactactcctaaccaggtgctgggagtctcgtcaaaggcaacttctgtgaccacgtacaagattgaggactcgtttgtgatcgcagtgcttgcggaggagactcacaactttggactgaatttcctgcaaaccatcaaaggtaagattgtgtcgaagcaaaagctggagctgaaaacgaccgaagcaggtcctcgccttatgtccggaaagcaagccgctgccattatcaaggctgtggattcaaagtacacggcgattcctattgtgggtcaagtgttccaatcgcattgtaaagggtgcccctccctttccgagctctggagatccacccggaaataccttcaacccgataatctgtcgaaagcagaagccgtccggaactttctggcattcatacagcatcttagaactgccaagaaggaagaaatacttcagattctcaagatggagaacaaagaggtcctccctcaactcgtggacgctgtgacctccgcacaaacctcggactcactcgaagcgatcctcgatttccttgatttcaagtcagattcaagcataattctccaggaacgttttctgtacgcatgtggatttgcatcacatcccaatgaagaactcctgcgggcacttatatcgaagttcaaaggaagcattggatcgtcagatattagagaaactgtgatgatcataacggggacgctggtgagaaagctctgccagaatgaaggatgcaagctcaaggcggtggtcgaagcaaagaaacttattctggggggtcttgagaaggccgagaaaaaggaagatacccggatgtacttgcttgccttgaagaacgccctccttcctgagggtatcccttcgttgctgaagtacgcagaagctggagagggtccaattagccatctcgcaaccactgcccttcaacggtacgacctcccttttatcaccgacgaggtgaagaaaaccctcaatcgtatttaccatcaaaaccgtaaggtgcatgaaaagaccgtcaggactgcggcagccgcaattatcttgaataacaaccccagctacatggacgtgaaaaacatccttctgtcaataggcgagctcccccaggaaatgaataagtacatgcttgccatagtgcaagatatccttcgctttgaaatgcctgcttccaagattgtgcggcgtgttctgaaggaaatggtcgctcacaattacgataggttctccagatcgggtagctcgtcagcatacaccgggtacattgaaaggtcgccgcgctcagcaagcacctactcactggatattctttactcgggatcggggattctgagacgatcgaatctcaatatctttcagtacatcggcaaggccggattgcacggatcgcaggtcgtgattgaagcacagggacttgaagcccttatagcagcaactcctgatgaaggagaggagaaccttgattcctacgcggggatgtcggctattctttttgatgtgcagcttcggccagtgacgttctttaatggatactccgacctgatgtcgaaaatgctgtcagcatcaggggaccccatatcggtggtgaagggcttgattctgctcattgaccactcgcaagagctccagctgcaatcggggctgaaggccaacattgaagtgcaaggaggattggcaattgatatcagcggagctatggaattttcgctgtggtaccgggaatccaagacccgggtcaagaaccgtgtgactgtcgtaatcaccactgatattactgtggacagttcatttgtcaaggcagggctcgaaacttccacggagactgaagccggacttgaattcatttcaactgtgcagttttcgcagtacccctttcttgtgtgtatgcaaatggacaaagatgaggcgccttttaggcagtttgaaaagaagtatgaaaggctttccactggtcgcggctacgtctcgcaaaagcggaaggagagcgtcctggccggatgtgagtttcctctccaccaggaaaattccgaaatgtgtaaggtggtgtttgcaccacaacccgactcgacctcaagcggatggttc

SEQ ID NO: 5465 - DNA, 2682 bp, Artificial Sequence
  derived and/or modified sequence
atgattctcctggctgtgctgtttctgtgttttattagctcttatagcgccagtgtgaaagggcatacgaccggtctttccttaaacaatgaccgcctgtacaaattaacttattcaacagaagtactgctagatcgaggaaagggaaaattgcaggacagcgtgggctatagaataagctccaatgtggatgtagccctgctgtggagaaaccccgatggcgatgacgatcagttgatccaaataactatgaaagacgtcaacgtggagaacgtgaaccaacagcggggtgagaaatcaatcttcaagggcaagtcgccatcaaaaatcatgggcaaggaaaacctggaagccctgcaacgacccaccctgctccatctgatccacggcaaggtgaaagagttctatagctatcagaacgaagctgtggcaattgagaacatcaaaagggggctcgcctctctcttccagacacaactgtcatccggtaccacaaatgaagtggacatttctggaaattgcaaagtgacatatcaggcgcaccaagacaaagtgattaagattaaggcactcgattcttgcaaaatcgctagatccggctttactaccccgaatcaagtcctcggagtgagttccaaggccacctccgtcaccacatataaaattgaggattccttcgtgatagctgtgctagcagaggagacccacaatttcggcttaaatttcctgcagaccattaagggaaagatcgtttctaagcaaaaactggagttgaagaccactgaggctgggcctcgattgatgtccggaaagcaggcagcggccataattaaagccgttgattcgaaatacacagccattccgattgttggccaggtgttccagtctcactgcaagggctgcccttcactctccgaactctggaggtcaaccagaaagtacctccagcctgacaatctttctaaggcggaagctgtgagaaactttctggcttttatccaacatctgaggacagcaaagaaggaagagatcctgcagatacttaaaatggaaaataaagaggttttgcctcagctcgtcgatgcggtgacttcagcgcagaccagcgactctctcgaggcaatcctggacttcctcgattttaagtctgattcttctataatccttcaagagcgtttcttatacgcttgcggcttcgcgagtcacccaaatgaggagctattacgggccctgatttcaaagtttaaaggatctatcggcagttcagacatacgggagacagtgatgattataacaggaacccttgttcgcaagctttgtcagaatgagggttgtaagctaaaggcagtggtagaggctaagaagttgatcctgggaggactggaaaaagccgagaagaaggaggacacccggatgtatctcctagccctcaagaacgccctgttgccggagggtattccttcattgctcaagtatgctgaggctggcgaaggtccgatctcacatttggctaccacggctctgcaacgatatgacctaccttttataacagatgaagtcaaaaaaacactgaacagaatctaccaccagaatagaaaggttcacgaaaagacagtgaggaccgcagctgccgccatcattcttaataacaacccatcttatatggatgtgaagaatattctgctgtcaataggcgaattacctcaagagatgaataagtatatgctagcaatcgtccaagacattctgcgttttgagatgccagcatctaaaatcgtccgaagagttctgaaagagatggtagcgcataattatgaccgctttagccgatccggctcgagtagcgcatacaccggctatatagagcgaagtccccgtagtgcatcaacttactctctcgatattctctacagcggttcagggatactgaggaggtccaatctcaacatttttcaatacattggcaaggccgggctgcacgggagccaagtggtgatagaggcccagggcctcgaagcgctgatcgctgcaacgccagatgaaggagaagagaatttggattcttacgctgggatgtcggccatactgttcgatgttcaattgcgccccgttaccttcttcaacgggtacagcgatctgatgtctaagatgttatccgctagcggcgaccctatctcagtggtaaaaggcctgatactacttatcgatcattcgcaggagcttcagttgcagtcagggctgaaagctaatatagaagtacagggcgggttggccatcgatatttccggggcgatggagttcagtttatggtatcgggagtccaagacacgagtaaaaaacagagtgaccgtggtcatcactacagatattaccgttgattcttcgttcgtcaaggccggattggagactagcactgagactgaagccggactggaatttatcagtaccgttcagttttcccagtacccattcctcgtctgtatgcagatggacaaggatgaagcccccttccgacaatttgagaaaaaatacgagcgtttgtcgacgggccgcggttatgtttcccagaagcgcaaggaaagcgtactggctgggtgtgagttcccactccaccaggaaaacagcgaaatgtgtaaagtggtcttcgctccccagccggactctacttccagcgggtggttc

SEQ ID NO: 5466 - DNA, 2682 bp, Artificial Sequence
  derived and/or modified sequence
atgatcctgcttgcagtgctgttcttgtgctttatctcctcctactccgcttcagtcaagggtcatacgacgggattgagcctgaataacgaccgcctgtacaagttgacctactcaactgaagtcctgctcgaccgcggaaaggggaagctgcaggattccgtcggatacaggatctcctccaatgtggatgtggctctgctgtggcggaacccagacggtgacgatgaccaactcattcagatcactatgaaagacgtcaatgtggagaacgtgaaccagcaacgcggagagaagtcgatcttcaagggaaagtcgccaagcaagatcatggggaaggaaaacttggaagcgctgcagcggcctaccctgctccatctgatccatggaaaagtcaaggaattctactcgtaccagaacgaagcagtggccatcgagaatatcaagcgcggattggcctcccttttccagacccagctgtcgtccgggaccactaacgaagtcgacattagcggcaattgtaaggtcacctatcaagcccaccaagacaaggtaatcaaaatcaaggccctcgacagctgcaagattgcccgctcaggatttaccactccaaaccaggtcctgggagtgtcatcaaaggctacctcggtgactacttacaagatcgaagattccttcgttatcgccgtcttggcagaggaaacgcataacttcggactgaacttcttgcagactatcaagggaaagatcgtgtcaaaacaaaagctggaacttaagaccaccgaagcggggccgcggctgatgtcgggaaaacaggctgccgccatcatcaaggccgtggactcaaaatacactgcaatcccgatcgtgggccaagttttccagtcgcattgtaagggctgcccttcactgtctgagctgtggcggagcaccagaaagtacctgcagcccgataatctgtccaaagccgaagcagtccggaatttcctggccttcatccagcacctccgcaccgcaaaaaaggaagagatcctgcaaatccttaagatggagaataaggaagtcctgccgcagctcgtggacgctgtcacgagcgcacagacttccgattcactcgaagccatcctcgatttcctcgacttcaaatcggactccagcattatcctgcaagagaggttcttgtacgcgtgcggtttcgcgtcccaccctaatgaagagcttctgcgcgccctcatctcaaagtttaaaggatcaatcggctccagcgacatcagagaaaccgttatgattatcactggaactctggtgcgcaagctctgccagaatgagggttgcaaactgaaggctgtcgtcgaagccaaaaagctgatcctgggtggtttggaaaaagccgagaagaaggaagatacccgtatgtacctcctcgccctcaagaacgcactgctgccggagggaattccaagcctcctcaaatacgccgaggctggcgagggaccgatctcgcatctggctactacggccctgcaacggtacgacctcccattcatcactgatgaagtgaagaaaacgttgaatcggatttaccaccaaaaccgcaaggtgcacgaaaaaaccgttcggaccgctgcggccgcaatcatcctcaacaacaatccctcgtacatggatgtgaagaacatactgctgagcatcggagaattgccgcaggagatgaacaagtacatgctggcaatcgtgcaagacattcttagattcgagatgccagcgtcgaagatcgtccggcgggtcctgaaagaaatggtggcccacaattatgaccggttttccaggagcgggagctcttcagcctacaccggatacatcgaaagatcacctcgctcagcatcgacttacagcctcgatatcctgtacagcggttccggaatcctccgccggagcaacctgaacatttttcagtacattggaaaggccggcctgcacggctcccaagtggtgatcgaggcccaaggtctggaggcgctgatcgcagccaccccggatgagggcgaagaaaacctggattcgtacgccggaatgtcggcgatccttttcgacgtgcaacttaggcccgtgactttcttcaacggatacagcgatttgatgtcgaaaatgctgtcggcgagcggtgatccaatctcggtggtgaaaggtttgattcttctgatcgatcattcgcaagaactgcagttgcaatctggattgaaagccaacatcgaggtacaaggtggtctggccatcgatatctcaggagcgatggagttctccctgtggtacagggagtcaaagacccgagtcaaaaacagagtgaccgtggtgatcactaccgacatcaccgtggattcgtcattcgtcaaagccgggctcgagacttcaacggaaaccgaagccgggctggaattcatctccactgtgcaattttcacagtacccatttctggtgtgcatgcaaatggacaaggatgaggccccgttccgccagttcgaaaagaagtacgaaagactgagcactggccgcggttacgtcagccagaaacgcaaggaatccgtgcttgccggctgcgagttccccctccatcaggaaaattcggaaatgtgcaaggtcgtgttcgccccgcagccggatagcacctcgagcggctggttc

SEQ ID NO: 5467 - DNA, 2682 bp, Artificial Sequence
  derived and/or modified sequence
atgattctgctggccgttttgttcctctgtttcatcagtagctattctgcaagtgttaagggtcataccacagggctgtccctaaacaatgatcgactatacaagctgacatacagcacggaggtgcttctggaccgaggcaaagggaaactgcaggattctgtgggatatcggatctcaagcaatgtcgatgtggccttgttgtggcggaatcccgacggggacgatgaccagctgattcagataactatgaaggacgttaatgtggagaatgtgaaccaacagcgcggagagaaatctattttcaagggcaagtccccaagcaagatcatgggtaaggaaaacctggaagccctacagcgaccgacacttcttcacctcatccacggaaaggtgaaggagttctatagctaccaaaatgaagctgtggccatcgagaatatcaaaagaggcttggcttccttgtttcagacacagctctcctctggcaccaccaacgaagtggatatctccggaaattgtaaggtgacttaccaggcacaccaggacaaggttatcaagataaaagcactagacagctgcaagatcgctaggagcggattcaccactcccaaccaagtactaggggtatccagtaaagccacgtcagtcacgacctataagatagaggacagtttcgtcatcgccgttttggccgaggagacacacaattttggattgaacttccttcaaacgatcaagggcaaaattgtctccaaacaaaaactagagctgaagacgacagaggctggcccaagacttatgtccgggaaacaggctgctgctattatcaaagcggtggactccaaatatactgctatacctattgtgggccaggttttccagagccattgcaaaggctgtccctcactgtctgagctgtggaggagtactcgcaagtacttgcagcccgataacttaagcaaagccgaggccgttagaaacttcctggcatttatacaacatctcagaacagctaaaaaggaggaaatcttacagatccttaagatggagaacaaggaagtgcttccacagttggtggatgccgtgacctctgctcagacatctgacagcttagaagcaattcttgactttcttgatttcaaatcggactccagtataatcctgcaggaacgattcctgtatgcttgtggattcgcatctcatccaaacgaggaattgctgcgagccctgatttcgaaatttaaggggagtattggttcctcagatattagagagacagtcatgataatcacaggcaccctcgtaaggaaactatgtcaaaatgaagggtgcaaactgaaggcggtcgtggaagccaaaaagttaatcctaggaggcctggagaaagcagaaaagaaggaagatacccgcatgtatctgttagcgctgaaaaatgccttgctcccagagggcataccgtcactgctaaagtacgccgaagccggggaaggcccaatcagtcaccttgcgactacagcccttcagcgatacgacctcccctttatcaccgatgaagttaaaaagacactcaaccgtatctaccaccagaaccgcaaggtgcatgagaagacagtcaggaccgctgccgctgcgattattctgaataataaccccagttacatggatgtcaagaatatactcttatcaataggggaactacctcaggaaatgaataagtacatgctggccatcgtccaggatatactgagattcgagatgcccgcttccaagattgtgaggagggttctgaaggaaatggttgcgcacaattacgaccgcttttcccggagtggatcaagttctgcctatactggatacatcgagcgtagccctcggagcgccagcacctactctctggatatcctctacagcgggtcgggaatactcaggcgaagcaatctcaacattttccaatacatcgggaaggcaggcctgcacggctctcaggtcgttatcgaggcccaaggcctagaggctttgatcgccgcgacccccgatgagggcgaggaaaatctcgatagctatgctggaatgagcgctatcttatttgatgtccagctgaggccagtgaccttctttaatggctactcagaccttatgtccaagatgcttagcgcttcaggtgacccaatttcagttgttaaaggcctgatactactcatagaccactcccaggagttgcagctgcagtcggggctgaaggcgaatattgaggtgcagggcggtctggccattgatattagcggtgctatggagttttccctctggtaccgagagagtaaaacacgcgtgaagaaccgcgttacagtggttatcaccacggatatcaccgttgactcctcatttgttaaagcgggacttgagacctctacggaaaccgaggcaggcctggagttcatctcaaccgtacagttttcccaatatccatttctggtttgcatgcagatggacaaagacgaagcaccgttccgccagttcgaaaaaaagtatgagcggctgtctacaggcaggggctatgtgtcccagaaacgaaaagaaagtgtattagccgggtgcgaatttcctttgcatcaggagaattcagagatgtgcaaagtcgtgtttgccccgcaaccggactcaacctcctctggatggttc

SEQ ID NO: 5468 - DNA, 2682 bp, Artificial Sequence
  derived and/or modified sequence
atgatcctactggccgtgctgtttctgtgttttatcagcagctacagcgcgagcgtaaaaggtcacaccacaggtcttagccttaataatgatagattgtacaagctcacttactccactgaggtgttgctggatagaggtaagggcaagttgcaggactccgtcggatatcggatatcatccaacgtggacgtggcccttctgtggaggaaccccgacggagatgacgatcagctaatacagattactatgaaggatgtcaacgtagaaaatgtaaaccagcaaaggggggaaaagtccatctttaaagggaagagcccttcaaaaatcatggggaaggagaatttagaagcactgcaaaggccaacactgttgcacctgattcacggaaaggtaaaggagttctatagctaccagaatgaggcggtggcaatcgaaaacatcaagagaggactagcaagtctattccagacccaactgtcttctgggaccacaaatgaagtagacatttcgggaaactgcaaagtcacgtaccaggcacatcaggataaagttatcaaaatcaaggccttggactcgtgcaagatcgccagaagcggttttactacgcctaatcaggtgctgggtgtaagttctaaggccacgagcgtcactacatataagattgaggattcatttgtgattgctgtactcgccgaagagactcacaacttcgggctcaactttctgcagacgattaaaggcaagattgtctccaaacagaagctggagctgaagaccacagaggcgggacccaggctgatgtccggcaagcaggctgctgcgattataaaagcagtcgatagtaaatacacagcaatccctatcgttgggcaggttttccagtcccactgtaagggatgcccttcactgagtgaattgtggagatcaaccagaaagtatcttcagccggacaatctgtctaaagccgaggctgtgcgcaactttctggcattcatacagcacttgagaacagcgaaaaaggaggagatactgcagatcctaaaaatggagaacaaggaggtcctaccccagctagtagacgccgtcacttccgcccagacgagcgactcactagaggccattctcgatttcctggatttcaagtccgactccagtataatcctgcaggagcggtttttatatgcatgtgggtttgcaagtcaccctaacgaagagctgctccgcgccctgatcagcaagttcaagggttcgataggttcctccgacattcgagaaactgtgatgataatcactggtacactggtacgaaagctgtgccagaacgaaggctgcaagctgaaagcagtagtggaagctaagaaacttattctgggtggtctggagaaagcagaaaagaaggaagacacccggatgtatttattggctttaaaaaacgcgttgttgcccgaaggcatccccagcttactaaagtatgccgaagccggggaggggcctatttcgcatcttgcaactacggcgttgcagagatatgacctgccctttattaccgacgaagttaagaagacgctgaacagaatctaccaccagaacagaaaggtccacgagaaaaccgtgaggaccgccgcagcagcgattatcctcaacaataaccccagctatatggatgttaagaacattttgttgtccattggggagcttccgcaggagatgaacaagtacatgctggcaattgtccaggatatcctcagatttgaaatgcccgccagtaagatcgtgcgcagagtgctgaaagagatggttgcccataactatgatagattttcccgctctggctcttcttcggcctacaccggctacatcgaacgtagtccaagatctgccagcacatacagcttggacatcctgtatagtgggtcagggatcctgcgccgttcaaacctcaatatcttccagtacataggaaaagccggtctgcacggaagtcaggtcgtgatcgaagcccagggactggaagccctgatagctgcaacccccgatgaaggtgaggaaaatcttgattcctacgccggcatgagtgccattctgttcgacgtgcagctgagacccgtcactttttttaatgggtatagcgacttaatgagcaaaatgctttctgcctccggggaccctatctcagtagtaaaaggtctgattctcctgattgaccattcccaagagctgcagctgcagtccggcctcaaggcaaacatagaggtgcagggcggcctggccatcgatatctccggagcaatggagttcagtctgtggtatcgcgaaagtaagacacgggtgaaaaaccgcgttacagttgtgattaccacggatattactgtagactcttcctttgtgaaagctggtctggaaaccagtaccgaaaccgaagcagggctggagtttatctctacggtgcaatttagccagtaccccttcctcgtttgtatgcagatggacaaggatgaggccccgttccggcagttcgaaaaaaagtacgaaaggctgtcaacgggccggggttacgttagccagaaaaggaaagagagtgtactcgcaggttgcgagttcccacttcatcaggagaattcggagatgtgtaaagttgtgttcgccccccagcctgactccacgtcctctggctggttc

SEQ ID NO: 5469 - DNA, 2682 bp, Artificial Sequence
  derived and/or modified sequence
atgatcctactggccgtgctttttttatgtttcataagctcttactccgccagtgtgaaaggccacacaactggactaagcctcaacaatgaccgcctctataaactgacttactcaacggaggtgttgcttgataggggaaaggggaagcttcaggacagcgtgggttaccggatctcctctaatgtggatgtagccttgctgtggcgcaacccagacggggatgacgaccagctcatccagataaccatgaaggatgtcaacgtggagaacgtgaaccaacagcggggggagaaatcaatttttaagggtaaaagcccttcaaaaattatgggaaaagagaatcttgaggcactccagcggccaacgttattacatctgatacatggaaaggtaaaagagttctacagctaccagaatgaagcggtagctattgaaaatatcaagaggggactcgcatccctgttccagactcagctgtctagtggtactacaaacgaggtcgacataagtggaaattgcaaggtgacgtatcaggcacatcaggacaaggtgataaagattaaggcccttgacagttgtaagatcgccaggagtggcttcacaacgccgaatcaggtgcttggggtgtcctccaaggccacctccgtcacaacatataagattgaagattcctttgtcatagccgtgttagctgaggagacgcacaactttggcctgaactttttgcagaccatcaagggcaagatcgtatcaaaacaaaagcttgagttgaagacaaccgaggctgggccgcggttgatgtcaggaaaacaggctgccgcaataatcaaggcagtggactccaagtacacagcaattccaattgtggggcaggtttttcagtcccattgcaagggctgcccttccctgtcagagctgtggcgttcaacacggaaatatcttcagccagataatctatcaaaagctgaagcggtgcgcaacttccttgcttttatccagcatttgaggacggccaagaaagaagagattctccagatcttgaaaatggagaataaagaagttttacctcagctcgtcgacgcagtcaccagcgcacagacctcagactctctcgaggccattcttgattttctcgattttaagtctgatagcagcatcattctgcaagagaggttcctgtacgcatgtgggttcgcctctcacccaaatgaggagctgctgagggcactgattagtaagttcaaggggagtatcggctcgtcggacattcgggaaacagttatgatcataactgggacgctcgtaaggaaactatgccagaatgagggatgcaaactgaaggcggtggtcgaggcaaagaaactgattctcggtggccttgaaaaggccgaaaagaaggaggatacacgcatgtacctgttggcgctgaaaaatgctttgctcccagagggcatcccaagcctcctgaagtatgctgaagcaggtgaggggcccatcagccacttggctacgactgctcttcagcgctacgatttgccctttatcaccgacgaggtcaagaagaccctaaacagaatctatcatcagaacaggaaggtgcatgagaagaccgtcagaacagccgctgccgcgatcatcctcaacaacaaccctagctatatggacgtcaagaatattctcctgagcattggggagctgccccaagagatgaacaaatatatgctcgccatcgttcaggacattctgcgattcgagatgcccgcatcgaagatcgtgagaagggtcctgaaagagatggtggcacataactatgaccggttctccagatctggcagctcctcagcgtacacaggatatatagagcgtagcccgcgttctgcatcaacgtactctctggatatactttattccgggtctggcatcttgcgtcgttctaatcttaatatctttcagtacatcggaaaagcaggactccacggttcacaggtagtcatcgaggctcagggactcgaagctcttattgctgctacaccagacgagggggaggagaatttggatagctacgcagggatgtcagccatcctcttcgatgtgcaactcagaccggttaccttcttcaatggctactctgatctaatgagcaaaatgttatctgcatcaggcgaccctatttctgttgtaaagggactgatcctgctgatcgaccattcccaagagctgcagctgcagtctggactgaaagccaatatcgaggttcagggggggctggcaattgacattagtggagcaatggaattctcactctggtatcgggagagcaaaaccagagttaaaaatcgagtgacagttgtcattactaccgacataaccgtagactcttcctttgtgaaagccggactagagacttctacagagaccgaagccggactcgaatttatttcaacggtacagttttctcagtacccattcttggtgtgcatgcagatggataaagacgaggccccattccggcaattcgaaaaaaagtacgagcgcttgagcaccggccgcggctatgtatcccagaagaggaaagaatcggtactcgcaggatgtgagtttccattacaccaggagaactccgagatgtgtaaagtggtttttgccccccagccagacagcacatcgtccggctggttt

SEQ ID NO: 5470 - DNA, 2682 bp, Artificial Sequence
  derived and/or modified sequence
atgattcttctggccgtgctttttctttgtttcatttcttcctactcggcatcagtgaagggccatacgaccggactgtcacttaacaatgatcgtctctacaaactcacctacagcaccgaagtgcttcttgatagaggtaaaggcaaactccaagactctgtcgggtaccgcatctcctcgaatgtggatgtggccctcctttggcgcaatccagacggtgatgacgaccagctgattcaaattacgatgaaagacgtcaatgtcgaaaacgttaatcaacaaagaggagaaaagtcgatcttcaagggtaagtccccttcgaagataatgggcaaggagaatcttgaagcactccagcggcctaccttgctgcacctgattcatggcaaagtgaaagaattctactcctaccagaacgaggctgtcgcgattgaaaacatcaagcggggactggcatcgctcttccaaacccagctttcatcgggaactaccaacgaggtcgatatctccggcaattgtaaagtgacctaccaagcacatcaggacaaggtcattaagataaaagcacttgattcctgtaagattgccagatccggatttactaccccaaaccaggttctcggtgtgtcatcaaaggcaacgtccgtcactacttataagatcgaagattcgttcgttatcgcagtccttgccgaagagactcacaatttcggtctgaatttccttcagactatcaagggaaagattgtcagcaagcaaaaacttgagctcaaaaccaccgaagcgggtccacgactgatgtcaggtaagcaagccgcggcgattatcaaagcagttgattcaaaatacactgccatccctatcgtgggtcaagtgtttcagtctcactgtaaaggatgcccatcgctttcggagctttggcggtcgacgcggaaatacctgcagcccgataacctgagcaaagctgaagccgtcagaaacttcctggcatttatccagcacctgaggaccgcaaagaaggaagaaatcttgcaaatcctgaagatggagaacaaagaagtgcttcctcagttggtggacgcagtgacttcagcccaaacctcggatagcctggaggctatcctggattttctggactttaagtccgactcgtccattattctgcaggaaagattcctttacgcctgtggttttgcatcgcatcccaacgaggaactcctcagggcccttattagcaagttcaaggggagcatagggtcgtcagatatacgtgaaacggtgatgattatcactggaaccctcgtgaggaagctgtgccaaaacgagggttgcaagctcaaggcagtggttgaggcgaaaaaactgatcctgggcggccttgaaaaagctgaaaagaaagaggacacccggatgtatttgctggcgcttaagaacgccctgctcccggaaggaataccttccttgcttaagtacgcagaagcgggtgaaggtcccatttcgcatcttgcaaccaccgcgcttcagcggtacgatcttccttttatcactgatgaagtgaaaaagacgcttaatcgcatttaccaccagaatcgcaaggtccatgaaaaaactgtgagaaccgccgcagcagccattattctgaacaacaacccttcatacatggatgtgaagaacatactgctgtccataggtgaactccctcaagaaatgaacaagtacatgcttgcaattgtgcaagacatcctgcggtttgagatgccggcctccaaaattgtgcgccgtgtactcaaggagatggtggcacacaactacgatagattctcgaggtccggtagctcatccgcgtacaccggatacattgaacgttcacctaggtcggcgtcaacctactcactggacatcctctattcaggatcggggatcctgcgacgttcgaatctcaacattttccagtacatcggcaaagcaggactgcatggttcacaggtggtcattgaagcgcaagggcttgaggccctgattgcagctactcctgatgaaggagaggaaaacctggattcgtacgctgggatgtccgcaatcctcttcgatgtccaactcagaccagtgacctttttcaacggatactccgatctgatgagcaaaatgctgtcggcgtccggagatcctatctcggtggtgaaagggttgattctgttgatcgatcattcccaagaacttcaactccaatctggtctgaaggctaacatcgaagtgcaaggtggtcttgcaattgatatcagcggggcaatggaattcagcctgtggtacagggaatcgaaaactagagtgaagaatagggtgactgtggtgatcactaccgatattacggtcgacagctcgttcgttaaagcaggcctggagacttcgactgagactgaggcaggtttggaattcatttccactgtgcaattttcccagtacccttttcttgtctgtatgcagatggataaagatgaagcgccgttcagacagtttgaaaagaagtacgagcggctcagcacgggtagggggtacgtctcgcaaaaaaggaaggaaagcgtgctcgccggctgtgaattccctcttcatcaagaaaactccgaaatgtgtaaggtggtctttgcaccgcagccggactcgacttcaagcggttggttc

SEQ ID NO: 5471 - DNA, 2682 bp, Artificial Sequence
  derived and/or modified sequence
atgattctgctcgcggtgcttttcctctgtttcatctctagctacagtgccagtgttaaggggcacaccacagggctgtcgctgaacaatgatcggctctataaactgacatactccacagaggtcctgttagaccgcgggaaaggtaaactccaagacagcgtgggctatcggatatcatccaacgtcgatgtggccctgctctggagaaatccagacggggacgacgaccagctcatccagataaccatgaaagacgtgaatgtagagaatgtgaaccagcagaggggcgagaaatccatctttaagggaaagtctccctcaaagataatgggtaaggagaacctcgaggccctgcagagacccacgcttctacatctcattcatggtaaggtaaaagagttttattcctatcagaatgaggccgtggccattgagaacatcaagcggggactcgcctctctgtttcagactcagctgagttctgggactactaatgaggtagacatatcaggcaactgcaaagtcacgtatcaagcccaccaggataaagttattaagatcaaagcactggacagttgtaaaatcgcccgatctggattcaccacccctaaccaggtgctgggagttagctctaaggcgacctccgtgacaacctataagatcgaggactcattcgtcattgctgttttggctgaggaaacacacaacttcggtctgaatttcctacagactatcaaaggtaagattgtgtccaaacagaaattggagttgaagaccacagaggccgggcctagactcatgtcaggtaaacaggcagctgcgatcattaaagctgttgatagtaagtatactgccatcccaattgtaggtcaagttttccagtctcattgcaaaggctgcccaagcttatccgagctttggcgttccacacggaaatacctgcagccggacaacttgtcaaaggcagaagcagtgagaaatttcctagcttttattcagcaccttcgaaccgcaaaaaaggaggaaatcctgcagatccttaagatggagaacaaagaagtgctgccacagttagtggacgcagtcacctcggcccaaacgagcgactcgctggaagcaatactcgatttcctggatttcaagtcggacagcagcattattctgcaggagagatttttgtatgcctgcgggtttgccagtcatccgaatgaggagctccttagagccctcataagcaaattcaaaggttctatcggcagtagtgatattcgggagaccgtcatgattattaccggaacactggtacgaaagctctgccagaatgaaggatgcaagctgaaagctgtggttgaggccaagaaactgattcttggcggcctggaaaaagccgaaaagaaggaagacacgaggatgtatttgctcgcactgaaaaacgcactgttgccggagggcatcccatccttactgaaatatgcagaggcgggagaaggccccataagtcacctcgcaacaaccgccttacagaggtacgacttgccattcatcactgatgaggtaaagaagacactgaatcgcatctaccaccaaaaccgaaaagttcacgaaaaaactgtgcgcacggccgctgcagccataatacttaacaataacccctcctacatggacgtcaaaaacattctgctctctataggggagcttccccaggagatgaataaatatatgctagcgatcgtccaggatattctacgattcgaaatgccagcgtctaaaatcgtgcggagagtgctaaaagaaatggtggcccataactatgacagattttctcgaagtggcagctctagtgcctacaccgggtacatcgagcgaagcccaagaagtgcttcaacatatagtctggatattctctactccgggagtgggatccttagacgtagtaacctcaatatcttccagtacatagggaaagccggacttcacggatcacaggtggtgattgaagctcagggactggaggcattgatagcagccacaccggacgaaggagaagagaacctcgattcctacgccggcatgagcgcgattctgttcgatgttcaactgcgccccgtgacgtttttcaatgggtatagcgatcttatgtcaaagatgttgtccgcatcgggggaccccatctcggtggtaaagggactcatcctcctgattgaccactcccaggagctacagctgcaaagtggtctgaaagccaacattgaggtgcaaggaggcctggcgattgacatatcaggcgccatggaattctccctctggtaccgggagagtaagactcgtgtgaagaatagagttactgtggtcatcaccactgacatcactgtcgattcctccttcgttaaagcgggcctggagaccagtacagagaccgaggccggcctggagtttatctccactgtgcagttttctcaatacccttttcttgtttgtatgcagatggataaggatgaagccccctttagacagttcgaaaagaagtacgagcggctgagcaccggcagagggtacgtcagtcagaaacgaaaagagtctgttctggctggctgcgagtttcctctgcaccaggagaatagcgaaatgtgtaaggtagtcttcgctccacagccagactccacctcctccggctggttc

SEQ ID NO: 5472 - DNA, 2682 bp, Artificial Sequence
  derived and/or modified sequence
atgatccttctggcggtgctgttcctctgtttcatctcttcgtacagcgcgagcgtgaaaggccacaccactggtctttcgctcaacaatgacaggctgtataagctcacctacagcaccgaagttttgctggaccgcggaaagggaaagctgcaagatagcgttggataccggatatcctccaacgtggacgtcgcactgctttggcgcaatccggacggcgacgacgatcaacttatccaaatcactatgaaggacgtcaatgtggagaatgtgaatcagcagcggggcgagaaaagcatcttcaaggggaagagcccttctaaaatcatgggaaaagaaaacttggaagccctgcagcggccgactctgctgcacctgatacatggaaaggtgaaagaattctactcctaccagaacgaagcagtggcgattgaaaacatcaagcgcgggctggcctcacttttccagacgcagttgtcgtccggcacgaccaatgaggtcgacatctcaggtaactgtaaagtgacctaccaagcccatcaagacaaggtgattaagatcaaggccctggattcatgcaaaatcgccagatccggattcaccactcccaaccaggtgctcggcgtctctagcaaagccacgagcgtcactacctataagatagaggatagctttgtgatcgctgtgctggcggaagagactcacaactttgggctcaactttctgcagaccatcaagggcaagatcgtgtcaaaacagaaacttgagctgaaaacgaccgaagctggtccgagactgatgtcagggaagcaagctgccgcgattatcaaggccgtcgattcaaaatacaccgccatcccaatagtggggcaggtgttccagagccactgtaaaggatgcccaagcctgtctgagctgtggcgttccacccgcaagtacctccagcccgacaatctgtccaaagccgaagccgtgcgcaactttctggcgttcatccagcatctccgcaccgccaagaaggaagaaatccttcaaatcttgaaaatggagaacaaggaggtgctgcctcagctggtcgatgcagtgactagcgcgcaaacctcggactcacttgaggccattcttgatttcctcgacttcaagtccgactcctcgatcatcctccaagagagattcctgtacgcctgtggttttgcctcgcatccgaacgaagaacttctgcgggccctcatctcaaagtttaagggatccatcggatctagcgatatccgcgagactgtgatgatcattacggggaccctcgtgcggaagctgtgccaaaacgagggatgcaaactgaaagcggtggtggaagcaaagaagctcatcctgggcggactggagaaagccgaaaagaaggaggatacgaggatgtacctcctggctctgaaaaatgcactgcttccagaggggatcccgtccctgttgaagtacgctgaagcgggggagggtccaatctcacatctggctaccactgcactgcaacggtacgatctgccgttcatcactgacgaagtgaaaaagaccttgaatcgaatctaccaccagaacagaaaggtgcacgaaaagaccgtcagaaccgctgccgcggccatcattctgaacaacaatccatcctacatggacgttaagaacatcctcctgagcatcggcgaattgccgcaggagatgaacaagtacatgctcgcgatcgtccaagatattctccggttcgagatgccggctagcaagatcgtccggagggtcttgaaggaaatggtcgcccacaactacgacaggttttcacggtcgggctcttcttcagcatacaccggctacatcgaacgctcgccgaggtcggcttcgacttattccctggatattctgtactcgggctccggaatccttcgcagatcgaacctgaatatctttcagtacatcggaaaggcgggcctccacgggagccaagtggtgatcgaggcacagggccttgaggctcttatcgcagccacccccgatgaaggagaagaaaatctcgactcgtacgcgggaatgtcggcgatcctgtttgacgtgcagttgcgcccggtgactttcttcaatggatacagcgacctgatgtcaaagatgctctcagcttccggagatccaatctcggtcgtgaaggggctcatcctcctcatcgatcattcgcaagaactgcaactgcagtcgggattgaaggcaaacatcgaggtgcagggcggcctcgctattgacatttccggagctatggaattctcattgtggtaccgcgaatccaagacgagagtgaagaatcgcgtcaccgttgtcatcacgacggatatcaccgtcgactcctctttcgtgaaagcgggactggaaacttcgaccgagactgaagcagggttggagttcatctcaactgtccagttcagccagtaccctttcctggtgtgcatgcaaatggataaggacgaggcaccgtttaggcaattcgaaaagaagtacgagcgactgtcaaccggaagaggatacgtgtcccaaaagcggaaggaaagcgttctggcgggatgcgaatttccgctgcaccaggagaactccgaaatgtgcaaggtggtgttcgccccacaaccggactccacctcctcgggttggttc

SEQ ID NO: 5473 - DNA, 2682 bp, Artificial Sequence
  derived and/or modified sequence
atgatcctgcttgccgtgctgttcctttgtttcatctcgagttactcagcgagcgtgaagggtcacacgactggactgagcctgaataatgatcggctctacaagctcacctactccaccgaagtcctcttggataggggaaaaggaaagctgcaagactcggtgggataccggatctccagcaatgtggacgtggcgctcttgtggcgcaacccagacggagatgatgatcaactgattcagatcacgatgaaggatgtgaatgtggaaaacgtgaaccaacagcggggagaaaagtccatcttcaagggcaagtccccgtcaaagatcatgggtaaggaaaaccttgaagccctccaacggccgactctgctgcatcttattcatgggaaggtgaaggaattctactcctaccagaacgaggcagtcgccatcgaaaacatcaagagaggactggcatccctcttccaaactcaactctcctcaggaactaccaatgaagtggacatcagcggaaactgcaaagtgacgtaccaggcgcatcaggataaggtcatcaagatcaaggctcttgactcgtgcaaaatcgcacggtcggggtttacgactccgaaccaagtcctcggagtgtcctcgaaagcaaccagcgtcacgacttacaagattgaggactcgttcgtcatcgccgtgctggctgaggaaacccacaatttcgggttgaatttcctgcaaaccatcaagggtaaaatcgtgtcgaaacagaagctcgaactgaaaaccactgaagcagggccgaggcttatgagcggaaagcaggctgccgcaattatcaaagccgtggacagtaagtacactgccatcccaatcgtgggccaagtgttccagagccactgcaagggatgcccgtcactgagcgaactgtggcgctccactaggaagtacctgcagccggacaacttgtccaaagccgaagcggtgagaaacttcctcgcctttatccaacaccttcggactgcgaaaaaagaggaaatcctgcagattctcaaaatggaaaacaaagaagtgctgcctcagctggtggacgcggtgacttcggcacagacttcggatagcctggaagcgatcctggattttctggacttcaagtccgattcatcaatcatcctgcaagagagatttctgtatgcctgtggctttgcttcccatccgaacgaagaactcttgcgcgcactcatctcgaagtttaagggttcaatcggatcatcggacattcgcgaaaccgttatgattatcaccgggaccctggtgcgaaagctctgccaaaatgagggctgcaagctgaaggccgtggtggaggcgaaaaagctgatcctgggcggactcgagaaggccgagaagaaggaagatactaggatgtacctcttggctctgaagaacgccctgctcccggaaggaatcccatctctgctcaaatacgcagaagcaggagagggaccgatctcgcatctggccactaccgctttgcagagatacgacctgcctttcattactgacgaggttaaaaagaccttgaaccgcatttatcaccagaaccgcaaggtccacgagaaaaccgtgcgcaccgcagcagccgccatcatcctgaacaataacccttcgtacatggatgtcaagaacattttgctcagcatcggagagcttccccaggagatgaacaagtacatgctggccatcgtccaggatattctgcgcttcgaaatgccggcctccaaaatcgtgaggcgggtcctgaaggagatggtcgcccacaactacgaccgcttctcccgctccggatcctcctccgcgtacaccggctacatcgagcgaagcccacgctctgcgtcgacttacagcctggatatcctttactcggggtcgggaatcctcagaagatcaaatctcaatatcttccagtacatcggaaaggctggcctccacggttcacaggttgtgatagaggctcagggcctggaggcccttatcgccgcgacccccgatgagggagaggaaaatctggacagctacgctggcatgtcggctatcctgtttgacgtgcagctgcgtccagtgaccttcttcaacggatactcggacctcatgagcaagatgctcagcgcctcaggtgaccccatttctgtcgtgaaaggactgattctgctgatcgaccactcgcaagaactccagctgcagtcgggactcaaagcgaacatcgaggtgcaaggcggcctggcgatcgatatcagcggtgcgatggaattctcactctggtacagagagtcaaagacccgggttaagaatcgggtgactgtcgtgatcaccactgacatcaccgtcgactcctccttcgtgaaggccgggctggaaacctcaactgaaaccgaggcagggctggaattcatctcaaccgtccagttttcccagtatcctttcctggtctgtatgcagatggacaaggacgaagcgccctttcggcagttcgagaagaaatatgaaagattgtcgaccggccggggctacgtgagccaaaagcgcaaagagagcgtcttggccggatgcgagttccctctgcatcaggagaacagcgaaatgtgcaaggtggtattcgctccgcaaccagactcgacgtcgtccggctggttt

SEQ ID NO: 5474 - DNA, 2682 bp, Artificial Sequence
  derived and/or modified sequence
atgatactgctggccgtcttatttctgtgttttatcagctcttactccgcatccgtgaaggggcacaccactgggctctcccttaacaacgaccgcctgtataaactgacatatagtaccgaagtgttacttgaccggggtaaggggaaactacaggacagtgtggggtaccggatatcctctaacgttgatgtggcactgctctggaggaacccagacggtgacgacgatcagctaattcagataaccatgaaggatgttaatgtggagaatgtcaatcaacagcgcggcgaaaaatcaattttcaaaggtaagtctccaagtaagataatggggaaggagaatctcgaagccctgcagcggccaacattactgcaccttatacatggcaaagtaaaagagttctatagttaccagaatgaggctgtggctattgaaaacataaaacggggcctggctagtctgttccaaacccagctgtcctcaggaaccaccaacgaagttgatatatccggcaattgtaaggtgacctatcaagcccaccaagataaggtcattaaaataaaagccctcgacagctgtaaaatcgctcgatctggatttacaaccccaaatcaggtgcttggggtgagtagcaaagctacttccgtgacaacatacaagattgaagatagcttcgtgatcgccgtgttggctgaggagactcacaatttcgggctgaacttcctgcagaccattaagggcaaaattgtgagcaaacagaagctcgaattaaagactactgaggcagggccaagactgatgtccggcaaacaggctgcagcaatcatcaaagctgtggactctaaatacaccgccataccaatcgtgggacaagtgtttcaatcccactgcaaaggctgtcccagtctgagcgagttatggcgttctacaaggaaatacctgcagccagataacctgagcaaagctgaggcagtgagaaattttctggcttttatccagcatttacgcactgccaaaaaagaagaaatactgcagatcttaaaaatggaaaataaggaggtgctgccacagctggttgacgccgtgaccagcgctcaaaccagtgactcactggaggcaatcttggattttctggatttcaagtcagatagcagtattatcttgcaggaacgctttttatacgcctgtggctttgcaagtcatcctaacgaagagctgttacgcgctctgatctccaaatttaaagggtccataggcagttccgatattcgggagacagtgatgattataaccggcactctggtgcgcaagctgtgccagaatgagggatgcaagttgaaggcagttgtggaagcaaagaagctgattctgggtggcttagaaaaagcagaaaagaaagaggatacccggatgtacctactggcactgaagaacgcactgctgccagagggaatccctagcctactcaagtacgcagaggccggagaagggcctatctcccaccttgcaaccaccgctctccagcgctacgatttaccatttatcactgatgaagttaaaaagacactgaatcggatataccaccagaaccgcaaggtgcacgagaaaactgtacgcacagcagctgctgctattattttaaataataatccatcctatatggacgtgaagaatatactgctcagtattggcgagctgcctcaggagatgaataaatatatgctggctatagtgcaggatatactgaggttcgaaatgccagcttctaagattgttcgaagggtgttaaaagaaatggtggcacataactacgaccggttctcccgctccggctcttcctctgcttacaccgggtatatcgagcgttccccccgctctgccagcacctacagtctggacatactgtactcagggagcggcatactcaggaggtctaatcttaatatttttcaatacattggcaaggccgggctgcacgggagccaggttgttattgaggcccagggattagaagccctgattgctgcaacccccgacgaaggagaagaaaatctggacagctacgcaggaatgagcgccatcttattcgacgtgcagctgaggcctgtgactttttttaatggctatagcgatctgatgtcaaaaatgctgagcgcaagcggcgacccaatcagtgttgttaaaggcctgatcctgctgatagatcacagtcaggagctgcagctgcagagcggcctaaaggctaacatcgaagtccagggcggtctggcaatagatataagcggcgccatggagttctccctgtggtaccgagaatcaaaaacacgcgtgaaaaatcgagttaccgtagtgatcacaactgatatcactgtggactctagcttcgtgaaggctgggctagagacatccaccgagacagaggctgggcttgagttcattagtaccgtgcaattctctcagtacccatttttggtgtgcatgcaaatggataaagatgaggcacctttcaggcaattcgagaagaagtacgagcgactgagtactgggaggggctacgtgtctcaaaagaggaaggagtccgtgctcgccggctgcgaattccccttgcaccaggaaaattcagaaatgtgcaaggttgtgtttgcccctcagcctgactccacttcctcagggtggttc

SEQ ID NO: 5475 - DNA, 2682 bp, Artificial Sequence
  derived and/or modified sequence
atgatccttttggccgtgctgttcctctgttttatctcttcttactcagcatcagtgaaaggccatacgactggactctcactgaacaacgaccggctgtacaaactcacttactcgaccgaggtgttgctggaccgtggtaaaggaaagctgcaggactcggtcggatacagaatcagctcaaatgtggacgtcgcgctgctttggaggaacccagacggtgacgatgaccagcttattcaaattaccatgaaagatgttaacgtggaaaacgtcaatcaacaacgcggagagaaatctattttcaaaggtaaatccccgtcaaagattatgggaaaggaaaacctcgaagcccttcaacggcctactctcctgcacctgattcatggaaaggtgaaagaattctatagctaccaaaacgaagcagtggccatcgaaaacattaagcgtggactggcatccctttttcaaactcaactctccagcggaaccactaatgaagtggacatttcaggcaattgtaaagtgacttaccaggcacatcaagacaaagtgatcaagattaaggcactcgattcctgtaagatcgcacgatccgggttcacgaccccgaaccaagtcctcggagtgagctcgaaggcaacctcagtgactacttacaaaattgaggatagctttgttatcgcagttctcgccgaagaaactcacaattttgggctcaatttccttcaaacgataaaaggcaagattgtgtcgaaacagaagttggaacttaagaccactgaggcaggaccccgtcttatgtcgggaaagcaagcagctgcaattatcaaggctgtggacagcaagtataccgctattcctattgtcggccaggtgttccaatcccactgtaagggttgtccctcgctttccgaactctggagaagcactaggaagtaccttcagccagataacctgtctaaggcagaagcagtcagaaactttctggcattcattcaacatctgcgtaccgccaagaaggaagaaatcttgcaaatccttaagatggaaaacaaggaggtgcttccccaactggtggacgcagtcacttcggcccaaacttcggactccctggaagccattctcgattttctggatttcaaatccgattcgtcgattatcctccaggaaagatttctgtacgcgtgcggatttgcatctcatcctaatgaagaactgctccgcgcccttatatccaagtttaagggctcgattggttcgtccgacattcgtgaaaccgtaatgataatcacgggaaccctggtgagaaaactttgccaaaacgaaggctgcaagctgaaggcggtggtggaagcaaaaaagctgattctgggaggtcttgaaaaggccgagaaaaaagaagataccagaatgtaccttttggcactcaagaatgcactgcttccggagggcatcccttcacttctcaagtacgcagaggccggggaagggcctatttcccatcttgccaccactgctctgcaacggtatgaccttcctttcattactgatgaagtgaaaaagaccttgaaccgcatttaccatcaaaatagaaaagtgcatgaaaagaccgtgaggaccgcagcagcagcgattattctgaacaataatccaagctacatggatgtgaagaacattttgctgagcattggtgaacttccacaggaaatgaacaaatacatgcttgcaattgtgcaggatatactgagatttgaaatgcctgcatcaaaaatcgtgcggcgggtccttaaggaaatggtggcacataactacgacagattttcaagatccggttcgagctcagcatacactgggtacattgaaagaagcccacgctctgcctcaacctattcactggacattctctattcgggatccggtatcctgcgccgttcaaatctgaacatctttcagtatattggaaaggcaggtctgcatgggagccaagtcgtgattgaagcccagggccttgaggcgcttatcgccgccactcctgatgaaggagaagaaaacctggatagctacgccggtatgagcgccatcctctttgatgtgcagcttagaccagtgaccttcttcaacggctacagtgatctgatgtctaagatgctttccgcgagcggagatcccatttcagttgtcaaaggtttgattcttcttatcgatcattcgcaggagcttcaactgcagtccggtcttaaggctaatatcgaggtgcagggtggcttggcgatcgacatttcgggtgccatggaattttcgctgtggtacagggaaagcaagaccagagttaagaatcgggtgaccgttgtcattactacggatataactgtggattcctcgtttgtgaaagcaggactggaaacctcgaccgaaaccgaggcgggacttgaattcatttctactgtgcaattcagccagtacccatttctggtctgtatgcagatggacaaagatgaagctccttttcgccagttcgagaagaagtacgagcgcctgagcaccggacgcggatacgtgtcacaaaagagaaaggaatccgtcctggcaggatgtgagttccctctgcatcaagagaactcggaaatgtgcaaggttgtgtttgccccccagcccgactcgacttcgtcaggatggttc

SEQ ID NO: 5476 - DNA, 2682 bp, Artificial Sequence
  derived and/or modified sequence
atgatcctcctggcggtgctctttctgtgcttcatttcctcctactcggcgtcggttaaggggcacactactgggctgagcctcaacaacgatagactctataagctcacttactcaactgaggttctgctggaccgcgggaaaggaaagctgcaggactccgttggatacagaatctcgtcgaacgtggatgtggcacttctgtggcgtaatccggatggtgacgacgaccaactgatccagatcacgatgaaggatgtgaatgtcgaaaatgtgaaccagcaacgcggagagaaatcgatcttcaaggggaagtcgccttccaaaatcatgggaaaagaaaaccttgaagcactgcagaggccaactctcctgcacctcatccacggaaaggtgaaagaattctattcgtaccagaatgaggcggtggcgatcgagaacatcaaacggggactggctagcctgttccagacccagctgtcatcaggcaccaccaatgaggtggacatctcagggaactgcaaggtgacttaccaggcccaccaagataaagtgatcaagatcaaggcgctcgattcgtgcaagattgcgagatctggattcacgacgcccaaccaggtccttggcgtttcctcaaaggccacctccgtgacgacttacaaaatcgaagatagcttcgtaattgctgttctggccgaagaaacccacaacttcggactgaacttccttcaaaccattaagggaaagatcgtgtcaaagcaaaagctcgagttgaaaaccaccgaagccggtcctcgtcttatgagcggaaagcaggccgccgcaatcatcaaggctgtggatagcaagtacactgccatcccgatcgtgggccaggttttccaaagccattgcaaggggtgcccgtcattgagcgagctctggcgctcgacccggaagtacctgcagccagataacctcagcaaagcagaagcggtccggaacttcctggcattcatacaacatctccgcactgccaagaaagaagaaattctgcagattttgaagatggagaacaaggaggtgcttcctcagctcgtggatgcggtgacctcggcccagacctcagactcattggaggcaatccttgactttttggatttcaagtcagactcgtccattatccttcaagagcggttcctgtacgcctgcggattcgcatcgcatccgaacgaagagcttctccgggcgctcatctcgaaattcaagggttcgattggttcctcggacatccgggagactgtcatgatcatcactggaactcttgtgcggaagctctgccagaatgaaggctgcaagctcaaggccgtagtcgaagcgaaaaaactgatcctcggaggactcgaaaaggccgaaaagaaagaggacactcggatgtacctgctggccctgaagaatgctctcctgccggagggaatcccatctctgctcaagtacgccgaggctggagagggacccatctcccatctggcaaccaccgctctgcagcggtacgatctgcccttcatcaccgatgaggtgaagaaaactttgaacagaatctaccatcagaaccggaaggtgcatgaaaagactgtgcgcacggctgccgcagccatcatcctgaacaacaatccgagctatatggacgtcaagaatatcttgttgtcaatcggcgaactcccgcaagagatgaacaagtacatgctggcgatcgtgcaagacatcctgaggtttgagatgccggcctccaaaatcgtccgtcgcgtactgaaggaaatggtcgcgcacaattacgaccgatttagccggtcaggctcaagctccgcctacaccggttacattgaacgctcgccgcgcagcgcctcaacctactcgctggacatcctctactcaggttccggaatactcagaagaagcaatctgaacatctttcaatacatcggcaaagccgggctgcacgggtcacaggtggtgattgaagctcagggcctggaggccctgatcgccgcgacgccagatgaaggagaagagaacctggactcctacgctgggatgtctgctatcctcttcgacgtgcagctgcgcccggtgaccttctttaacgggtactccgacctgatgagtaagatgctgtccgcaagcggcgatcctatttccgtggtgaaggggctgatcctgctgatcgaccactcgcaggaactgcagctgcaatcaggcctcaaggcgaatatcgaagtgcaaggggggctggcaatcgatatttctggcgcgatggaattcagcttgtggtaccgcgaatccaagaccagagtgaagaatcgggtgaccgtcgtgatcactacggacatcaccgtggactcgagcttcgtgaaggcagggctggagacttccactgagactgaggcgggactggagttcattagcaccgttcagttcagccagtacccattcctggtctgtatgcagatggataaggacgaagccccgttcagacaatttgagaagaagtacgaacgtctcagcactggaaggggctatgtcagccaaaagaggaaggaatccgtgctcgctggctgcgaatttccactgcaccaagaaaactccgagatgtgtaaggtcgtgttcgcacctcagccggacagcacgtcctcgggctggttt

SEQ ID NO: 5477 - DNA, 2682 bp, Artificial Sequence
  derived and/or modified sequence
atgatcctcctggccgtactcttcctgtgtttcatctcgtcgtattcagcctccgtcaagggacatactaccggactctccctgaataacgacagactctataaacttacttacagcacggaggtcctcctcgacagaggaaagggcaaactgcaggattccgtgggatacagaatatcttccaatgtggacgtggccctgttgtggagaaatccggatggtgacgacgatcagttgatccagatcacgatgaaggacgtgaatgtcgagaacgtgaatcagcagcggggcgaaaagtccatctttaagggaaagtcaccctcgaagataatgggaaaagagaacctggaagccctgcagaggccaactctgctccacctgatccacggaaaggtgaaagagttctacagctaccagaacgaagcggtcgccattgagaatatcaagaggggactggcatcacttttccagacgcagttgtcgtcaggcaccactaacgaagtggacatctcaggcaactgcaaagtgacttatcaggctcaccaggacaaggtgatcaagatcaaggccctggactcttgcaagattgcaagatcgggattcactaccccgaatcaggtgctgggagtgtcaagcaaagcgactagcgtgactacgtacaagatagaggattcatttgtgatcgccgtgctcgctgaagaaacccataacttcggcctgaacttcctgcagaccatcaaagggaagattgtgtccaagcagaagctcgaactgaaaaccaccgaagcgggcccgcgcctcatgtcaggaaagcaagctgccgccatcattaaggctgtcgactcaaagtacactgcgatcccaattgtgggccaggtgttccagagccactgtaaggggtgcccgagcctctccgaactgtggcggtcgacccggaagtacctccaacccgacaatctttcgaaggctgaggctgtcaggaattttctggcattcattcaacacctcaggactgcgaagaaagaggaaatccttcaaatactcaagatggaaaacaaagaggtgctgcctcaacttgtcgatgcagtgactagcgcacagacctcagactcgctcgaggcgatccttgacttcttggactttaagtctgactcatcgatcatcctccaagaacgttttctttacgcctgcggattcgcaagccatccgaacgaggagctcctgagagctcttatcagcaaattcaagggatcaatcggctcctcagatatccgcgaaactgtgatgattatcactggaacccttgtacgcaagctctgccaaaacgaggggtgcaaattgaaggcagttgtggaagccaagaaactcatcttgggaggactcgaaaaggcagaaaagaaagaagatactcggatgtatctgcttgcattgaagaatgccctcctgccggagggaatcccaagtttgcttaagtacgcggaagccggtgaaggtcctatctcccacctggctaccacggctctccaacgatacgacctcccgttcatcaccgacgaggtgaaaaagaccctcaatcgcatctatcaccagaacagaaaagttcacgagaaaaccgtccgcaccgccgccgcggccattattctgaacaacaacccgagctacatggacgtgaagaacatcctcctgtccattggagagctgccacaggaaatgaataagtacatgctggccatcgtgcaagatatcctgcggtttgaaatgcctgcgtccaagattgtacgccgcgtcctgaaagagatggtcgctcataactacgaccgatttagccggtcgggtagctcctcggcgtacaccgggtatatcgaacgatccccgcgtagcgcatcgacttactccctcgacatcctttactccgggagcggtattctgcgtagatcaaacctgaacattttccaatacatcggcaaggcagggctgcatgggtcgcaagtcgtcatcgaagcgcaaggcttggaagcactgatcgctgccacgccagacgaaggtgaagaaaacttggattcttacgcaggaatgtcagcgatcctgttcgacgtccagctgaggccggtcacgttcttcaacggctacagcgacctgatgtcaaagatgttgagcgcctctggagatccaatctccgtggtgaaaggattgatcttgctgatcgatcattcacaggagctgcaactccagagcggcctcaaggccaatatcgaggttcagggaggactcgccatcgatatctcgggcgcaatggagttttctctctggtaccgcgagtcaaagactcgcgtcaaaaatcgcgtcactgtggttattaccaccgatatcaccgtggattcatcgtttgtgaaggcgggcctggagacttcgaccgaaaccgaggcgggtctggagttcattagcacggtccagttctcgcaataccctttcctggtgtgtatgcagatggacaaggacgaggcgccctttcggcaattcgaaaagaagtacgaacgcctgtcgaccggaagggggtacgtgtcccaaaagaggaaggaatcggtcctcgctggatgcgaattcccactgcaccaggaaaacagcgaaatgtgcaaagtggttttcgctccacagccggattccacttccagtggctggttc

SEQ ID NO: 5478 - DNA, 2682 bp, Artificial Sequence
  derived and/or modified sequence
atgatactgcttgcagtgctgtttctgtgttttatcagttcttattccgcctcagtgaaggggcatacaaccggtctgtctttgaataatgatagattgtataagctcacatattccacggaggttcttctggatcgaggaaaaggcaagttacaggatagcgtaggttaccgaatcagttcaaatgtggacgtggctttgctttggaggaatcctgatggcgacgacgaccagctgattcaaataaccatgaaggatgtgaatgtggaaaacgtcaatcagcagcgcggggaaaaaagcattttcaaaggaaagtcccccagcaaaattatggggaaggaaaatctggaagctttacagcgtcccaccctgttgcacctgattcatggtaaggtgaaggagttttatagttatcagaacgaagcggtcgctatcgaaaacatcaagcggggcctggcctctctatttcagacacagctctcttctggtactacgaatgaggtggacatctcgggcaactgcaaggttacataccaagcccatcaggataaagtcattaagattaaagccctggattcctgtaagattgcgaggtctgggtttactaccccaaaccaggtgctgggcgtgtcatcaaaggcaaccagcgtgaccacttataagatcgaggacagctttgtgatagccgtgctggcggaggagacacacaattttggcctcaacttcctgcaaacgatcaagggaaaaattgtatcgaagcaaaaactggagctgaagacaacagaggccggtcctcgcctgatgagcggtaagcaagcagctgcaattattaaagctgtcgatagtaagtacaccgcgatccccattgtcggtcaggtgttccagtcacattgcaaggggtgtccctcactatcagagctatggcgctcgacacgtaagtacctgcaaccagacaatttgtctaaagccgaggccgtcagaaactttttggcatttatacagcatctgcggaccgccaagaaggaggagatcctgcagattctgaaaatggagaacaaggaggtcctgccacagttagtggacgcggtaaccagcgcccaaacatctgactctttggaggctattctggatttcttggattttaagagtgatagcagtatcattctccaggaacggtttctatatgcgtgcggcttcgcctctcatccaaacgaagaactgctccgagcactcatctcaaaattcaagggatctataggatcctctgacatcagagaaacagtcatgataatcacaggtacccttgtgagaaagctgtgtcagaatgaaggatgcaagctgaaggccgtggtggaggcgaagaaactaatcctcggtgggctggagaaagctgagaagaaggaggatacgcgcatgtacctactggccctcaagaatgccctcctccccgaaggtatacccagcctcctgaagtacgcagaggccggcgagggccctatatcgcaccttgccaccactgccttacagcgatacgatttgcctttcatcacagatgaggttaaaaagacactgaaccgcatatatcaccagaatagaaaggtgcatgagaaaaccgttcgcaccgcggcggcggccattatcctcaacaataatccttcatatatggatgttaaaaatattcttctgagtatcggcgagctgccacaagagatgaacaaatatatgctggccattgtgcaagatattctcagatttgagatgccagcgagtaagatagtgcgacgcgtgttgaaggagatggtcgctcataattacgatcggttcagccggagcggctctagctccgcttacacaggctacattgagcggtcacccaggtctgcctccacttattcactcgatattctctactcgggcagcggcattctccgaaggtcaaatctgaatattttccagtatatagggaaagccggactgcacggatcccaggtggtcatcgaagctcaggggttggaagcactaatagccgccacccctgacgagggcgaagagaatctggactcttacgcaggtatgagtgctatcttgtttgatgtgcaattgaggcctgtcactttcttcaatggctactcggatttgatgtcaaaaatgctgtctgcaagtggcgacccgatctcagtggtgaaagggctgattctgctcatagatcattcacaagagttgcagctgcaaagcggcttgaaggctaacatcgaggttcagggcgggctggcaatcgacattagtggtgctatggaattctctttgtggtatcgggagagtaaaacacgggtcaagaatagagtgactgttgtcatcaccacagatatcaccgtggattcttccttcgtcaaggccggactggaaacatccactgagactgaggccggtctggagttcatctcaaccgttcaattctcccaatatccttttctcgtgtgtatgcagatggacaaggacgaagctcctttcaggcaattcgagaagaagtacgaacgcctcagcacgggtagaggatacgtttcccagaagagaaaggagtctgtgctcgcagggtgtgagtttccattgcatcaggaaaactctgagatgtgcaaggtcgtttttgccccacaaccagattcaactagctccgggtggttt

SEQ ID NO: 5479 - DNA, 2682 bp, Artificial Sequence
  derived and/or modified sequence
atgatcctgctggcagtcctgtttctttgtttcatatcttcctactccgctagcgttaagggacacacgactggcctgagcctcaataatgatagactgtacaaacttacttactcgactgaagtgctgttggacaggggaaagggaaaactgcaagatagcgtggggtacagaatttcgtcaaacgtggatgtcgccctgttgtggcgtaatccagatggtgatgacgatcaactgattcaaatcaccatgaaagacgttaacgtggaaaatgtgaatcaacagcggggggagaagtccatctttaagggcaagtcgccatcaaagatcatgggaaaagaaaacctcgaagcattgcaacgacctactctgttgcatctgatacatgggaaggtgaaggagttctactcctaccagaacgaagcggtcgcaattgagaacataaaacgaggtctggcatccctttttcagacccaattgtcgtcaggaactaccaatgaggtggacatatccggtaactgtaaagtgacttaccaggcccatcaagacaaggtgatcaagattaaggcgctggactcgtgtaagattgcacggtccggattcactacccctaatcaggttctgggggtgtcatcaaaggcaacctccgtcactacctacaagatcgaagattcgttcgtgattgccgtgctcgcggaggaaacccacaactttggactcaacttcctccagactataaagggaaagatcgtgagtaagcaaaagctggaactgaaaactacggaggcaggtccgcgtctgatgtccggcaagcaggctgccgcgataatcaaggcagtggactctaagtacacggccattcctattgtcggccaggtctttcaatcacattgcaaagggtgcccatccctttcggaactgtggcgctcgacgagaaagtatttgcaacctgacaatctgtcgaaggccgaagcagtgcggaactttctcgcattcattcagcacctgcgcaccgcaaagaaagaggagatcctccaaatccttaagatggaaaacaaagaagtgctgccccaactggtggatgcagtcaccagcgcacaaacctccgactcccttgaagcaattctggattttctggactttaagtcggactcctccatcatccttcaggaaagattcctgtacgcctgcggatttgcttcgcacccgaacgaagagctcttgagggcactgatttcgaagttcaagggttccattggttccagcgatattagggaaactgtcatgattatcaccggtaccttggtgcgtaagctctgtcagaacgaaggctgtaagctcaaagctgtcgtggaagcaaaaaagctgattctcggcggccttgaaaaggcagaaaagaaggaggacactaggatgtaccttcttgcccttaagaacgccctgcttcccgagggaatccctagcctgctcaaatacgcagaagcgggtgaagggccaatttcccatctggcaacgaccgcactccagagatatgacctgcctttcattaccgacgaagtgaagaaaactctgaacagaatttaccatcaaaaccgtaaggtgcatgaaaagaccgtgaggaccgcggctgccgccattattctgaacaacaacccatcctacatggatgtaaagaatattctgctctcgatcggagagctcccgcaagaaatgaacaagtacatgcttgcaattgtgcaagatattcttcgctttgagatgcccgcgagcaagatcgtgcggcgcgtgctgaaggagatggtggcacacaactatgacagatttagcagaagcggatcctcgtcggcctacaccggttacatcgaaaggtcacctagaagcgcctcaacctacagccttgatatcctctacagcgggtccggcatccttagaagatccaacttgaacattttccaatacattggtaaagcaggtctgcatggttctcaggtcgtaattgaagcacagggactggaagcacttatcgcagccactcctgacgaaggggaagagaacctggattcctacgccggcatgtcggccattctttttgatgttcagctccggccagtgaccttcttcaatggatactcggacttgatgtccaaaatgctgtcagcatcgggcgaccctatttcggttgtcaaaggtctgattctccttatagaccactcgcaagaacttcaactgcagtccggtcttaaagcgaacatagaagtgcaaggaggacttgccattgatatttccggtgcgatggaattctccctgtggtacagagagtccaagactagagtgaaaaatcgtgtcactgtcgtcatcacgacggatattactgtggactcctcgtttgtgaaggctggactcgaaacctctactgaaactgaggcgggcctcgagttcataagcaccgtccagttttcgcaatacccatttcttgtctgtatgcagatggataaggacgaggcaccatttagacagttcgaaaagaaatacgaacggctttcaactggtaggggctacgtgtcgcaaaagcgaaaggagtcggtgctggctggatgtgaatttcccctgcaccaggaaaatagcgaaatgtgcaaggtcgtgtttgccccacaaccagattctacgtcctcagggtggttc

SEQ ID NO: 5480 - DNA, 2682 bp, Artificial Sequence
  derived and/or modified sequence
atgattcttctggcggtgcttttcttgtgcttcatctcaagctactcagcatctgtcaaaggtcacacaactggactgtctctcaacaacgaccggctgtacaaactgacctattccactgaagtgctcctggatcgcggaaagggaaagcttcaggattccgtgggatacagaatctcttccaacgtagatgtggccctcctgtggcgaaatcctgatggggatgatgaccagctcatccagatcaccatgaaagatgtcaacgtggagaacgtgaaccagcagcggggcgagaaatcaatcttcaagggaaagtcaccctctaaaataatggggaaggaaaatctggaggcccttcagcggcctacccttctgcatctgattcatggcaaagtgaaggaattttatagctaccagaatgaagccgtcgccattgaaaacatcaaacgcgggctggcttcccttttccagactcaactgtctagcggcaccacgaacgaggtcgacatatccggcaactgcaaagtcacttaccaggcacatcaggataaggtaataaaaatcaaggccctcgactcttgcaaaattgcgagatctggtttcaccactccaaaccaggttctcggcgtgtccagcaaagccactagcgtgaccacatacaaaatcgaagattccttcgtaatagctgtgctggcagaagagacccataatttcggactgaacttcctgcaaactatcaaagggaaaattgtaagcaagcaaaaattggaactcaagacaacagaagctggaccacgactgatgtcaggaaagcaagctgccgccatcattaaagccgtggactccaagtacactgccatcccaatagtcggccaggtcttccaatcccattgcaaaggttgccccagcctgtcagaactgtggagatccacaagaaaatatctccagccagataacttgtccaaagccgaggccgtgcgcaatttcctggctttcattcagcacctccgcactgccaaaaaagaggagatactgcagatcctgaagatggagaacaaagaggttctgccccaactggtggacgccgtgactagcgcccagacatccgacagcttggaggccattctggactttcttgactttaaatcagattcatctattatcctccaggaacggttcctgtatgcttgtgggttcgcgtctcatccaaatgaggaactgctgagggctctgatctcaaagttcaaagggagtatcggttcaagtgatatacgagagacagtaatgatcataactggtacacttgttcgaaagctgtgccagaatgagggctgtaaattgaaagccgtcgtggaggctaagaagctcattctgggcggattggagaaggctgagaagaaagaggatacaaggatgtatcttctcgcactgaagaacgctctcttgcccgagggaatcccatcactcctgaagtacgcggaagccggagagggacccatctcacatctcgctactaccgcgcttcaacggtacgacctgcccttcatcacggacgaggtgaagaagactctgaataggatctaccatcaaaaccgaaaagtgcatgagaaaaccgtgaggacggcagccgccgccatcatactgaacaacaacccgtcctacatggacgtcaaaaatattttgctgtctatcggggagctgccccaagaaatgaataaatacatgctcgctattgtacaggacattcttagatttgaaatgccagcgtccaagatagtccgaagggtgcttaaggaaatggtcgcccataactatgaccgattttccaggagcggctctagctccgcctacaccggctacattgagcgctctccacggtccgcatctacctattccctggacatcctttactctggtagtggaatcctgaggcgcagtaacctgaacattttccagtatattggtaaggccggactccacggcagccaggtcgtgattgaagctcagggcctggaggctctcattgcagccacccccgatgaaggtgaggaaaaccttgacagttacgcaggcatgtctgcgatcctgtttgacgtgcagctgcgccccgtaactttctttaatggatactccgacctgatgagcaaaatgttgtctgcatccggcgatcccattagcgtagtgaagggcttgattctcctgatcgaccacagccaagaattgcaactgcaatcaggcttgaaagccaacattgaagtgcagggaggcctggcaatcgacatatccggcgcaatggaattcagcctgtggtatcgggaaagcaagacccgcgttaaaaaccgcgtaaccgtcgtaattacaactgatatcacggtagacagctcatttgtcaaagcaggcctggaaactagtaccgaaaccgaggctgggctcgaattcatttctacagtccagttctctcagtacccattcctcgtttgtatgcagatggataaggatgaggcccctttccgacagtttgaaaagaagtacgagcggctgagtactggaagggggtacgtgagccagaagcgaaaggagagtgtgctcgcaggatgcgagttcccacttcatcaagaaaacagtgagatgtgtaaagttgttttcgccccccagccagacagtaccagctccgggtggttc

SEQ ID NO: 5481 - DNA, 2682 bp, Artificial Sequence
  derived and/or modified sequence
atgatccttctggctgtgctattcctttgcttcatatcatcatattcagcctcagtcaaggggcacacaacaggactctcactcaacaatgatcggctctacaaactgacttattcaacagaagtgcttttagatagagggaaaggaaaactccaggatagtgtcggatatagaatatcctctaatgtcgatgtcgcgcttctctggcggaaccccgatggggatgatgatcaattaattcaaatcacaatgaaagatgtgaacgtagaaaacgttaaccagcagaggggagaaaagtcaattttcaaagggaaaagtccatccaagatcatgggaaaagagaacctggaggcgctccagcggccaactctcctccatctcatccatgggaaggttaaggaattctacagttatcagaacgaagcagtcgccatcgaaaatattaagcgggggctcgcttctctctttcagactcagctgtcctctgggactactaatgaagtagatatatccgggaactgcaaagtcacatatcaggctcaccaggataaagtgatcaaaattaaagcccttgactcatgtaagatagcccggagtggatttacaactcctaaccaggtcctcggggtttcttctaaggctacttccgtaacaacttacaaaatcgaagattcttttgtgatcgcagtgttagcagaagaaactcacaactttgggctaaacttcctccagacaataaaagggaaaatcgtgtccaaacagaaactggagctcaaaacaactgaagctggaccacggctcatgagtgggaaacaggcagctgctataataaaagcggttgattcaaaatacactgcaatcccaatcgtgggacaggttttccagtcacactgtaagggatgcccttccctgagtgaattatggagaagtacaagaaaatatctgcagcccgataacctttctaaagccgaggccgtgcgcaatttccttgcttttatccagcacctgcgaactgccaaaaaagaagaaatacttcagatactaaaaatggaaaataaggaagttcttccgcagcttgtagatgcagtgacatcagctcagacatctgattcattagaggctattctcgattttttagattttaaatccgattcgtccattatcctgcaggaacggtttttatatgcttgtgggtttgcatcccatccaaacgaagaattactacgggctctaatatccaaatttaaagggtctatcgggtcttctgatatccgggaaacagtcatgattatcacaggaacactcgtcaggaaactgtgtcagaatgaagggtgcaaattgaaagccgttgtcgaagcaaaaaaactcatactcggagggcttgaaaaggccgagaaaaaagaagacacaagaatgtatctcctggccctaaaaaatgctctcttgccagaagggattcctagtctgcttaaatatgctgaagcaggagaagggcctatttcccacctggcaactacagcactccagcggtacgatctcccatttataacagatgaagttaaaaaaacattaaaccgcatctaccaccaaaaccgtaaagtgcacgaaaagacagtgagaactgctgcagctgctataattctgaataacaatccttcctatatggatgtgaaaaatatcctgttaagtatcggggaattacctcaggaaatgaacaagtatatgctagctatagtacaggatatacttagatttgaaatgcctgccagtaaaattgtcaggcgggttttaaaagaaatggtggctcataattacgatcggttcagtcggtccgggtcatcatccgcctatacaggatatatcgagcggtcaccacgctccgcttccacttattccctagatattctatatagtggatccggaatcctccgccggtccaatttaaacatctttcagtatatcgggaaagcaggactgcacggatcccaggtggtaattgaagcccaagggctggaagccctaatagctgcaacacctgatgaaggggaagaaaacctggactcttacgctggaatgtcagctattctcttcgacgtgcagctgcggcccgtaactttttttaacgggtattccgatctgatgtcaaaaatgctttccgcttctggagatccaatctccgtggtcaagggacttatcctgctcatcgatcattcccaggaactgcagctccagtctggactgaaagctaacatcgaagtgcagggaggattagccatcgatatttctggggctatggaattttctctttggtaccgcgagagtaaaacacgagtaaaaaaccgtgtgactgtcgttattacaacagatatcactgttgattcctcctttgttaaagcagggctcgaaacttctactgaaacagaagcaggactcgagtttatttctacagtgcagttctcgcagtatccctttctcgtatgcatgcagatggataaagatgaagcccccttccggcagtttgaaaaaaagtacgaacgcttatcaactggacgcgggtatgtttctcagaaaaggaaagagtccgtcctggccggatgtgaatttcctctgcatcaggagaattccgaaatgtgtaaagttgtgttcgctcctcagcctgattccacttcttccggatggttc

SEQ ID NO: 5482 - DNA, 2682 bp, Artificial Sequence
  derived and/or modified sequence
atgatcctcctcgcagtcctgtttctttgcttcatctcctcctacagcgcatctgtgaagggacacaccacaggcctatccctgaataatgatagactgtataagttaacctatagtaccgaggtcctgctggacaggggcaaaggaaagctgcaggactcagtggggtacagaatctctagtaacgtggatgtagcgctgctgtggcggaatcccgacggcgatgacgaccagctcattcaaattacaatgaaggacgtgaatgttgagaatgtgaatcagcagcgaggagagaagtccatctttaagggcaaatctccttccaagataatgggaaaggaaaacctggaggcattgcagagacctactctgcttcatttaatccacgggaaggttaaggagttctacagttaccagaacgaggcagttgcaatagaaaacattaaacggggactcgcatccctgtttcagacccaactaagctctggtacaacaaatgaggtagacatttctggtaactgcaaggttacatatcaggcacaccaggataaagtgattaagattaaagcacttgacagttgtaaaattgccagatccggctttacaactccgaaccaagtcctaggcgtcagctctaaggccacttctgtgaccacttataaaatcgaggattcgtttgtaatcgccgtgttggcagaagagactcataactttggtctgaattttctgcagactatcaaagggaaaattgttagtaagcagaaactagagctgaaaactaccgaggccggccctagattgatgagcggaaaacaggccgccgcgataataaaggctgttgattccaagtacactgccattccaatcgtaggacaggtgtttcagagccattgtaagggatgcccatcattaagcgagctctggcgttctactaggaaatatctgcagccggataacttgtctaaggctgaggcagtcaggaacttcctagcatttattcagcacctccgaacggctaagaaggaggaaatcctccagattctgaaaatggagaacaaagaagtcctgccccagctggtggacgcagtgaccagcgcccaaaccagtgatagtctggaggcaatcctcgattttctggattttaagtcagattcctcaataattcttcaggagcgctttctgtacgcgtgcggattcgcgtcacatcctaatgaggagctgctgcgcgctctcatcagtaagttcaagggctcaattggttcctccgacatccgggagacagtgatgataattacaggtactttagtgagaaagctgtgccagaacgaaggatgtaagctcaaagccgtagttgaggctaagaaattgatccttggggggctagagaaagcagagaaaaaggaggatacacgcatgtatttgcttgcccttaagaacgcactgttgcctgagggaattccttcactcctgaagtacgctgaggcaggcgaggggccaatatcccatttagctacgactgctttacagagatacgacctcccctttatcacagacgaggtgaaaaagacactgaatcggatttatcaccagaaccgcaaagtgcacgagaagactgtgcgaaccgcagccgcagctataatcctgaacaataatcccagctacatggatgtgaagaatatattgctgagtattggcgaactccctcaggaaatgaacaaatatatgctggcgatcgtccaggatatactcagattcgaaatgcccgccagtaaaatcgttaggcgcgtacttaaggaaatggttgcacacaattacgaccggttcagcaggagcggatcttcaagcgcttatactggctatatagagaggtcgccgagatccgcttctacctacagcctggacattctgtatagcggatccggcatcctcaggcgctccaacctgaatattttccagtacattgggaaggcgggcctccatggaagccaggtagtaatcgaagctcagggcctggaggcactgatcgcagccacgcccgacgagggagaagagaatttggacagctacgctggcatgtcggcaatcctgtttgacgtacagcttcgtccagtgactttctttaatggatactctgacctcatgtccaagatgctcagtgcctcaggagatccaatttccgtggtgaaagggctcattcttctgatcgaccatagccaggagctgcagctgcaaagcggacttaaggctaatattgaagtgcagggagggctggccatcgacatctccggcgccatggagttttcgctgtggtatcgggaaagtaaaacaagagtgaaaaaccgggtgactgtggtgataactaccgatatcacagttgactccagttttgtgaaagccggattggagacatccaccgagaccgaagccggtcttgagttcatcagtactgtgcaattctcccagtaccccttccttgtgtgtatgcagatggataaggacgaagcgcctttccgacaatttgaaaagaagtatgagcggctttccacaggacggggatacgtttctcagaaacgcaaagagtccgttctggctggctgtgagttccccctccaccaagagaattccgagatgtgtaaagtggtgttcgcaccgcagcctgattccacctcctcaggctggttc

SEQ ID NO: 5483 - DNA, 2682 bp, Artificial Sequence
  derived and/or modified sequence
atgattctgctggccgtgttgtttctgtgttttatttcatcctactccgccagcgtgaagggacacaccacggggctgtctctcaataacgacaggctgtacaaactgacgtacagcactgaggtgctgctggaccgggggaagggtaaactgcaggatagtgttggctataggatttcctccaatgtggatgtggccttgttgtggagaaaccccgatggtgatgacgaccagctgatacagatcaccatgaaggacgtaaacgtggagaacgtgaatcagcagcggggggaaaagtccatctttaagggaaagagtcccagcaaaatcatgggcaaggaaaatcttgaggctctccagcggcccaccctgctgcatctgattcacgggaaagtgaaggaattttactcctaccagaacgaagctgtggccatcgaaaatatcaaacgggggctggcctccctgtttcaaactcaacttagctcaggaaccactaacgaggtcgacattagtggaaattgcaaggtgacttaccaggcacaccaggacaaggtgatcaagatcaaggcactcgactcttgcaagattgcacggtccggcttcaccactcccaatcaggtgctgggtgtctcttctaaggccacttccgtgacaacttacaagatcgaggactcctttgtaatcgccgtactggctgaggagacccacaatttcggactcaatttcctccagaccataaaggggaagattgtctctaagcagaaattggagctcaagaccacggaagctggccccaggctcatgtctggcaaacaggccgctgccattattaaagctgtggacagtaaatacacagctatcccgattgtgggccaggtgttccagagccattgtaaggggtgcccctcactgtctgagctttggcgctccaccagaaaatacctccagcctgataatctgtctaaagcggaggctgtgcgcaattttctggccttcatccagcatctgcgcacagccaaaaaagaggagatcctgcagatactcaagatggaaaacaaggaggtgttgccccagctggtcgacgctgtcacaagcgcacaaactagtgatagccttgaggcgatactggatttcctggactttaaaagcgactcctcaataatcctgcaggaacggtttctgtacgcgtgcggttttgctagtcacccaaacgaggagctcctgagggcgctgatttccaagtttaaggggtccatcggatccagcgacatcagggaaactgttatgattatcacgggtacgctcgtgcggaagttgtgccagaacgaaggctgcaagctgaaggccgtcgtggaagctaagaaactgatcctgggcggactggagaaggctgaaaagaaggaggatactcggatgtacctgctcgccttgaagaatgccttgctgccagagggtatcccgtccttgctcaagtatgccgaagcgggcgaaggtcccataagccatcttgctacaactgccctgcaaaggtatgatctcccgtttataacagatgaggtcaagaagaccctgaaccgcatttatcatcagaacagaaaagtgcatgagaagacagttcgcacagctgccgctgcgatcatcctcaacaataatccttcctatatggatgtaaagaatattctgctgagcatcggggagctcccgcaagagatgaataaatacatgttggctatcgtgcaggatatcttgagatttgagatgccagccagcaagatcgtaaggcgggttctgaaagagatggtggcgcacaattacgataggtttagtaggtctggcagttccagcgcctatactggttatatcgaaagatctccacgatccgcttcaacttatagcctggacatcctgtacagcgggagcggcatcctgcggagaagcaatttgaacatttttcaatatatcggaaaggcagggctgcatggatcacaggtggtgatcgaggcccaggggctcgaggcactgatcgcggccacacctgacgagggagaggagaacctcgattcctacgctggcatgtccgcgattcttttcgacgtgcagctgcgccccgtaaccttttttaatgggtactctgatctgatgagcaaaatgttgtcagcaagcggggacccaatatctgttgtcaagggactgattctgctgatcgatcacagtcaggaactgcagctgcagtccggtctgaaagctaacatcgaagtgcagggcggacttgcaattgacatttccggggccatggagttcagtctgtggtatcgcgagtcaaagacaagagttaaaaaccgcgtgacggttgtgatcacaaccgatattaccgttgactcatctttcgtaaaagctggtctggagacaagtactgagactgaagccggcctcgagttcatcagcacagtgcagttctctcagtatccattcctcgtgtgtatgcagatggataaggacgaagcccctttcagacagttcgagaagaaatacgaaaggctcagtacgggccgcgggtacgtgagtcaaaagagaaaggagagcgtgctggctggttgtgagttcccattgcaccaggagaatagcgagatgtgcaaggttgttttcgccccccagccagattctacctcctccggctggttt

SEQ ID NO: 5484 - DNA, 2682 bp, Artificial Sequence
  derived and/or modified sequence
atgatactgcttgccgtgttgtttctgtgctttatctcgtcgtactcggcctcggtcaagggccacaccactggactgtctcttaacaacgatcggctttacaagctgacctacagcactgaagtgctgctcgatagggggaaaggtaaactgcaagattccgtgggctaccgcatatcctccaatgtggacgtcgcattgctgtggcggaacccagatggcgatgatgatcagctcattcagattacgatgaaggatgtcaacgtggaaaatgtgaatcaacagcgcggagagaagtccatctttaagggaaagtcaccatctaagataatgggaaaggagaacctggaggcgcttcaaagaccaactcttcttcatcttatccacggtaaggtgaaggaattctactcctaccaaaacgaagcagtggcgattgaaaacattaaacgcggccttgcgtctctgtttcaaacccagctttcctccggaacgactaacgaggtcgatattagcggtaactgcaaagtgacttaccaagcacaccaggataaggtgatcaaaatcaaggcactggactcatgcaagattgcacggtccggtttcactacgccaaatcaagtcttgggggtgtcgtcgaaagccacttcagtgaccacctataagatcgaggacagcttcgtcattgcggttcttgccgaggaaactcataactttgggctgaacttccttcagaccataaagggcaagatcgtgtcgaagcaaaagctggaactcaagaccacggaagccggacctcgcctgatgtccggtaagcaagcagcggcaatcataaaagcagtggactcgaaatacactgcaattcctatcgtgggacaggtctttcagtcgcactgtaagggctgtcctagcttgtccgagctttggaggtccactaggaagtacctgcagccagataatctgtccaaggccgaggcagtgaggaactttcttgcatttatccaacatcttcggactgctaaaaaggaagaaattctgcaaattcttaagatggagaataaggaagtgcttccgcagctggtcgatgccgtgacctccgcgcaaacttcggactctctcgaagcaatcctggatttcctggatttcaagtcggattcatcgataatcctccaggaacggtttctgtacgcctgtggattcgcatctcatccaaacgaggaacttctccgcgcactgatatccaagtttaaaggatcaattggttcatcggatattagggaaaccgtcatgatcattactggaaccctggtcagaaaactgtgtcagaatgagggttgcaagctcaaggcagtggtcgaagcaaagaagttgatccttggaggactcgaaaaagctgagaagaaggaagatacccggatgtacttgcttgcactgaagaacgcactgctgcctgaagggataccttccctgctgaagtacgctgaagcaggcgaaggacctatttcgcatcttgcgacgaccgcgcttcagcggtacgacctcccgttcattactgatgaagtcaagaaaactctcaaccggatctaccaccaaaaccgcaaagtgcatgaaaagacggtccgaacggctgctgcagcaatcattcttaacaataaccccagctacatggacgtaaagaacattctcctctcgatcggcgaacttcctcaagaaatgaataagtacatgctggccattgttcaggacatcctgcgattcgaaatgccggcctcgaagattgtgcggcgtgtcctgaaggaaatggtggcgcataactacgaccgattttcccggagcggaagttcgtcggcttacactggatacattgaaagatccccaagatcggcatcaacctactcgctggacattctgtatagcgggtcgggtattctcaggcgatctaacttgaacatttttcaatacatcggcaaagcaggcctgcatggatcccaggtggtgatagaagcccagggccttgaggctctcatagcagcaactcctgatgagggagaagaaaatcttgactcatatgcaggaatgtcagcaattctgtttgacgtgcaactgcgtcctgtcacgttctttaatggttactcagacctgatgagcaaaatgctgtctgcgtcgggtgaccctatttcagtggtgaaggggctcatcctgctgatcgatcattcgcaagaattgcaactgcagagcggtctgaaagcaaatatcgaagtgcaagggggactcgcaatcgatatttcgggggcaatggagttttcgctttggtaccgagaatcaaagaccagagtgaagaatcgggtcaccgtcgtgattactaccgatatcactgtcgactcctcattcgtgaaggctggactcgaaacctcgactgaaactgaggcgggacttgaattcattagcacggtgcaattcagccaatacccattcctggtgtgcatgcaaatggacaaagatgaggcaccatttagacaattcgagaagaagtacgaacgcctgtcaaccggacggggttacgtgtcgcagaagcgcaaggaatcagttctggctggttgtgaatttccactgcaccaggagaactcagaaatgtgtaaagtcgtgttcgcaccacagccggattcgacttcatcggggtggttt

SEQ ID NO: 5485 - DNA, 2682 bp, Artificial Sequence
  derived and/or modified sequence
atgattctgctggccgtcctgtttctgtgtttcatctcgtcatattcggcctcggtgaagggacatacgaccggactcagccttaacaacgatagactctataagctgacctactcaacggaagtgctgctggataggggaaagggaaaacttcaagattcggttggataccgcatctcgtctaacgtggatgtggcgcttttgtggcgtaatccagatggagacgacgaccaactgatccagattaccatgaaagatgtgaacgtcgagaatgtcaatcaacagaggggagaaaagtcaatattcaaggggaagtcccccagcaagattatgggtaaggagaatcttgaagcacttcagaggcccacccttctgcacctgatacacgggaaagtcaaggagttttactcataccagaatgaagctgtggcgatagaaaacattaaacggggacttgcgtccctctttcaaactcaactgtcaagcgggactactaacgaagtggacatttcaggcaactgtaaagtgacttaccaggcccaccaagataaggtcattaagattaaggctcttgactcctgcaagattgcaagatccggatttaccacccccaaccaagtgcttggagtgagctcaaaagcaacctcagtgactacctacaaaatcgaagattcgttcgtgattgccgtccttgcagaagaaactcataacttcggtttgaatttcctccaaaccatcaaaggcaagatcgtgtccaagcaaaagctcgagctgaaaactactgaggcaggacctcgcctcatgtcaggcaaacaggcagcagccatcataaaagccgtggacagcaagtacaccgcaattcctatcgtgggacaggtctttcaatcgcactgtaagggctgtccttcgctgtcggaactgtggcgctcgacccgcaagtacctccagcctgataacctgtccaaggcagaagccgtgcggaactttctggcatttatccaacacctccggaccgcaaaaaaggaggagatactccagatactgaaaatggaaaacaaggaagtgctgcctcagctggtggatgcagtgacctccgcacagacctcggactcgcttgaagcaattctggactttctggactttaagagcgattcgagcattattcttcaggaaagatttctctacgcatgtggcttcgcatcgcaccctaacgaagaacttctgagggcacttattagcaagttcaagggatcaattggttcgtccgacattcgggaaactgtgatgataatcactggaaccctggtgcggaaactctgtcaaaatgagggatgcaagttgaaagcagtggtcgaagcaaagaagctgattctgggtggcctcgaaaaggcagagaaaaaagaggacacccgcatgtacctgttggctcttaagaatgcgcttctgcctgaaggtatcccctcactcctgaagtacgcagaggctggcgagggcccaatatcccacctcgcaactacggccctccagagatacgatctgccgttcattaccgatgaggtaaagaaaaccctgaaccgcatttaccaccaaaaccgcaaggtccatgaaaagactgtgcgtactgccgccgcagcaattatcttgaataacaatccatcgtacatggatgtgaagaacattcttttgagcataggagagctccctcaggaaatgaacaaatacatgttggcaatagtacaagatattcttagatttgaaatgccagcgtccaagattgtgaggagagtgcttaaagaaatggtggcgcacaactacgatcgctttagccggagcggatccagctccgcatataccggctacatcgaacggagcccaagatcggccagcacctactcgctggatatcctctacagcggctccggtatcttgaggcggtccaaccttaacatctttcaatacattggcaaagcgggacttcatgggtcccaggtcgtcattgaagcacaggggcttgaagcactcattgccgcaacccctgatgaaggtgaggaaaacctggacagctatgcaggaatgagcgccattctgtttgatgtgcagctgcgcccagtgacttttttcaatggctactcggatctgatgtcgaagatgctgagcgcatcaggagatcctataagcgtcgtgaaagggctcattctgctgatcgaccactctcaagagctccaactgcaatcaggattgaaggcgaacattgaagtccaagggggacttgcaatcgatatttcgggggccatggaattcagcctttggtaccgagaatccaagactagggtgaaaaatcgagtgactgtggtcatcaccaccgatattaccgtggattcgtccttcgtcaaagcagggcttgaaacgtcgactgaaaccgaagcaggtctggagttcatctccaccgtgcaattttcgcaatatccatttctggtgtgcatgcaaatggacaaggatgaggcaccttttcggcagtttgagaagaaatacgaacggctgtccacgggccgtggatacgtctcccagaagagaaaagaatccgtgctcgcaggatgtgaattccctctccaccaagaaaattcagaaatgtgcaaggtcgtgtttgcgcctcaacctgactcgactagctccggttggttc

SEQ ID NO: 5486 - DNA, 2682 bp, Artificial Sequence
  derived and/or modified sequence
atgattctcctggcagtgctctttctctgtttcatctctagttactctgccagcgtaaaaggacacacaaccggtcttagcttgaacaatgaccgtctttataagctgacctacagtacagaagtcctcctcgaccgcggtaagggtaaactgcaggactccgttggctaccgtattagttccaacgtggacgttgcactcttgtggcgcaaccccgatggcgacgacgatcagctcatccagatcacaatgaaggatgtcaacgtggagaatgtgaaccagcagagaggagagaaatccatatttaagggcaaatccccctccaaaatcatgggaaaggagaatctggaagcactgcagcgtccaactctgctgcacttgatacatggaaaggtgaaagagttctacagctatcagaacgaggccgttgccatcgagaatatcaaaaggggcctggcctccctcttccagacccagctttcttctggaactactaacgaggtcgacatttctggaaactgtaaggtgacctatcaagcccaccaagataaggtgatcaaaatcaaagctctggactcttgtaagatcgctaggtccggattcacaactcctaaccaggttttgggagtttcttccaaggccacctctgtaactacttataagatcgaagactcctttgttatcgccgtcctggccgaagaaacacacaattttggtcttaattttctccagactatcaagggtaagatcgtaagtaagcaaaagctggagcttaaaacaactgaagccggtccacgtctcatgagcggcaaacaggccgccgccatcatcaaggctgtggattccaagtatacagccatccctatcgtcggccaggtctttcagtcacactgtaagggctgccctagtttgagcgaattgtggcgtagtacaaggaagtatcttcaaccagacaacctgtccaaggccgaagctgtacgtaacttcctggcttttatccaacatcttcgcaccgccaagaaagaggagattctccagattctgaagatggagaacaaagaagtcctgcctcagcttgttgatgcagttaccagtgctcagactagcgattcattggaggcaatcttggattttcttgacttcaaatctgattccagtatcatcttgcaggaacgtttcctgtacgcttgcggttttgcaagccatccaaacgaagaacttcttagggcattgatctcaaagttcaagggttctatcggctcctctgatattcgtgaaaccgtcatgattatcactggtactctggttcgtaagctttgtcagaatgaaggttgtaagctgaaggcagtggttgaagccaagaagctgatcctgggcggactggaaaaagcagagaagaaagaggacacacgtatgtacctgctggcattgaagaacgccctcctccccgaaggaatccccagcctcctcaagtacgcagaagctggagaaggcccaatcagtcaccttgctaccaccgccctgcaacgctatgatttgccatttatcaccgatgaagtcaagaagacattgaaccgcatctaccaccagaatagaaaagttcatgaaaagacagttaggactgcagctgctgccatcattcttaacaacaacccctcatacatggacgttaagaacatcctcctgagcattggtgaactgccccaagagatgaataaatacatgctcgccattgtccaggacatattgcgtttcgagatgcctgcaagcaagattgtgcgtcgtgttctgaaagagatggtagcccacaactacgatcgcttcagcaggtccggttcaagcagtgcttacactggctacattgaacgttccccccgtagcgcatctacctattccctggacatcctttactcaggttcaggtatacttcgtcgttccaaccttaacatttttcagtatatcggtaaggctggcctccacggcagtcaggtggtcatagaggctcagggtttggaagccctgatcgcagccactccagatgagggcgaggagaacttggactcctacgccggtatgagcgccatcctgttcgacgtgcaactcagaccagtcaccttcttcaacggatactcagacctcatgagcaagatgctgagtgccagcggtgatcccatctccgtagtcaagggcctgattttgttgatcgaccattcacaggagctccagcttcagtctggactgaaggctaatattgaggttcaaggaggtctcgctattgatatcagcggcgcaatggagttttctttgtggtacagggagtctaaaactcgtgtgaagaaccgcgtcacagttgttattacaactgacatcaccgtcgattcatcttttgtgaaggccggtctggagaccagcacagagactgaggccggtcttgagtttatctccactgtccagtttagccaataccccttcttggtctgtatgcagatggacaaggatgaagctcctttcaggcagttcgagaagaaatacgagaggttgtccaccggaaggggatacgtgtctcagaaaaggaaagaaagtgtccttgccggctgtgaatttcccctgcatcaggaaaattctgagatgtgcaaggtggtgtttgcccctcagcccgactccactagcagcggatggttc

SEQ ID NO: 5487 - DNA, 2682 bp, Artificial Sequence
  derived and/or modified sequence
atgatactgcttgccgtgctttttctgtgcttcataagcagctactccgcctcagtcaagggacacacgactgggctgtcgcttaacaacgatcggctgtacaagctgacctactccaccgaagtgttgctcgaccgaggaaagggcaagctgcaagattcagtcggctacaggatttcgtccaacgtggacgtggctcttctttggagaaacccagacggcgatgatgaccagcttatacagatcaccatgaaggatgtcaacgtggaaaatgtcaatcagcagcggggagagaaatccatctttaagggtaagtcaccgagcaagatcatggggaaggagaacctcgaggcactgcaaagacctactctgctgcaccttatacacggtaaagtgaaggagttttactcgtaccaaaacgaggccgtggccattgagaacattaagaggggtctggcatcgctttttcagacccagctgtcgtccggaacgaccaacgaggtcgatatctcaggaaactgtaaggtgacctaccaagcgcatcaggataaggtgattaagattaaggcactggattcgtgtaagattgcgcgcagcggttttaccactccaaaccaagtgcttggagtgtcgtccaaggcaaccagcgttactacttacaagattgaggactcgtttgtgatcgcagtccttgcggaggagactcacaattttggattgaacttccttcagaccatcaaaggcaaaattgtctccaagcagaagctggagctgaaaacgacggaggcaggcccaagactcatgagcgggaagcaagcagccgcgattatcaaggcagtggattccaaatacacggcaattcctatcgtcggacaggtctttcagagccactgtaagggatgtccttcgctgtcggaactttggaggtcaacgcgaaagtacttgcagccggacaatctgtcaaaggcggaggcagtgagaaacttccttgcatttatccaacatcttagaaccgctaagaaagaagaaatacttcaaatcctgaaaatggagaacaaagaagtgctgccacaactggtggacgcagtgacttcggcgcagacttcggattctctcgaagcaattctggatttcctggacttcaagagcgactcgtcgattatccttcaggaacgctttctctacgcatgtggcttcgcatcgcatcccaatgaagagctcctgcgagcattgatatccaagttcaagggttccattggatcctccgatatccgggaaacggtgatgattatcactggcaccctggtcagaaagctctgccaaaacgaaggatgtaagctcaaggcggtggtcgaggcaaagaaacttatccttggcggactggagaaggcagagaaaaaagaagatacgagaatgtacctccttgcgcttaagaatgccctccttcctgaggggattccttccctcctgaagtacgccgaggcaggggaaggacccatctcacacctcgccacgaccgcacttcaacgatacgaccttccttttatcactgatgaggtgaaaaagactctgaaccggatttaccatcagaaccggaaggtgcacgaaaaaaccgtccggaccgcagccgcagccattattctcaacaacaacccctcctacatggatgtcaagaatattctcctttcaatcggtgaactccctcaagaaatgaataagtacatgctggcaatagtgcaggacattcttcgctttgaaatgcctgcatccaaaatcgtgcggagggtgttgaaggaaatggtggcccataactacgatcggttttcaagaagcggttcctcatcggcatatactggatacattgaacggtcccccaggtcggcctccacttacagcctggatattctttactcaggatcaggcatcctcagaagatcgaacctgaacatctttcaatacatcggaaaggcaggccttcatggtagccaggtcgtgattgaagcccagggtctggaagctcttattgccgcaactcctgatgaaggcgaagaaaaccttgattcatacgctggaatgagcgcgatcctgtttgatgttcaactcagacctgtgactttctttaacggatactccgacctgatgtcgaagatgctgtcggcatcgggagatcctatctctgtcgtgaagggactcatactgctcattgaccattctcaggagttgcaactgcaatccggactgaaagcaaacatagaagtgcaaggaggacttgcaattgatatttcgggtgccatggaattttcgctctggtaccgcgagtccaagactcgggtcaaaaacagagtcactgtggtgataaccactgacattaccgtggactcatcatttgtgaaagctgggctggaaacttcgactgaaactgaggccggcttggaattcatttccaccgtccagttctcacaatacccttttcttgtgtgtatgcagatggataaggatgaagcaccgttcagacaattcgagaaaaagtacgaaagactctccacgggcaggggttacgtgagccaaaagcggaaggaatcagtgctggcagggtgtgagtttccgcttcatcaagaaaattccgagatgtgtaaagtggtctttgcacctcagccagactcaacttcttcgggttggttt

SEQ ID NO: 5488 - DNA, 2682 bp, Artificial Sequence
  derived and/or modified sequence
atgatactgctggcggttctgttcctgtgtttcattagcagctactccgccagcgtgaagggacatacaactggcctgtctctaaacaacgaccgcctctataaactgacctactcaacggaagtcttgctggacagaggaaagggtaagctccaagatagcgtaggctatcggatttcttcaaatgtcgatgtggccctgctgtggaggaacccagacggcgatgacgaccagttaatacagatcacaatgaaggacgtgaacgtagaaaatgtcaatcagcagagaggtgaaaaatcaatcttcaagggcaagagcccaagcaaaatcatgggaaaggaaaacctggaagccctgcaacgtcctactctgctgcacttgatccatggtaaagttaaggagttctattcttatcagaacgaagcagtcgcgattgagaatataaaaaggggactggcctccctgttccagacacaactgagtagcggaacgaccaacgaagtggatattagcggtaactgcaaagttacctaccaggcacatcaggataaggtgatcaagatcaaagctctggactcatgtaagatcgcgagaagcggcttcactacacctaaccaggtcctcggtgtgtccagcaaagccactagtgtcactacctacaagattgaagatagcttcgtgatcgccgtgctcgcggaggaaacgcacaatttcggcctaaatttcctgcagacgattaagggtaaaatcgtaagtaagcagaaactggaacttaagaccaccgaggccggcccgagattgatgagcgggaagcaggccgccgcaattatcaaagccgttgacagcaagtacactgcaatccccatcgttggacaggttttccagagtcactgtaagggatgcccttccctgagcgaactgtggcgatctacccggaagtatttgcagcccgacaacctttctaaggctgaggccgtgcgcaatttcctggcttttatccaacatctgcgtacagctaaaaaggaggaaatccttcagattttgaagatggaaaacaaggaagtgctgccgcagctggtggatgctgtcacatccgcacagacttcggattctctggaagccatcctggactttctggacttcaagtccgattcatcaatcattctccaggagaggttcctctatgcctgtggcttcgcctctcatccaaatgaagaactcctgagagcattgatcagcaaatttaaggggagtataggaagctcagacatccgggagacggtgatgattatcaccgggacgcttgtaagaaagttgtgccagaatgagggttgtaaactgaaagccgtggttgaggccaagaaattaatattagggggtttggagaaggcagagaaaaaagaggataccagaatgtacctcctggcgctcaagaatgctctactccctgagggtatcccatctctcctcaagtatgccgaggccggggaaggcccaatttcacatctggccacaacagcgctacagagatacgacctcccctttatcacagatgaggtgaaaaagacgcttaacaggatatatcaccagaaccgaaaggtacatgaaaagactgtgaggaccgcagcggctgctattatcttgaacaataacccttcatacatggatgtaaaaaacattcttctcagtattggagaactgccacaagagatgaataagtacatgctggctattgttcaggacatcctgcgtttcgaaatgccagctagcaaaatcgtcaggcgggtgttgaaggagatggtcgctcataattatgaccggttcagtaggtcaggctcgagcagcgcatatactgggtacatcgaacgctcccctcgatctgctagcacatactcgctggatatcctttactccggctctggaatcttgcggaggtccaacctgaacatctttcagtacattggaaaggcaggacttcatggtagccaggtggtcatagaagctcagggcctggaggctctaatcgcggctaccccagacgaaggtgaagagaatctggactcttacgcaggcatgtcagccatactgttcgacgtccaattacggccagtcaccttcttcaatggctattccgacctgatgtcgaaaatgctcagcgccagtggggatccaatctcagtcgttaagggactgatccttctgattgaccattcacaggagttgcagctgcagtccggcctgaaagcaaatattgaggtgcagggagggctagccattgacattagcggcgccatggagttcagtttatggtaccgtgaatctaagacccgggtgaaaaacagagtgacggtggtgatcacaaccgacattacagtggactcatcctttgtcaaagcaggactggagacatcaacagagaccgaggccggtctcgagtttatatctactgtccagttctcacagtacccattcctggtgtgcatgcagatggacaaagatgaagccccctttaggcagtttgagaagaagtacgagcgcctttcaaccgggaggggctacgtcagccagaagagaaaagagtcagtgcttgctggctgcgagtttcctcttcaccaagaaaactcagaaatgtgtaaagtggttttcgcaccccagccagatagtacatcttctggctggttc

SEQ ID NO: 5489 - DNA, 2682 bp, Artificial Sequence
  derived and/or modified sequence
atgattttattagctgttttattcctttgtttcattagttcatattcagcatcagttaaaggacatactacaggacttagtttaaacaatgatcgtctttataaattgacctattcaactgaagttttattagatagaggaaagggaaaattacaagactctgttggttatcgtatctcatcaaatgtagatgtcgctcttttatggagaaatcctgatggagatgatgatcaattaattcaaattaccatgaaggatgttaacgttgaaaacgttaatcaacaaagaggagaaaaaagtatttttaaaggtaaaagtccatcaaaaataatgggtaaagagaatttagaagcacttcaaagaccaactttattacatcttatacatggaaaagttaaagaattctattcatatcaaaatgaagctgttgcaattgaaaatattaagagaggactagctagtttatttcaaactcaacttagttctggaacaactaatgaggttgacattagtggaaactgtaaggttacatatcaagctcatcaagataaggttattaaaattaaggcattagactcttgcaaaatagcaagatcaggttttacaacaccaaatcaagtacttggagtttcttcaaaggcaactagtgttactacttataaaattgaagattcttttgttattgctgttttggcagaggaaactcataatttcggattaaattttttacaaacaattaagggtaagattgtgtcaaaacaaaaattagaattaaaaactacagaagctggaccacgtcttatgtcaggaaaacaagctgcagcaatcattaaagctgttgattcaaaatatacagcaattccaatagtaggacaagtttttcaatctcattgtaagggttgtccatcactttctgaattatggaggtccacaaggaaatatttacaaccagataatttaagtaaagcagaagctgtacgtaattttcttgcatttatacaacatttgagaacagcaaaaaaagaagaaattttacaaatacttaaaatggaaaataaagaggttttaccacaattagttgatgcagttacctcagctcaaacttctgatagtcttgaagcaatattagattttttagatttcaagtctgattcatctataattctacaagaaagatttttatatgcatgtggatttgcatcccatccaaatgaagaattgttaagagctttaattagtaagtttaagggatctattggttcatcagatattagagaaactgttatgataattacaggaactcttgtaagaaaattatgtcaaaatgaaggatgtaaattaaaagctgtagttgaagctaaaaagttaatccttggtggattggaaaaagcagaaaagaaagaagatacaagaatgtatttattggcattaaaaaatgcattacttccagaaggaattccttctcttttaaaatatgcagaagctggagaaggaccaatttctcatctagctactaccgcattacaaagatatgatcttccatttataacggatgaagttaaaaaaactcttaatcgaatttatcatcaaaatcgtaaagtacatgaaaagacagttcgtacagcagccgcagcaattatccttaataataatccttcatatatggatgttaaaaatattttattatcaattggtgaattgccacaagaaatgaataagtatatgttggctattgtacaagacattttaagatttgaaatgcctgcaagtaaaattgttagaagagttttgaaagaaatggtagcacataactatgatagattttctcgttcagggtctagtagtgcctatacaggatatattgaaaggtcaccaagaagtgcatcaacttatagtcttgacattttatatagtggatcaggaatattaagacgttcaaatttaaatatttttcaatatattggaaaagctggacttcatggaagtcaagtggttattgaagctcaaggacttgaagcacttattgctgcaactcctgatgaaggagaagaaaaccttgattcatatgcaggaatgtctgctattctttttgatgttcaattacgtcctgtaacattctttaatggatattcagaccttatgtctaaaatgttatcagcatctggggacccaatctctgttgttaaaggattaattttacttattgatcatagtcaagaattgcaattacaatcaggacttaaagcaaatattgaagttcaaggaggacttgctattgacattagtggggctatggaattttcattatggtatagagaatcaaaaacaagagttaaaaatagagttactgttgttataactactgatattactgttgattcaagtttcgttaaggctggacttgaaactagtactgaaacagaagcaggattagaatttattagtacagttcaattttcacaatatccatttttagtttgtatgcaaatggataaagatgaagctccatttagacaatttgaaaaaaaatatgaaagattaagtactggtagaggatatgtatcacaaaaacgaaaagaatcagtacttgctggatgtgaatttccattacatcaagaaaattcagaaatgtgtaaagttgtgtttgctccacaaccagattcaacaagttcaggatggttc

SEQ ID NO: 5490 - DNA, 2682 bp, Artificial Sequence
  derived and/or modified sequence
atgatcttgttggctgtgctgtttttgtgcttcatttcatcctattctgcaagtgtgaaaggccataccacgggacttagtttgaacaatgatcgcctgtacaagctcacgtattctaccgaagtgctactggaccgcggtaaaggtaagctgcaggacagcgtaggataccgcatcagctcaaatgtggatgtggcccttttgtggcgcaatcccgacggcgatgatgatcagctgatccaaataactatgaaggatgtaaatgtggagaacgtgaaccagcagcgcggcgagaagtctatctttaaaggaaagtccccgtctaagataatgggcaaggagaacctggaagccctgcagcgaccgacgctgctacacttaattcatggtaaggtcaaggaattctactcctatcaaaacgaggcagtagctatagagaacatcaagagagggctggcgagcctgtttcagacacaattgagctcgggtaccacaaacgaggttgatattagtggcaactgcaaagtaacgtatcaagctcaccaggataaggtgataaagatcaaggcgctcgattcttgtaagatagctcggtctggatttactactccgaaccaagtgcttggagtgagttctaaagcaacctcagtgactacgtataaaatcgaagacagtttcgtgatagccgtactggccgaggagacgcataactttggactgaattttctgcagaccattaagggcaagatcgtcagtaagcagaagctggagctcaagacaacggaggcaggaccgcgtttgatgtcgggtaagcaggccgccgccattatcaaagccgtcgactccaagtacaccgccatccccatcgtgggtcaggtttttcagtcgcactgtaagggttgcccatcattgtcggagctgtggcgctctacacggaaatacctgcagccggacaatctatcaaaggcagaggccgtccgtaactttctggcattcatccagcatctgagaaccgccaagaaggaagaaatcttacaaattctgaaaatggagaacaaggaggtcctcccccagctggtggatgcagtgacgtcggcgcagacttcagatagcctggaggcaatcctggacttcctagacttcaagtcggacagtagtataattttacaagagcggtttctgtacgcgtgtggcttcgcatcgcacccaaatgaagaacttctacgcgctttgatctccaagtttaagggtagcattggctcatctgatatccgcgagacggttatgattatcacgggaacgctggtgagaaagctgtgccagaatgagggatgcaaactgaaagctgtcgttgaggccaagaagctgatcctaggaggactggagaaagctgagaagaaagaagatacccgaatgtacctattggcgttgaagaatgccctgctgccggagggcattccgagcctgctgaagtatgccgaggcgggtgagggaccaattagccatctcgccacaacggcgctacagagatacgatctccccttcataacggacgaagtcaagaaaacgttgaaccgcatttatcatcagaatcgcaaggtccacgaaaagaccgtaaggacagcagccgctgcaatcatcttgaataataatccgagttatatggacgtcaaaaacatacttctctcaatcggcgagctgcctcaggagatgaataagtatatgctagcaatcgtccaagatatcctacgctttgaaatgcccgcctccaagatagtgcgtagggtgttgaaggagatggtggcacacaattatgatcgattctcacgctcgggctcgagcagcgcgtataccggctacattgaaagaagcccgcggagcgcctccacttactctttggatatcttgtattctggaagcggaatactgcgaagaagtaatttgaatatcttccagtatatcggcaaggctggcctgcatggttcccaggtggtcatagaggcccagggccttgaggctttaattgccgctacccctgacgaaggcgaggagaatttggactcctacgccgggatgagtgccatcctgtttgatgtgcagctgcgcccggtcacttttttcaacgggtactctgatttgatgtccaagatgctgagtgccagtggtgatccgatctctgtggtgaaaggcctgatcctcctgattgatcactcgcaggaactgcagctccagagtggcctcaaggcgaacatcgaggtgcagggaggtctggcaatagacatttcgggagcaatggaattttccctgtggtaccgtgagtcgaaaacgcgggtgaagaatcgcgtgacggtggttattacaactgacatcaccgttgattcttcgtttgtgaaggccggtctggagacctcgacggagactgaagcgggtcttgagttcatctcgactgtgcaattcagccagtaccccttcttggtgtgcatgcagatggataaggatgaggcccccttccgtcagtttgagaagaagtacgagagactgtccaccggcagggggtacgtttcccagaagagaaaggagtcggttctggccggatgcgagttcccgctgcaccaggaaaactccgagatgtgcaaggtcgtatttgcgccgcagccggactcgaccagcagcggatggttt

SEQ ID NO: 5491 - DNA, 2682 bp, Artificial Sequence
  derived and/or modified sequence
atgattctgctggctgtcctgtttctctgctttatctcgtcgtactcagcgtcagtgaagggtcacaccaccggcctgtcactgaataatgacaggctctataagctgacttacagcaccgaagtcctgcttgaccgcggtaaaggaaaattgcaggactcagtgggctaccgcatttcgtcaaacgtagacgtggctctgctctggcgcaatcccgacggcgacgatgaccaactcatccagatcacgatgaaggatgtaaacgtggaaaatgtgaaccaacagcgcggagagaagtccatcttcaaagggaaatcgccttcaaagattatgggaaaggagaacctggaggccttgcagcggccgactcttctgcatctgatccatggcaaggtgaaggaattctactcgtaccagaacgaagccgtggccattgagaatatcaaacgcggactggcctcgctctttcagacccaattgtcctcagggaccactaacgaggttgatatcagcggaaattgcaaggtgacgtatcaggctcaccaagacaaggtgatcaagatcaaggccctggacagctgcaagattgcccggtcaggattcaccactccaaaccaggtgctgggggtgagttctaaggcaacctcagtcaccacctacaagatcgaagattccttcgtgatcgcagtcctggctgaagaaacccacaactttggacttaacttccttcagaccatcaagggcaagatcgtgagcaagcagaagctcgaactcaaaaccactgaggcaggaccaagacttatgtcgggcaagcaggccgcggcaatcatcaaggcggtcgatagtaagtacaccgctatccctatcgtcgggcaggttttccagtcacattgtaagggttgcccttccctgagcgaactgtggcggtccacccgcaagtacctgcaaccagataacctgagcaaagctgaggcggtccggaactttctcgccttcatccaacatctgcggactgccaaaaaggaggaaattctgcaaatcctgaaaatggagaacaaggaagtgctgccacagctggtggatgctgtaacttctgcccagacctccgactcactggaagcgatcctggacttcttggatttcaagagcgactcctccatcattctgcaagagcggttcctctacgcctgcggatttgcatcccatccgaatgaagaactcctccgtgcactgatctccaagttcaagggatccatcggatcgtccgacatccgggagactgtcatgatcatcaccggaaccctggtgagaaagttgtgtcaaaacgaaggatgcaagctcaaagcagtggtggaggccaaaaaacttatcctggggggtcttgaaaaagccgagaaaaaagaagatactaggatgtacctcctggcattgaagaatgcgctcctccctgagggtatcccgtcgctgcttaagtacgccgaggccggcgaaggtccgatcagtcacctggccactactgccctgcagaggtatgatctgccattcatcacggacgaagtgaagaaaacgctcaaccgcatctaccaccagaaccgtaaggtgcacgaaaagactgtgaggactgctgcagctgccatcatcctcaataacaacccctcgtacatggatgtaaagaatattctgctgtcaataggagaactcccgcaggaaatgaacaagtacatgctggccattgtgcaggacatcctgaggttcgagatgcctgcgtccaagattgtgagacgcgtgctgaaggaaatggtcgcgcacaactacgatcgcttctcgagatcgggaagctccagcgcatacactggatacatagaacggagcccgcgatcagcgtccacttactcgctggacatcctctacagcggttcgggcatcttgcgccgctcgaatctgaatatctttcaatacataggaaaggcgggactgcacgggtcgcaagtcgtgatcgaggcccagggactggaggccctgatcgcggcgactcccgatgaaggcgaagaaaacctcgactcctacgcgggaatgtccgccattcttttcgacgtccagctgcggccggtcaccttcttcaacggctacagcgacttgatgagtaaaatgctgagcgcctcaggcgaccccatttctgtggtgaagggactcattctccttattgatcatagccaagagctccaattgcaatcgggtttgaaagctaatatcgaagtgcagggagggctcgccatcgacatctccggggctatggaattctctctctggtaccgcgagagcaaaactagagtgaagaaccgggtgactgtggtcatcacgaccgacataactgtcgactcgtcattcgtgaaggcaggactggaaacctcgaccgagacggaagccggactcgagttcatcagcaccgtccagttctcacagtatccgttccttgtgtgtatgcaaatggacaaagatgaggcaccgttccggcagtttgagaagaagtacgaacgactgagtaccgggagaggctacgtgtcccaaaagcggaaggagtcggttcttgcgggctgcgagtttccgcttcaccaggagaactccgagatgtgcaaagtcgtgttcgcgccacagccggatagcacctcgtccggatggttt

SEQ ID NO: 5492 - DNA, 2682 bp, Artificial Sequence
  derived and/or modified sequence
atgatactgctggccgtcttatttctctgtttcattagctcatacagtgcctcagtcaagggccacacaacggggctgtctctgaacaatgacagactctacaaactgacctattcgacagaggtcttgctcgatcgaggtaaaggtaaacttcaggattcggtggggtatagaatttcctccaacgtggacgtcgcactcttatggaggaatccagatggggacgacgatcaactgattcagatcaccatgaaggacgtcaacgtggagaatgtgaaccagcagagaggagaaaagagcatctttaagggaaagtcaccatcaaaaatcatgggaaaagagaaccttgaagcccttcagcgtccaacactgttgcatctcattcacggaaaggttaaagagttttacagttaccagaacgaggccgttgctatcgagaacattaagcgaggcctggcttccctgtttcaaacccagttgagtagcggaaccactaacgaagttgacatctccggcaattgcaaggttacttaccaggcccatcaggacaaagtcattaagatcaaagcactagatagctgcaaaattgctagatcaggctttaccacacctaatcaggtactcggtgtttcatctaaagccacttctgtgaccacctataaaatcgaggatagtttcgtgattgcagtgctggcggaagagacccacaacttcggcctcaattttctgcagacaattaagggcaaaatagtgagcaagcagaagctggagttgaagactactgaagcgggaccaaggctaatgtctggcaagcaggccgctgccatcattaaggccgtggattcaaagtatacagccattcctatcgtcggacaggtcttccaatcccattgcaaaggatgcccgtccctttcagaactgtggagatcaaccagaaaatacctccagccagacaatctttcaaaagccgaggccgtccgaaatttccttgcctttatacagcacctccgaacggcgaagaaggaagagatcctgcagattctgaagatggagaataaagaggtgttgcctcaactcgtagacgcggtcacctctgcccagacgtccgattccttggaagctatcctggatttcctggatttcaaatctgactcctctattattctgcaggaaagatttctttatgcctgtgggttcgctagccaccctaacgaagaactattgagagcccttatttctaagttcaagggcagtattgggtcctctgatatccgagaaaccgttatgatcattactggaacccttgttagaaagctgtgccaaaatgaaggctgcaaactgaaggcagtggtggaggccaaaaaactgatcctcggcggtctggaaaaggccgaaaagaaggaggatacccgtatgtacctattggcactgaagaacgccctgctgcccgaaggtatcccctccttgcttaaatatgccgaagcaggcgaagggcctatttcccacctagcgaccacagccttgcagaggtatgatctccccttcattaccgatgaagtgaaaaagactctgaaccgaatttatcaccaaaatcgaaaagttcatgaaaagacagtccgaaccgctgcagccgccatcattctgaataataatccgagctacatggacgtgaagaatattctgctgtccattggggaactgccacaagagatgaacaagtacatgcttgccatcgtccaggacatcctgcggttcgaaatgcccgcctcgaagatcgtcagaagggtattgaaggaaatggtagcacataactatgataggttttctcgaagcggcagttcctctgcatatactggatacattgaaagaagcccgcgttctgccagcacttacagcttagacatactttactccggctccgggatcctgagacgatcgaacctgaacattttccagtacatcggcaaggcaggcctgcatggcagccaggttgttatcgaagcccaggggctcgaagcccttattgccgccacacccgatgagggagaagagaatctggatagttacgccgggatgtccgcaatcctgtttgacgtgcagctccggcccgtgacattcttcaacggttatagtgacctgatgtccaagatgctttcagcatccggagaccccatatccgttgtgaagggcctaatcttgcttatcgaccactcacaggaacttcagctacagtctgggctgaaggcaaatatcgaagtgcagggaggactggcaattgatatttctggcgccatggagttttcattgtggtatcgagaaagcaagaccagggttaagaatagggtcacggtggtaattacaacagatatcactgtagattcttcttttgtaaaggcgggactcgagacatcgacggaaaccgaggccgggctggagtttatttccactgttcagttttctcagtaccctttccttgtgtgcatgcagatggacaaagacgaggccccttttagacagtttgaaaagaagtacgagcgtctgagcacagggcgaggatacgtgagccagaaaaggaaggagtcagtgctggctggttgtgaattccccttgcatcaggaaaattccgagatgtgtaaagtcgtattcgccccacagcctgactccactagctccggatggttc

SEQ ID NO: 5493 - DNA, 2682 bp, Artificial Sequence
  derived and/or modified sequence
atgatcttgctcgccgtgctgtttctgtgtttcatttcaagctactcggcatcggtcaaaggacacactaccggtctttcgttgaacaacgaccggctgtacaagctgacctacagcactgaggtcctgctggaccgcggaaagggcaagctccaggactcagtgggatatagaatctccagcaatgttgatgtggccctgctgtggagaaatccggatggagatgacgatcaactcatccagattaccatgaaggacgtgaacgtggaaaacgtgaaccaacagagaggagagaagtcgatcttcaagggaaagtcgccatctaagatcatgggcaaagagaacctggaggcgctgcaaagaccaactttgctccatctgatccacggaaaggtgaaggaattctacagctaccaaaacgaagcggtggccattgagaacattaagcgcggcctcgcgtcgctgttccagacccaactctcctccggaaccaccaacgaggtggacatcagcggaaactgtaaggtcacttaccaggcgcaccaagataaggttatcaagattaaggcgctcgactcatgcaaaatcgctaggtccggtttcacgactccgaatcaggtcctcggggtcagctccaaggccacttcagtcactacctacaagatcgaggactccttcgtcattgccgtcctggcggaggaaacccacaacttcgggctgaatttcctgcaaaccattaaagggaaaatcgtctccaagcagaagctcgaactgaaaactacggaggccgggccgcgcctgatgtcaggcaaacaggctgccgccatcatcaaggcggtggattcaaagtatactgctatccctatcgtcggacaagtgttccaatcgcattgcaagggttgtccgtcgctgtccgagctgtggcgatcgacccggaagtacttgcaaccagacaacctctccaaggcagaggccgtgcgcaatttcctggcgttcatccagcacctccggactgctaagaaggaagagatcttgcagatcctcaaaatggaaaacaaagaagtgctgcctcagctggtggacgccgtgacctcggcccaaacttcggacagcctggaagccatcctggacttcctggacttcaagtccgacagcagcatcatcctccaggaaagatttctgtacgcctgcggattcgcgagccatccaaacgaagagttgctgcgcgctcttatctcaaagtttaagggatccatcggaagctcagacattcgagaaacggttatgatcatcaccggtaccctggtgcgcaaactttgccagaatgaaggctgtaagttgaaagccgtcgtggaagcaaagaagctcattttgggaggactcgaaaaggccgagaagaaggaagatacccggatgtacctgctggcgttgaagaacgccttgttgcctgaaggaatcccttccctgctgaaatacgcggaggctggagagggaccaatctcccacttggccaccactgcccttcaaaggtacgatctccctttcatcacggatgaggtgaagaaaaccctgaatcggatctatcaccaaaatcgcaaggtgcatgaaaagactgtgcggaccgccgccgctgcaatcattttgaacaacaatccgagctacatggacgtgaagaatatcctgctctccattggagaattgcctcaagagatgaacaaatacatgctggcgatcgtccaggatatcttgcgcttcgagatgcccgcgtctaagatcgttcggagagtgctgaaagaaatggtggcccacaattacgaccgcttctcccgcagcggttcgtcctcagcttacactggttacattgagcgctcaccgcggtccgcatcgacgtactcattggatatcctctactccggctcaggcatcctgaggagatccaacctcaacatcttccaatacataggtaaagcgggtctgcacggctcacaggtggtgatcgaggcgcaagggttggaggcattgattgcggccaccccggacgagggggaggagaacctggattcatacgcgggcatgtccgcaatcctgttcgatgtgcagttgcggccagtgacgttctttaacggatactcggatctgatgtcgaagatgctgtcagcttcgggagatcctatctcggtggtcaaaggcctcatcctgctcattgatcacagccaggaactgcaacttcagtcaggcctgaaagcaaacatcgaggtccaagggggcctcgccattgacatttccggagctatggaattctcgctctggtacagggaaagcaaaacccgcgtcaaaaacagggtgaccgtcgtcattactaccgacattactgtggatagcagctttgtgaaggcaggacttgaaacctcaactgagactgaggccggtcttgaattcatcagcactgtgcaattttcgcagtacccattcctggtgtgcatgcaaatggacaaggatgaggccccgttccggcagtttgagaagaaatatgaaaggttgtcaactggaaggggttacgtgtcccaaaaacggaaggaatcagtgctggcagggtgcgaattcccactgcaccaagagaactcagaaatgtgcaaagtcgtctttgctccacaaccggattcgacgtccagcggatggttc

SEQ ID NO: 5494 - DNA, 2682 bp, Artificial Sequence
  derived and/or modified sequence
atgattctgctggcagtactctttctatgttttataagcagttactctgctagtgtcaaggggcatacgaccggactgagtctgaacaacgaccgactttacaaactgacatattcaaccgaagttctgctggacagagggaagggtaagcttcaggattctgtcggctaccggatctcctcgaatgtggacgtagcactgttatggcggaacccagatggcgacgatgaccagcttattcagataacaatgaaggatgtcaatgtagaaaatgtgaaccaacagcgaggcgaaaagtccatcttcaaaggaaagagcccctctaagatcatgggaaaagaaaatttggaggccctccaaaggccgaccctcctgcatctaatccacggaaaggtgaaggagttctactcatatcagaatgaggccgtggcaatcgagaacattaagaggggacttgctagtctgttccagacccaattgtcaagcggaactacgaacgaggtcgacataagtggaaattgcaaagtgacataccaggcccaccaagacaaggtgattaaaatcaaagcgctggacagctgcaagatcgcccgctctggattcacaaccccaaatcaggtactgggcgtcagcagcaaggccacgtccgtaaccacgtacaaaatcgaggattccttcgtcatagccgtgctcgctgaggaaacacacaattttgggctgaattttctgcagacgattaagggaaagattgtgtcaaagcaaaagctggagctaaagactactgaagccgggccccgactaatgtctggaaagcaggccgctgcaatcattaaagccgttgactccaagtatactgcgatccctatcgtgggccaggtattccagtcccactgtaaaggctgtccgtctctctccgaattatggaggagcactcgcaaatacctgcaacctgacaatctgtctaaagcagaggcagtgagaaacttccttgctttcatccagcatctgcgcaccgccaagaaagaggaaattttgcagatcctgaagatggaaaacaaggaggtgctgcctcagctggttgatgcagtcacttccgcacagacctctgactcactggaggcgattttggattttcttgactttaaatctgattccagtataatactgcaggagcgattcctatacgcctgtggatttgcctcccaccctaatgaagaacttctccgggcccttatttctaagtttaaaggttctatcgggtcatcggatataagagagaccgtgatgattataacggggacactcgtcaggaaactgtgccagaatgaaggctgcaaattgaaggccgttgtggaagctaagaaactgatcctggggggtctggaaaaggcggaaaaaaaagaggacacccgaatgtatctgcttgctctcaagaacgcactcctgccagagggtataccttcattgctcaagtacgctgaggccggtgagggcccgatttctcatctcgcgaccaccgccctacagcggtacgatttgcctttcattaccgatgaagttaaaaagactctgaatcgtatctatcatcagaatcgcaaagttcacgagaaaactgtaagaactgctgctgctgcaatcattcttaataataacccatcttatatggacgtgaagaacatactgctctcaattggcgagctgccacaagagatgaacaagtacatgctcgcaatcgtgcaggatattttgcggttcgagatgccagcatccaagatagtacggagagtattgaaagaaatggttgcgcataactacgaccggttcagtcgaagcggaagttctagcgcatacactggctacattgaacggtcacctcgaagcgcgtcgacctactcactggatatcctctattcggggagtggtattctaagaaggtcaaacctgaatatttttcagtacatcggcaaagcagggctgcatggtagccaggtagtgatcgaggcacagggtttggaggctctgatagcagcaacaccagatgaaggggaagagaatctggactcttacgccggcatgtcggctatactgtttgacgtgcagttgaggccagttacctttttcaacggatacagcgatcttatgagcaagatgctgtcagcgtccggagaccctatatccgttgttaagggcctcatacttctcatcgaccattcccaggagctacaacttcagagtgggctgaaagcaaatatcgaagtacaggggggcttggcgatagatatatctggggccatggaattctcgttgtggtaccgagagagcaaaactagagtgaagaatagagtaactgtggttattaccactgatataaccgtcgacagctctttcgtaaaagctgggcttgagacgtctaccgaaaccgaagccggactagagtttatatcaaccgtgcaattttcgcagtatcctttcttggtatgcatgcagatggataaagacgaagctccgtttcggcagtttgagaaaaagtacgagagactaagcactggacgcggttacgttagccagaagcgaaaagagagtgtgttggccggatgtgaattcccgctgcatcaggaaaatagtgagatgtgtaaagttgtgttcgctcctcagcctgactctacctctagtggatggttc

SEQ ID NO: 5495 - DNA, 2682 bp, Artificial Sequence
  derived and/or modified sequence
atgattttgctggcagtattgttcctttgcttcatttcaagctacagcgcaagcgttaaggggcacactacagggctctccttgaataacgatagattgtacaaactgacatattccactgaagtactgctggatagagggaagggaaagttgcaagactcagtgggatatagaatctcgagtaatgtggatgttgccttactgtggcgcaatccggacggagacgatgaccagctgatccaaatcacgatgaaggacgtcaacgtcgaaaacgtcaaccaacagcggggagagaaaagcatcttcaagggaaagagccctagcaagataatgggaaaagaaaacctggaggctctccaaaggcctacccttctccatctgatccacgggaaagtgaaagagttttactcctatcagaacgaggctgttgctattgagaacatcaaacgcggacttgcctcgctcttccagacccagctgagcagtggaaccactaatgaggtggatatctctgggaactgtaaagtgacttaccaggcacatcaagataaagtgatcaaaatcaaagcacttgactcatgcaaaattgcacgatccgggttcaccacccccaatcaggttctgggcgtgagttctaaggccaccagcgtaaccacttacaagatcgaggactcattcgttatagcggtactcgcggaagaaactcacaattttgggctcaactttctccagacaatcaagggtaagatcgtctcgaaacaaaagcttgaattgaagaccaccgaggccgggcccagactgatgagcggtaaacaagccgccgctattattaaggctgtggacagcaaatatacagcaatcccaatcgttggacaggtgttccagagccactgcaagggctgcccatccctgtctgaactttggcgttcaactcggaaataccttcagcccgacaacctgtctaaagccgaggccgtcaggaactttctggcctttatccagcacctgcgcacagccaagaaggaagaaatactccagatccttaaaatggaaaataaggaggtgttgcctcaactggtcgacgccgtgacttcagctcagacatccgactcactggaagccattctggattttttggatttcaaaagcgatagcagtatcatacttcaggaacgctttctttacgcttgcggattcgcgagtcatccgaacgaagaactgcttagagctctcatctcaaagtttaagggatccataggcagcagcgacataagggaaaccgtaatgatcatcaccgggactctggtcaggaaactctgccaaaatgaaggctgcaaactcaaagccgtcgtggaagctaagaagctcatcctgggcggcctcgagaaagcagaaaaaaaggaggatacaagaatgtacctgcttgcactcaaaaatgcactgctccctgaggggattcctagcctccttaagtacgctgaggcaggagagggcccaattagccacctagccactactgccctgcagcgatatgatctgccttttataaccgatgaagtgaagaaaacccttaaccgaatttaccatcagaacagaaaagtgcacgagaagaccgtgagaaccgctgccgcagccatcatcctgaacaataacccgtcgtacatggatgtgaaaaacatcctgctcagtatcggggaactcccacaagagatgaacaaatatatgttagccatcgtccaagatatccttcgcttcgaaatgccagcttcgaagatcgttcgccgagtgcttaaagaaatggtcgcccacaattacgatcgcttttccaggagcggcagctcatcagcttacactggctatattgaacgttcgcctagatcagcaagcacgtacagtcttgatatcctgtattctggcagtggtatacttagaaggagcaacctgaacatctttcagtatataggcaaggcagggctgcatggatcccaggtggttatcgaggcccagggactcgaggcactgattgctgctaccccagatgagggggaagagaacctggactcttatgctggcatgtcagcgatcctgttcgatgttcagctcagacccgttacattctttaacggatatagcgatctgatgagtaagatgctgagcgcctccggggatcctatctcggtcgtcaagggattgattcttctcatcgaccattcacaagaattgcagttgcagtccggcctgaaggcaaacatcgaggtccagggcggacttgccatagacataagcggcgctatggagttttcactgtggtaccgcgagagcaagaccagggtgaaaaacagagtcaccgttgtgatcaccactgatatcacagtggactctagctttgtcaaggcaggattggagacctcgacagagaccgaagcagggctcgagtttatttccactgtccagttttcccagtatccattcctcgtgtgcatgcagatggacaaagatgaagccccgtttaggcaatttgagaagaaatacgagaggctgtcaacaggaaggggctatgtgagccaaaaacggaaggaaagtgtcctggccggctgcgagtttccacttcatcaggaaaactccgagatgtgcaaagtggtattcgctcctcagcccgacagcacttcctcaggatggttc

SEQ ID NO: 5496 - DNA, 2682 bp, Artificial Sequence
  derived and/or modified sequence
atgattctgctggccgtgcttttcctctgttttatcagctcgtattcggctagcgtgaagggacataccaccggcctgtccctcaacaatgatcggctgtacaagctgacttacagcaccgaggttctgctggaccgcggaaaaggcaagctgcaagattcggtgggctacagaatctcgtccaatgtagatgtcgcgttgctctggaggaacccggatggagacgacgaccagctcattcaaatcactatgaaagatgtcaatgtagaaaacgtcaaccagcagcgcggtgaaaagtccatctttaagggaaagtctccatcgaagattatggggaaggagaacctggaagccctgcagcgcccgactctccttcacctgatccatggaaaggtgaaggaattctattcataccagaatgaagccgtggccatcgaaaacatcaaacggggtctggcctcgttgttccagactcaactctcatcggggactaccaacgaggtcgatatctccggaaattgtaaagtgacctaccaggctcatcaggacaaagtgatcaaaatcaaggcattggactcgtgcaagatcgcccgcagtggttttaccaccccgaatcaggtgttgggagtctcaagcaaggccactagcgtgaccacctacaagatcgaggactcatttgtgattgccgtgctggccgaggaaactcacaattttggactgaacttcctgcagactatcaagggtaagatcgtgtcaaagcaaaaacttgagttgaaaaccacggaggcggggccaagactgatgtcgggaaagcaggcggcggccatcatcaaagcggtggactccaagtacactgcgatccccatcgtgggccaagtgttccagtcgcattgcaagggatgcccgagcctgtcggagctgtggcgtagtaccaggaagtacctgcagcctgacaacctctccaaagcagaggccgtgagaaatttcctcgctttcatccaacacttgaggacggccaagaaggaagagattctccagatcctgaaaatggagaacaaagaagtgctccctcagctggtggacgcggtgacttccgcgcagacgagcgactcacttgaagccatcctcgatttcctcgacttcaaatcagacagctcgattatcctgcaggagcgattcctctacgcgtgcggattcgcgtcgcacccaaacgaagagctgctgagggctcttatctccaaattcaagggcagcatcggttccagcgatatccgcgaaacggtcatgatcatcacggggacgctcgtgcggaagctgtgccagaatgagggctgcaagctgaaagcagtggtcgaggcaaagaaattgatcttgggcggactggaaaaggcggaaaagaaggaggacaccaggatgtacctgcttgccctgaagaatgcgctccttccagaaggaattccaagcctgttgaagtacgctgaagctggcgaggggcctatctcgcatctcgcaaccactgcccttcaaagatacgatctgccgttcatcactgatgaagtgaaaaagaccttgaacagaatctaccaccaaaaccggaaggtgcatgaaaaaactgtgagaactgccgcagcagcaataatcctcaacaacaatccgtcctacatggatgtaaagaacatacttttgtcaatcggagagctccctcaagagatgaacaagtatatgcttgcgatcgtacaagatatactccgcttcgaaatgcccgcctcgaagattgtccgcagagtattgaaagagatggtcgcacacaattatgacagatttagccgctcggggtcctcatcagcctacaccgggtacatcgaacggtccccacgctcagcatccacttactcgttggacatcctgtactccgggtccggcattctgagacggagcaacctgaacatcttccagtacattggcaaggcgggtctgcacggatcccaggtcgtgatcgaagcacaagggctggaagcgctcatcgcggctaccccagatgaaggagaagagaacctcgactcgtacgcgggcatgagcgcaatcctgttcgacgtccagctgcgccccgtgactttcttcaatggttactcagacctgatgtcgaagatgctgagcgcctcaggagatccgatctctgtggttaaggggctgatccttctcatcgaccactcccaggaactccagctccagtcaggactcaaagccaacattgaggtccaaggaggtctggctatagacatttccggagccatggaattctcactttggtacagggaaagcaagacccgcgtgaagaacagagtcactgtggtgattaccactgatatcaccgtcgacagcagctttgtcaaggctggactcgaaacctccaccgaaaccgaggccggactggagttcatctctactgttcagttcagccaatacccgttcctggtgtgcatgcagatggataaggacgaagccccctttcggcaattcgagaagaagtatgagcggctctccaccgggcggggatacgtgtcccaaaaacggaaagaatcagtgctcgctggatgcgagtttcctttgcaccaggaaaattcagaaatgtgtaaggttgtctttgccccgcaaccggattcgaccagctcaggatggttt

SEQ ID NO: 5497 - DNA, 2682 bp, Artificial Sequence
  derived and/or modified sequence
atgatactcctggcagtcctgtttctgtgtttcatctcctcttactctgcatctgtaaagggacacaccactggcctgagcctgaataacgatcggctctataagttaacatactccacagaagtgttgctcgacagaggaaagggcaagctgcaggacagcgtcggttatcgcatctctagcaacgtggacgtggccttgctctggcgaaatcccgacggcgatgacgatcagctcatacaaatcacaatgaaggacgtgaacgttgagaatgtgaatcagcagagaggggaaaagtccattttcaaagggaagtccccctccaagattatgggaaaagagaatcttgaggctctgcagaggcccaccctccttcatttaatacatgggaaggtgaaggagttttactcctatcagaacgaggccgtggcaatcgagaacatcaaaaggggactagcctccctatttcagacccagctgtccagtggcactaccaacgaggtggacatcagtgggaattgtaaggtcacatatcaggcacaccaagacaaggtgatcaagatcaaagccctggattcttgcaagatcgcccggagtggcttcaccacgcctaaccaggtgctgggagtctcttccaaggccacttcggtgaccacttacaaaatcgaagatagcttcgtcatcgctgtgctggcagaggagacccacaatttcggtttgaatttcctccaaacaataaaaggaaaaattgtgtcaaaacagaagctggagttgaagacgaccgaggcgggccccagactcatgagcggaaagcaggccgccgcgatcatcaaagccgtggacagtaagtataccgccatccccatcgtcgggcaggtgtttcagtctcattgcaagggctgcccctcactttccgaactgtggcgctctacaagaaaataccttcagcctgacaacctgtcgaaggccgaggcggttcgcaacttcttggctttcatacagcatctgcggacggccaagaaggaagaaatcttacagatccttaagatggagaacaaggaagtgttgcctcagcttgttgatgcggtgactagtgcccagacatccgattcgctcgaagccatattggatttcctcgatttcaagtcagactcctccattattctgcaggaaaggttcctttatgcgtgcgggtttgcgtcccacccaaacgaggagctcctgcgtgctctgatctcaaaatttaaaggctccattggatcatccgacatccgcgagaccgttatgattataacagggacactagtgaggaagctatgccagaatgaaggctgcaaactgaaggctgtggtagaggctaagaaactgatacttggagggctggaaaaggcggagaagaaggaggacacgagaatgtatcttctggctctgaagaacgctttgctacctgaagggattccaagcctgctcaaatatgccgaggcaggcgaagggcccatcagtcacctcgccacaactgccctccaaagatacgatctcccattcatcacggatgaggtaaagaaaaccttgaatcggatctaccatcagaaccggaaggttcacgaaaagactgtgcggacggccgctgccgcaataattctgaataataacccctcctacatggatgttaagaacatacttctgtcaatcggtgagttaccccaggaaatgaataaatacatgctcgccattgtccaggacatattgaggtttgagatgccagcgtcaaagattgtgaggagggtgctcaaagagatggtagctcataactacgacagattttctagatctggcagttctagcgcttacaccgggtacattgagcggagtccacgatccgcctctacatacagtctcgatatcctgtacagcgggtcaggtatcctgaggcggagcaacctgaatattttccagtatatcgggaaggcagggctccatgggagtcaagtggtcatcgaagcccaggggctggaggccctaatcgccgccacccccgacgagggtgaagagaacctcgacagctacgcaggcatgtcggctatccttttcgatgtgcaactgcgacctgtcacttttttcaatggttactctgacctcatgtctaagatgctgtcggccagcggtgatcccataagtgtcgttaagggccttatattgctaatcgaccattcccaggagcttcagctgcagagcggcctgaaagccaacatcgaggttcagggcggactagctatcgacatttcaggcgccatggaattcagcctgtggtacagagaatccaagacacgcgtgaaaaatcgcgtcaccgtggttatcaccaccgatattacagtggattcctcattcgtgaaggctgggctcgagacctccacagagacggaggctggtcttgaatttatcagtacagtccagttcagtcagtatccattcttagtttgcatgcagatggacaaagatgaggccccttttagacagtttgaaaagaagtatgagcgcctgtctactggcaggggctacgtatcgcaaaagcgcaaggaaagcgtgctggcaggctgcgaatttccactgcaccaagaaaactcagaaatgtgcaaagttgttttcgctcctcagccggacagcacctccagtggctggttt

SEQ ID NO: 5498 - DNA, 2682 bp, Artificial Sequence
  derived and/or modified sequence
atgattctgctcgcagtactcttcctgtgctttatcagctcctattccgcatccgttaaagggcacaccaccggattatcactgaataatgaccggctttacaagctaacttatagcacagaggtcctgttggacagaggcaaggggaagttgcaagattccgtgggctaccggatctcctcaaacgtggacgtcgctctgctctggcgcaatccagacggagatgacgatcagcttatccagataactatgaaagacgtgaacgtggaaaatgtaaaccaacagcgaggtgagaagtctattttcaaggggaagagcccatctaagattatggggaaggagaacctcgaggctttacagaggcccacgctgctgcatctgatccatggcaaagtgaaggagttctactcctatcaaaacgaggctgtcgccattgaaaatataaaacgggggctagcatctttattccagacccagctgagcagtggtactaccaacgaagtggacatttctggtaattgcaaagtgacttaccaggcacaccaggacaaagtaataaagattaaggcgttggattcttgtaagatcgccagatccgggttcacaactccaaaccaggtgttgggagtgtcatcgaaggcaactagcgtaaccacttacaagatagaagactcctttgtgattgctgtgttggcagaggagacccacaatttcgggctaaatttcctgcagacgatcaagggcaagatcgtatcgaagcagaaactggagttgaaaacaaccgaggctgggcccaggctcatgtccgggaagcaagctgctgctatcattaaagccgtagatagcaagtataccgcaatcccaattgtgggccaggtttttcagtcacattgcaagggctgtccgagcctttctgagctatggcgttcaacacgcaagtacctgcagcccgataatctgtctaaggcggaggctgtacggaatttcctagccttcatccaacacctgcggactgccaaaaaggaggagatcctacaaattctgaagatggaaaacaaggaggtccttccccagttggtggatgcagtgacctccgcccaaacctcagacagccttgaggccattctagattttctcgatttcaaaagcgactcctcaatcattctgcaggagcggtttctgtatgcctgtgggttcgctagccacccgaatgaagagctgctgcgggcgttgattagtaagttcaaagggtctattggctcatcagacattcgggagacagtaatgatcatcaccggcaccctcgtccggaaactctgtcaaaatgagggctgcaagctgaaggcagtggtcgaagctaagaagctcatcttgggcggcttggagaaagcggagaaaaaagaagataccaggatgtacctgctcgctcttaagaatgccctcctcccggagggaataccatccctgctaaagtatgccgaagccggcgagggcccaatatctcatctggctaccacagccttgcagcggtacgatctgcccttcattactgatgaagtgaaaaagactttaaataggatctatcatcagaatcggaaagtgcatgagaagacagtgaggacagccgcagctgcaattattttaaataacaacccttcctatatggacgtgaaaaatatccttctgagtattggggagctacctcaggagatgaacaaatacatgctcgcaatagtgcaggacattttgcgtttcgagatgccggcctccaaaattgtgagacgcgtcctgaaagagatggtcgcacacaactatgatcgcttctcgaggagcggctcatccagtgcctataccgggtacattgagcgctcgccaaggagcgcatccacctacagcttagatatcctgtatagtggcagcggcatcctgcgcagaagtaaccttaacatcttccagtacataggcaaagccggacttcatggcagtcaagtggtgatcgaggcccaaggtttggaagctttgatcgctgcaactccagacgaaggagaggagaacctggatagttatgctggaatgagtgccatactgtttgacgtgcagctcagacccgtaacattttttaatgggtacagtgacctcatgtctaagatgctaagtgcttcaggcgacccaatctcggtcgtgaaaggccttatcttgttaatcgatcattcccaggagctccagctacaatcgggcctcaaggcaaatattgaagttcagggcgggctggcaatcgatatctctggagccatggagttttcattatggtatcgagaatccaagacacgggtcaagaaccgtgtcactgttgttatcactactgatattactgtcgattcatcattcgttaaggcgggcctggagacttctaccgagaccgaggcaggcctggagtttatttctaccgttcagttttctcagtatccctttctcgtatgtatgcagatggacaaggacgaggccccttttcgtcaatttgaaaagaaatacgagcgactttcgactggccgtggttacgtcagccaaaagagaaaggagtccgtgctggctggctgcgagttccctctccatcaggaaaacagtgagatgtgtaaagtcgtgttcgctcctcagcccgatagcacgtcttctggatggttt

SEQ ID NO: 5499 - DNA, 2682 bp, Artificial Sequence
  derived and/or modified sequence
atgatcctcctcgcggtgctgtttctgtgctttatctcgtcatacagtgcttcagtgaaaggacacaccacgggactctccctcaataacgatagactttacaaactcacctactcaactgaggtcctgttggacagaggaaagggcaagctgcaggatagcgtcggataccgcatctcgtcaaatgtggacgtggcccttctgtggcggaatcctgacggagacgacgatcagctgattcaaatcactatgaaagacgtcaatgtggaaaatgttaatcagcagaggggtgaaaaaagcatcttcaagggaaaatcgccatctaagatcatggggaaagaaaacctggaagcattgcaacgcccaaccctcctgcatctgatccatggaaaagtgaaggaattctactcgtaccagaacgaagcagtggccattgagaacatcaagcgcggactggcttccctgttccagactcaactttcctccggaactaccaacgaagtcgatatctccggaaactgcaaggtgacctaccaggcacaccaggacaaggtgatcaagatcaaagccctggactcgtgtaagatcgcccggtcgggctttacgactccgaaccaagtgctgggcgtgtcgtctaaggcgacttccgtgactacctacaagatcgaggactctttcgtgatcgcggtccttgcagaagaaacccacaacttcggactcaatttccttcagaccatcaaaggaaagattgtgtccaaacaaaaacttgagctgaaaactactgaagctggcccgcgcctgatgagcggaaaacaagcggcagccatcatcaaggccgtggattccaagtataccgcaattccaatcgtgggacaggtgttccagtcacactgtaagggttgcccgtccttgtcggagctctggagatccacccgcaagtacctgcaaccggacaacctctcgaaggcagaggcggttagaaacttcctggccttcattcagcacctgcgtactgctaaaaaggaggagatcttgcagatcttgaaaatggagaacaaagaagtgcttccacagttggtggacgccgtcacttcggcccagacctccgacagccttgaggctatcctggattttctggactttaagtcggattccagcattatcttgcaagaacggttcctgtatgcctgcggattcgccagccatcccaacgaagagttgttgagagccctcatctccaaattcaagggaagtataggttcgtccgacatccgggaaaccgtgatgataatcaccgggacccttgtccggaaactgtgccagaacgaaggctgcaagctcaaagcagtggtcgaggcaaagaaattgatcctcggcgggctggaaaaggcggaaaagaaggaggacaccagaatgtacctcctggcactgaagaatgcgctgctgccggagggaatcccgtccctgttgaaatacgcggaagccggggagggacctatctcccatctggctactaccgccttgcagagatacgacctgccgttcatcaccgacgaggtcaaaaagactctgaaccggatctaccatcaaaaccgcaaggttcatgaaaagactgtgcggactgccgcggcggcgatcatccttaacaataacccctcgtacatggatgtgaagaatattctgctgtcaatcggcgagttgccgcaggaaatgaacaagtatatgctggctatcgtgcaggacattctcagattcgaaatgccggcatcaaagatcgtgcgaagagtcctgaaagaaatggtcgctcacaactacgaccggttctcgagatcagggtccagctcagcatacaccgggtacatcgagcggtcgcctcgctccgcgtcaacctactccctggatatcttgtactcgggctcagggatcctgcggagatcgaacttgaacatcttccaatacattggaaaggccggcctgcacggatctcaggtggtgatcgaggcccagggtctggaggccctgatcgccgccaccccggatgaaggagaggagaacctcgatagctacgcgggaatgtccgcaatccttttcgatgttcagcttcgcccagtgactttcttcaatggatattcggacctgatgagcaagatgcttagcgcttcgggcgatcctatcagcgtggtgaagggactgatccttcttattgaccactctcaagaacttcagctccagtcaggactcaaggcgaacatcgaagtgcagggcggactcgcaatcgatatctcgggtgctatggaattctccctgtggtaccgcgaaagcaagactcgggtgaaaaacagggtcaccgtcgtgatcaccactgatatcaccgtggacagttctttcgtcaaggccggcctcgaaacctcaactgaaaccgaagcaggtctggagttcatctcaacggtgcagttctcgcaatatcccttcctcgtgtgcatgcagatggacaaagacgaggcccctttcagacagttcgagaaaaagtatgaaaggttgtcaactggacgcggatacgtctcccagaagcggaaggagtcggtgctggccggctgcgaatttccacttcaccaagagaactcggagatgtgtaaggttgttttcgcgccgcagccagactccacctcatctggatggttt

SEQ ID NO: 5500 - DNA, 2682 bp, Artificial Sequence
  derived and/or modified sequence
atgattctgctggccgtgctgttcctttgcttcataagctcatactcggcctcagtgaaaggtcatactaccggactgtcgctgaataatgaccgactgtacaaactgacttactcgactgaagtcctgctggaccgggggaaagggaaacttcaagactccgttggatacagaatttcgtcaaatgtggatgtggcactgctgtggcgcaaccctgatggagatgatgatcagctcattcaaatcacgatgaaagacgtgaacgtggaaaatgtgaatcagcaaaggggagaaaagtctatctttaagggaaagtcgccttcgaagatcatggggaaagagaaccttgaggctctccaaagacccaccctgcttcatctgatccatggcaaagtgaaggaattctatagctaccaaaatgaggctgtcgcaattgaaaacataaaacgcggtctggcctccctgtttcagacccagctctcatccgggaccaccaacgaggtggacataagcggaaattgtaaggtcacctaccaggcccatcaagataaggtgattaagatcaaggcactcgactcgtgtaagatcgcacgcagcggtttcactaccccaaaccaagtgctgggcgtgtcctccaaggccacgtccgtgaccacgtacaagattgaggactcgttcgtcattgcagtgctggctgaagaaactcacaatttcggactgaacttcctgcaaacgattaagggaaagatcgtcagcaaacaaaagctggaactgaaaaccactgaagcaggaccacgactgatgtccggaaagcaagctgcagcgatcattaaggcagtcgactccaagtacacggcgattccgattgttggacaagtctttcagtcccactgtaaggggtgtccaagcctgtcggaactctggagatcaactcgaaagtacctccaaccagacaacctgtcaaaggcagaagccgtgcgtaacttcttggcctttattcaacaccttcggaccgccaagaaggaggaaatcctgcagattttgaaaatggaaaacaaggaagtgcttccgcagctcgtggacgcggtgacttcagcacagacctcagattctctggaggcgattctcgatttccttgatttcaaatcggattcctccattatactgcaggaacggtttctctacgcttgcggattcgcctctcatcccaacgaggaattgctccgggcacttatctccaagttcaagggttcgatcggatcgtccgatatcagagaaaccgtgatgatcattactggtacgctcgtgcgtaaactttgtcagaacgagggctgtaaactgaaggccgtggtggaagcgaaaaagctgatccttggcggactggagaaggccgagaaaaaggaagataccagaatgtacctgcttgcgctcaaaaacgcactgctcccggaaggaatcccatcgctgctgaagtacgccgaggcaggtgagggacctatttcccacctggcaaccaccgccttgcagcgatatgatcttccttttatcactgacgaggtgaagaaaaccctgaatcggatctaccatcaaaaccggaaagtccatgagaaaaccgtgagaactgctgcggcggcaatcattctgaacaataacccatcatacatggatgtgaagaacattttgcttagcattggcgaactgcctcaggagatgaacaagtacatgcttgcaatagtgcaggatatcctcagatttgagatgccagcatccaaaattgtgcgccgtgtccttaaagaaatggtggctcacaattatgataggtttagccggtcaggcagcagctcggcatacactggctacatcgagagatcgccacggagcgcatccacttacagccttgatatcctgtacagcggttccgggatacttcggagaagcaatctgaacatatttcagtacatcggaaaagctgggctgcatggaagccaagttgtcatcgaagcccaaggcttggaagcacttatcgccgcaactcctgatgagggagaagaaaatcttgactcctacgcaggcatgtcggcaatcctgtttgacgtccaacttcggcctgtgactttctttaacggatactccgacttgatgtcaaaaatgctgtccgccagcggggatccaatttccgttgtcaaggggctgattctgcttatcgaccattcgcaagaactccagctccagtccgggctgaaggccaacattgaagtccaaggtggacttgccatcgacatctcgggcgcaatggaattctcactttggtaccgcgaatccaagacccgagtcaaaaaccgcgtcacggtggtgattactaccgacattaccgtcgatagctcctttgtcaaggcaggactcgaaaccagcaccgagactgaagcaggtcttgagtttatctcgaccgtgcaattctcccagtacccatttcttgtttgtatgcagatggacaaggatgaagctccctttcgccaattcgagaagaagtacgagcggttgtcaaccggacgcggatacgtctcccagaagagaaaggagagcgtgctggcaggttgcgagtttcccctccatcaagaaaattcggaaatgtgcaaagtggtgtttgcccctcaaccagacagcacgtcatccggttggttt

SEQ ID NO: 5501 - DNA, 2682 bp, Artificial Sequence
  derived and/or modified sequence
atgattctccttgcagtgctttttctgtgtttcatttcctcatactccgcgagcgtcaagggccatactactggactgtcgctgaataacgatcgcctgtacaaactgacgtacagcaccgaagtgcttctggataggggaaaaggaaagttgcaggactcggtgggttatagaatatccagcaacgtggacgtggcactgctttggagaaatccagacggtgatgatgatcagctgattcagattactatgaaggatgtcaacgtggaaaatgtgaatcaacagcgcggcgaaaaatcaatctttaaaggcaagagcccgtcgaagattatgggtaaggaaaatcttgaagccctgcaaagacccactttgctccatctgatccatggcaaagttaaggagttttactcataccagaatgaagcagtggcaattgaaaacattaaacgggggcttgcatccctttttcagactcaactgtcgtccggaaccactaacgaggtcgatatttcaggtaactgcaaggtgacctaccaggcccatcaggataaagtcataaagataaaagcactggattcatgcaagatcgcacgcagcggcttcacgacgccaaaccaggtgcttggagtctcatcgaaggccacctccgtaaccacctacaagattgaggactcctttgtcatcgccgtgcttgccgaagaaacccacaattttggtctgaactttcttcagaccattaagggaaagattgtgagcaaacagaaactcgaattgaaaacgactgaggccggacccagactcatgtctggtaagcaagccgccgctatcattaaggccgtcgattcgaagtacaccgcaatccctatcgttggacaggtttttcaatctcattgtaaagggtgtcccagcctttcagaactctggcgatcaacccgtaagtacttgcagccggataacctgtcaaaggcggaggctgtgcgcaacttccttgctttcatccaacacctcagaaccgcaaaaaaggaagagattctgcagattttgaagatggaaaacaaggaggtgctgccacaactcgtggatgctgtcacttcggcacaaacctcggactctctcgaggcaatcctggacttcctggacttcaaatcggacagttctatcattcttcaagaacgttttctctatgcttgtggctttgcctcgcatcctaacgaggagctcctgcgggcacttattagtaagtttaagggaagcattggctcctccgatatcagggaaactgtcatgatcataactggtaccctggtgagaaagctgtgccagaatgagggatgtaagctcaaggcagtggtcgaagcaaagaaactgatcctgggaggattggaaaaagccgagaagaaagaggacaccaggatgtacctgctggcactgaagaacgcactgctgccagagggtattccttcgttgctgaagtacgcggaagcgggagaaggacctattagccatctcgccaccaccgcgcttcaaagatacgatctgccattcattactgacgaagttaagaaaacccttaatagaatctaccatcagaaccgtaaggtgcacgagaaaacggtcaggaccgcagccgcagctataatcctgaacaacaacccaagttacatggacgtcaagaacatattgctgtcaattggggaactgccgcaagagatgaacaaatacatgctggcaatagtgcaagatatacttagattcgaaatgcctgcttcaaagatcgtgcgtcgtgtgttgaaggaaatggtcgcacacaactacgacagattctcgaggtcgggctcctctagtgcgtatactgggtacatcgaacgctcccctcggagcgcatccacttactctcttgatatcctgtactcgggcagcggaattctccgccggtccaaccttaacatctttcaatacatcggcaaggctggtctgcacggttcgcaagtcgtcatcgaagcgcagggtcttgaagcacttatcgcagccacccccgatgaaggcgaagaaaatcttgattcatacgcaggaatgtccgcaatactgttcgacgtgcagctccgccctgtcacttttttcaatggctattccgatcttatgtctaagatgcttagcgcatccggcgatcctatatccgtggtcaagggtcttatccttctcatcgatcattcccaagaacttcaactgcagtccgggctgaaggcaaacatcgaagtgcagggcggacttgcgatagatatttcgggggctatggagttttccctttggtaccgggagtccaagacccgagtgaagaatagggtcaccgtcgtgataactactgatattactgtcgactcgtcgtttgtgaaggccggacttgaaacttcaaccgagactgaagccggactcgaattcatctcgaccgtgcaattctcgcaatatccttttctcgtctgtatgcaaatggacaaggacgaggcaccctttcggcaatttgaaaagaaatacgaacggctttcgaccgggcggggttatgtgtcacagaagcgcaaggagtcagtcctcgcagggtgtgagttcccactccaccaagaaaattcagagatgtgcaaagtggtatttgcgcctcaacccgactctacttcttcgggatggttt

SEQ ID NO: 5502 - DNA, 2682 bp, Artificial Sequence
  derived and/or modified sequence
atgatcctgctagcagttttatttctgtgcttcatctcatcttacagcgccagcgttaagggtcacaccactggtctgtccctgaataatgacaggctttataagctgacttacagcacggaggtcctgcttgacaggggtaaagggaaactgcaggattctgtgggctatcggatctcttctaacgtggatgtagccctgttgtggcggaatcctgatggcgacgacgaccagctgattcagattacaatgaaagatgttaatgtggagaacgtcaatcagcaaaggggcgagaagagcatttttaagggcaaaagcccaagcaaaatcatgggcaaagaaaacttggaagccctgcagcgccctaccctgctgcacctgattcacggtaaagtgaaggagttctacagctaccagaacgaagccgtcgcgatcgaaaacatcaaacgaggtctcgcatctctttttcaaacccaactgtccagcggtacgaccaacgaggtcgatatttcgggtaattgtaaagtcacctaccaagcacaccaagataaggtgattaagatcaaggcgctggatagctgtaaaatcgcgagaagcggttttacgacaccgaaccaggtcctgggcgtgagctccaaagcgacctcagttaccacgtataaaatcgaagactcatttgtcattgccgttttagcagaagagacgcacaactttggtctgaactttctccagacaatcaagggcaagattgtttcaaaacagaaactggagctgaagaccactgaggctggtcctcgtctgatgtccggcaaacaggcagcagccataataaaggcagtggatagcaaatacaccgcaattcccatcgtgggtcaggtgtttcaaagccattgtaagggctgtccaagcctgagcgaattgtggaggagcactagaaaataccttcaacctgacaacctgagcaaggctgaggcggtgaggaacttcctggccttcattcagcatttgcgtacagccaagaaggaagagatcttgcagattctgaaaatggagaataaagaagtcctgccccagctggtggatgcagtaaccagcgcacaaaccagcgacagcctggaggctatcctggacttccttgatttcaagtcagatagcagcataattctgcaggagcgcttcctgtacgcctgcggctttgcctcccatccaaacgaagaactgctgcgtgccctgatatctaagtttaagggaagtatcggcagcagtgatattcgcgagactgttatgatcattacgggaacgctggttcgcaagctttgtcagaatgagggctgtaaactcaaggcggtcgttgaagctaagaaattaatcctgggcgggttggagaaagcagaaaagaaggaggatacccgcatgtacttgctggctctgaagaacgcactgctcccggaaggaatacccagcttgctgaagtatgccgaggcgggagagggcccaatcagtcatctggccaccaccgctttgcaacgctatgacctgccgttcatcactgacgaggtgaagaaaacactgaacagaatataccatcaaaaccgaaaagtgcacgagaaaactgttcgcacagccgcggcagcaattatcctgaataacaacccgtcctacatggacgtgaaaaatatcctgctgagcataggcgagcttccacaggagatgaacaaatacatgttggctatcgtccaagacattctgcgctttgagatgccagcctctaaaatcgtgcgcagggtgctgaaggaaatggtggcacataactatgaccgcttttcccggagcggctctagcagcgcgtatacaggttatattgaacgctcacctagatccgctagcacctattctctggacatcctgtactccgggagtggaatcttacgccgtagcaacctcaacattttccagtacatcggcaaagcggggctgcatggctcccaggttgttattgaggcgcaaggcctcgaagcgctgatcgcggcgacccctgatgaaggtgaggaaaatctcgactcctatgcggggatgagcgcaatcctgtttgacgtgcaacttcgtcccgttacttttttcaacggctacagcgatttgatgagcaaaatgctctctgcgtctggcgatccgattagcgtggttaagggattgatcctactgatcgaccattcacaggaactgcaactacagtctggcctgaaagcgaacattgaggttcagggtgggctggcgattgacattagcggcgctatggagttttcgctctggtatcgcgagtccaagacaagggtgaaaaaccgcgtcaccgttgttattactacagatatcaccgtggactcttcgttcgttaaagccggcctggaaacctctactgagactgaggcagggctggagtttatttccactgtgcagttttctcaatacccattcctcgtttgcatgcagatggataaggatgaggcgccatttcgtcaattcgaaaagaaatacgagcgtctgagcacaggtcggggctacgtgagtcaaaagagaaaggagagcgttctggcgggatgcgagttccctcttcatcaagaaaattcagaaatgtgtaaagtcgtcttcgccccacaaccagactctaccagttcgggctggttt

SEQ ID NO: 5503 - DNA, 2682 bp, Artificial Sequence
  derived and/or modified sequence
atgattttgctcgcggttttgtttctttgctttattagttcgtatagtgcctctgttaagggtcacactacaggtctctcgctcaataatgatcgactatacaaacttacatattctactgaagtgttgttggacagaggaaagggaaaactccaagactcggttggttatagaatcagttccaatgttgatgtagctcttctatggaggaatcccgatggtgacgatgaccagcttattcaaattacaatgaaagacgtgaacgttgaaaatgtcaaccaacaacgtggtgaaaaatcgatattcaaagggaaatcaccatcaaagattatgggaaaagagaatcttgaagctcttcaaagaccaactttgctgcacctcatacatggaaaggtcaaagagttttactcctaccaaaacgaagcagttgccattgagaacattaaacggggattagcgtccctattccaaactcagttatcttctggcactacaaatgaagttgatatatcaggaaattgtaaagtaacataccaggcccaccaagacaaggttatcaagataaaggccttggattcgtgtaaaatcgcacgatcgggatttactactcctaatcaggtccttggtgtttcatcaaaggccacttccgtcacaacatataagattgaagatagcttcgtcatcgcggtactagccgaagagacacacaacttcggacttaatttcctccaaacaataaagggcaaaattgtcagtaaacaaaaattggaactcaaaaccacggaagctggtccccgcttgatgtctggaaaacaagcagcggctattatcaaagcagtggactccaagtatacagcaattcctatcgtcggtcaagtatttcagagtcattgtaaaggatgcccaagtttatctgaactctggcgtagcacgagaaaatacctacagccagataatctttctaaagcagaagctgttcgaaattttcttgcttttatccaacatttacgaactgctaaaaaagaagaaattctgcaaatccttaaaatggaaaataaagaagttctcccacagctcgtagatgctgttactagcgcacaaacatccgattcactggaagctattttggattttctcgatttcaagtccgactcgagtattattctgcaggaaaggtttctatatgcttgcggttttgcgtctcacccaaatgaggaactcttacgtgcactaatttctaagtttaaaggatccatcggttcttctgatatcagagaaacagtcatgattataaccggcacgttggtgagaaaattgtgtcaaaacgagggatgtaaacttaaagcagtcgtcgaggctaagaagctaattctcggaggacttgaaaaagcagaaaagaaggaggacacacgaatgtacctcttagcattgaaaaatgctcttcttcctgaaggaatcccttctcttctgaaatatgctgaggcaggagagggcccgatcagtcatttggctaccacagcactacaacgttatgacctgccatttattaccgatgaagtaaagaagactttgaacagaatctatcatcagaaccgtaaggtgcacgaaaagacagtgagaactgcagccgccgctatcatcttgaataataatccatcatatatggatgtgaaaaatatactcttaagtataggtgaattacctcaggagatgaataagtatatgttggcaatagtgcaagatattcttcgattcgaaatgcctgcatctaagatcgtgcgaagggtccttaaggaaatggttgctcataattacgatcgtttctctagatcaggaagctctagtgcatacacgggctacatagagagatcacctcgttctgcaagtacatactcattggatatcctttactcgggaagtggaattttaagaagatccaacctcaatatttttcaatacatcggtaaagctggattgcatggatcccaggttgtgattgaggcgcaaggattggaagcacttatcgccgccacgccggatgaaggcgaggagaacctcgactcttatgctggaatgagcgccatcttgttcgatgtgcaactacgaccagttactttcttcaatggttatagtgatttaatgtcgaagatgcttagcgcctcaggagatccaatctcagttgttaaggggttaatacttttaattgatcattcacaggaactccaattgcaatccggacttaaagcaaatattgaagttcaaggaggactagcaatagatatctcgggggccatggaattcagcttgtggtacagagagtctaagactagagtcaaaaacagagttaccgtcgtcatcactaccgacatcacagtggatagttcatttgtgaaggcgggacttgagacgagcactgaaacagaggctggacttgaatttatcagtactgttcagtttagccagtacccttttttggtatgcatgcaaatggacaaggatgaagcgcccttccggcaatttgaaaagaagtatgagaggctttccacagggagaggatacgtatcccaaaagagaaaagaatcggttctggcgggatgtgaattccctctgcatcaagagaatagtgaaatgtgcaaagtggtttttgctccacagcctgattccacgagctctggatggttt

SEQ ID NO: 5504 - DNA, 2682 bp, Artificial Sequence
  derived and/or modified sequence
atgatcctacttgcagtgctgttcctgtgcttcatttcctcttatagtgccagcgtgaaagggcacacaactggtctctcgctgaacaacgaccgattgtacaagctgacatacagcactgaagtgctgctcgatcgtggaaaaggcaagctccaagactctgtgggatacagaatctcctccaatgtggacgtcgctctgctctggagaaatccagacggcgatgacgaccagctgatccagatcacaatgaaagacgtaaacgtggagaatgttaatcagcagcgaggagaaaaatctatattcaagggtaagagcccctcaaagataatggggaaggagaacctagaagccttacagaggccaacgttactccacctcatacacggtaaagtgaaggaattctactcctaccagaatgaagccgtagccattgaaaatattaagcggggcttagcttccctgttccaaacccagctgtcatcaggtaccacgaatgaagtggacatctctggaaattgcaaagtgacttaccaagcacatcaagacaaggtcatcaagataaaggccttagatagttgtaagattgcgcgatccggctttacaacgcctaatcaggtgctgggagtctcttctaaagcaacaagcgtcaccacttataagatcgaggattcctttgttatcgcagtccttgcagaagaaacacacaatttcgggctaaatttcctgcagacgatcaagggtaaaattgtaagcaagcaaaaacttgagctgaaaaccactgaggctggaccaagactgatgagcggcaagcaggcagctgctattattaaagcagtggattcaaaatatacagcgatccccattgttggccaggtgtttcaatcccactgtaagggctgccctagtctgtctgagctttggagatctactaggaagtatttacagcctgacaatctgtctaaggccgaggctgtgaggaacttccttgccttcatacagcatttgcggacagctaagaaggaggagatcttgcagatccttaagatggaaaacaaggaggtgctgccgcagctggtagatgcagtgacctctgcacagacatccgacagcctggaagcgatcttggactttctggacttcaagtcagattcttccattatcctgcaggaacgattcctttatgcctgtggtttcgctagccaccccaatgaagaactcctgagagccctgattagtaagtttaagggaagcataggatctagcgacattagagaaacagtgatgattatcacagggaccttggtgcgaaaattgtgtcagaatgagggctgtaaactcaaggcagtggtagaagcgaaaaagttgatcctgggggggctcgaaaaggccgagaaaaaagaagacacccggatgtatctacttgcccttaaaaatgccctcctcccggagggcattcctagcctacttaagtatgcagaggccggcgaaggtccaatttctcacctggccacaacagctctgcagagatatgatcttccattcattaccgatgaagtcaaaaaaaccctgaatagaatatatcatcagaaccgtaaagtgcacgaaaaaacagtaagaaccgcagccgctgccattatcctgaacaataacccgagctacatggacgttaagaatattcttctatcgatcggagagttaccacaggaaatgaacaaatacatgctagccatcgtgcaggatatcctgaggttcgaaatgccagcctctaagatagtgaggagggtgctaaaagaaatggtggcccacaattacgatcgattcagtagatcagggtcctcctcagcctatacgggctacatcgaaagatctccgcgatccgcaagcacatactctttggacatcctgtatagtggatccgggatccttaggaggagcaaccttaacatctttcagtacatcggcaaagccgggctgcatggaagccaggtagtgattgaagctcagggcctggaagcgctgatcgctgccactcccgacgagggcgaggaaaacctggatagctacgccggaatgagtgcaatactgttcgacgtgcagttaagacccgtaaccttttttaacggctattccgatcttatgtcgaaaatgctgtctgccagcggggacccaatttcagtcgtgaaaggacttatcctcctgatcgaccactctcaggagctgcagttgcagagtggtcttaaggccaacattgaagtgcagggaggcttagctattgacatttccggggccatggaattcagcctctggtaccgggagtccaagactagggtaaagaacagggtgaccgtcgtcatcacgactgatataacagtggatagttccttcgtaaaagcaggcctggagacatctacggaaactgaggccggtttggagtttatctctactgtgcagttttcgcagtatccttttctggtctgtatgcagatggacaaggatgaggctccattccgacagtttgaaaagaaatacgaaagactcagtaccggaaggggatatgtcagccagaagcgcaaagagtctgtgttggctgggtgcgagttccccctgcaccaggaaaactcagagatgtgcaaggtggtttttgcccctcagccggattccactagtagtggatggttt

SEQ ID NO: 5505 - DNA, 2682 bp, Artificial Sequence
  derived and/or modified sequence
atgatcttgctcgccgttctattcttgtgctttatctcaagctactctgcgtccgtgaagggccacactaccgggctatctttgaacaacgatcggttgtataagttgacctacagcaccgaagttctcttggatcgtgggaagggtaaattgcaggatagtgtgggttataggatctcaagcaacgttgatgttgcattgctgtggcggaaccctgatggcgatgatgaccaattgatccaaatcaccatgaaggacgtaaacgttgagaatgttaaccaacagcgcggcgagaaaagcatcttcaagggaaagtccccctcgaaaatcatggggaaagaaaacttagaggccttgcagcgtcctacccttttgcatttgatacacggcaaggtcaaggagttttacagctatcaaaatgaggcagtggctattgagaatatcaagaggggtctggcgagcttattccaaacccagctttcatcgggaactacgaacgaagtggacatatccgggaactgtaaagtcacataccaggcccatcaagataaagtaatcaaaattaaagctctggacagctgtaaaatcgccagaagcggattcaccacccctaaccaggtgttaggagtcagttcgaaggcaacgagcgtgacgacatataagatcgaggacagcttcgttattgctgtcctcgcagaagaaacccataacttcggtctcaacttcttgcaaacgataaagggcaagatcgtttccaaacagaaactcgagctgaagacgacggaagcgggcccccgccttatgtcaggtaaacaggcggctgcgatcataaaagcggttgattcgaagtacaccgccatccccatcgttgggcaggtgttccaatcacattgtaagggctgtccctccctgtcggaactttggcgaagcaccagaaagtatttgcaacccgataatttgtcaaaggcagaggctgtacgaaatttcctggccttcattcagcacttgcgtactgctaagaaggaagagatcctccagatattgaagatggaaaacaaagaggttttgccgcaacttgttgatgctgtgacatcagcccagacatcggattcccttgaggctatactcgatttcctggacttcaagtctgactcttctattatcttgcaagagcgctttctttatgcctgcggcttcgcttcccatcctaacgaggaactgctcagggctcttatctccaagttcaagggcagcatcggaagtagcgacataagggagactgttatgatcattactggtactctggtccgcaaactctgtcagaacgagggctgcaagcttaaagcggtagtggaagcgaagaaacttatcctgggaggtttggaaaaagctgaaaaaaaggaggatacgcgtatgtatctccttgcgctcaagaacgcgctccttcccgagggtattccctcgctgttgaagtatgctgaggcgggtgagggccccatttcacatttggctacaacagccctccaacggtatgatcttcccttcattacagacgaagtcaaaaaaacgctcaatcgaatttaccatcaaaacagaaaagtccatgaaaagacggtgcgcactgctgccgcagcaatcatcttgaacaacaatccaagctatatggatgtcaaaaacattcttctctcgatcggagagctgcctcaggagatgaataaatatatgttggcaatcgtgcaggatattctgcgctttgagatgcccgcttccaagattgtgagacgggttcttaaggaaatggtcgcgcataactatgaccggttctctagatctggttccagcagtgcgtacacaggctacattgaacggagccctagaagtgcttcgacctactcactggacatcctgtactcgggtagtggaattctgcgccgcagcaacctcaacatttttcagtacattgggaaggccggccttcacgggtctcaggtcgttatcgaagcacaggggctcgaagcactcatcgcggccactcctgacgaaggcgaagagaatctagattcatatgcggggatgtctgccattcttttcgatgttcagctccgccctgtcacctttttcaacgggtacagcgatctgatgtctaaaatgttgtcagccagcggtgaccccatcagtgttgtaaaaggactcatccttttgatcgatcatagccaggagcttcaactgcaatcaggacttaaggccaacattgaggtgcagggaggcttggcaatagacatttccggcgccatggagttctctctgtggtatcgagagtcaaagacgcgtgtcaaaaaccgagtcacagttgtaatcactaccgatattacggtggatagcagcttcgttaaggcgggtctcgagacatccaccgaaacagaagcaggcttggaattcatctcgacagtgcagtttagccagtatccttttctggtctgtatgcagatggataaagatgaggccccattccgccagttcgagaagaagtatgaacgattgtctacaggcaggggctatgtcagccaaaagaggaaggagtctgtgctcgctggttgtgaattccctttgcaccaggagaactcggagatgtgcaaggttgtcttcgccccccagcctgacagtacaagctcggggtggttc

SEQ ID NO: 5506 - DNA, 2682 bp, Artificial Sequence
  derived and/or modified sequence
atgattctccttgcagtgctgttcctctgcttcataagttcatactcggcaagcgtgaagggacatactactggactttcactcaataacgatcggctttacaagttgacttactccacggaggtgcttctggatagaggtaaaggcaaactgcaggactccgttggatacagaatctccagcaatgtcgatgttgcccttctgtggcgaaaccctgatggtgacgacgaccagctcatacagatcactatgaaggatgtcaacgtggaaaacgtgaaccaacagagaggggaaaagagtattttcaagggaaaatcccccagcaaaatcatgggaaaggaaaacctggaagcgctgcagcgtcccactcttctccatctgattcatggaaaggttaaggagttctattcttaccagaacgaagcagtggcgatcgaaaacataaaacgcgggctggcttcgctgtttcagacccagttgtcctccggtaccactaatgaggtggatatttcaggcaactgcaaggtcacctaccaggctcatcaggataaggtgatcaagattaaagccctcgattcttgcaaaatcgcaaggtccggcttcaccaccccaaaccaggtcctgggtgtgtcatcgaaagccacttcggtcaccacctacaagattgaggacagcttcgttatagccgttctggcagaagagactcataacttcggacttaacttcctccaaaccatcaaaggtaaaatcgtctctaagcaaaagctcgaactgaaaacgactgaagcaggaccaagacttatgtcgggcaagcaggccgcagcgattatcaaggcggtggattcgaagtacactgcaatccccatagtgggtcaggtgtttcaatcgcactgtaagggatgcccttccctgtccgagctgtggagatccacccggaagtacctccaaccggacaatctgtccaaagcagaagcagtgcgcaattttctggcttttatccaacatcttcgaactgcgaaaaaagaggaaatccttcaaatccttaagatggagaacaaggaagtgcttcctcagctggtggacgcagtcacgtcagcacagacttcagatagccttgaagccattctggatttcttggatttcaaatctgattcctccatcatattgcaagaaagatttctgtacgcctgtggttttgcctcccatcccaatgaggaactgctgcgtgcactgatatcgaaattcaagggatcgattggttcgtcagacatacgtgaaactgtgatgattatcaccggcactcttgtccgcaagctctgtcaaaatgaaggttgcaagttgaaggcggtggtcgaagcgaagaagctcattcttggtggactcgaaaaggccgaaaagaaggaggacaccaggatgtaccttcttgcccttaagaatgcccttctcccggaaggcataccgtcccttctcaagtacgccgaggcaggggagggtcccatttcccatctcgccaccaccgcactccaaaggtatgatctccccttcatcacggatgaggtcaagaaaacccttaaccgcatctaccatcaaaacagaaaagtgcatgagaaaacggtacgaaccgccgcagccgcaattatccttaacaacaacccttcatacatggacgtgaagaatatccttctgtcaattggagaactgcctcaggagatgaataagtatatgttggctattgtgcaggatatcttgcgcttcgaaatgccagcctccaagatagtcagacgtgtgcttaaagaaatggtggcccacaactacgaccgctttagccgatctggaagctcaagcgcatacaccgggtacatcgaaagatcgccccgaagcgcatcaacttattcgctggatatcctgtactcaggatccggaatcctccgtcggagcaacctgaacatttttcagtacattggaaaggcaggactgcacggatcacaagtggttatcgaggcacaggggcttgaagcactcattgcagcaactccagatgagggtgaagaaaatcttgattcatacgccgggatgtcagcgattctgttcgacgtgcaacttcgcccagtgaccttctttaacggatactccgatcttatgtcgaagatgctgtccgcatccggagatccaatctccgtggtgaagggactgattctcctcattgaccattcgcaagaactgcagcttcaatcaggactgaaggcgaatattgaggttcaaggaggcctcgccattgatatcagcggcgcaatggagttttcactgtggtaccgcgagtccaagactcgggtgaagaatcgcgtgaccgttgtgattactactgatattaccgtcgactcgtcctttgtgaaggcgggtcttgaaaccagcaccgaaactgaagcaggtcttgaattcattagcactgtgcaattttcgcagtacccattcctggtttgtatgcaaatggacaaagatgaagcaccattccgtcaattcgagaagaagtacgaacgattgtcgaccggaaggggttacgtctcgcaaaagcgtaaagagtcggtgctggccggttgtgagttccctctgcatcaagaaaatagcgagatgtgcaaggtggtgtttgcccctcaacctgattcgacttcctcggggtggttt

SEQ ID NO: 5507 - DNA, 2682 bp, Artificial Sequence
  derived and/or modified sequence
atgatcttgctcgccgtgctcttcctgtgcttcatctccagctacagtgcctctgttaaaggtcacaccacaggactgtccctgaataacgatcggttgtacaagctgacctattctacagaggtgttgcttgaccgggggaaggggaagctccaggatagcgtggggtatcgaatctccagcaacgtcgacgtggccctgctgtggcgaaacccagacggagacgatgaccaactgatccagatcaccatgaaggacgttaacgttgaaaatgttaaccagcagaggggtgagaagtctattttcaagggtaagtcaccgtccaagatcatgggcaaggagaacttggaagcactgcagcggccaacactgctgcatctgatccacggaaaagttaaggaattctacagctaccaaaacgaagctgtggccattgagaatatcaagcggggactggccagtctgtttcagacccagttgagctctggtaccaccaatgaagtggatatctctggcaattgcaaggtgacctaccaggcccatcaggataaggtgatcaagatcaaggccctggactcctgcaaaattgctagatctggtttcaccacgccgaaccaggtacttggcgtgagcagtaaggccacttctgtgaccacctataagatcgaggatagtttcgtgattgcggtccttgccgaggaaacccacaattttggactcaattttctgcaaaccataaagggaaaaatcgtgtccaagcagaaactggaacttaagactacagaggccgggccccggctgatgagtggaaaacaggctgccgccattatcaaggcagtagactcaaagtacaccgccatccccatcgtgggtcaggtctttcagagtcattgcaaaggttgcccttcactcagcgagctctggagaagcacaaggaaatacttgcaaccagacaatctgagcaaggccgaggccgtgagaaactttctggccttcattcagcacctgagaacagctaagaaggaggaaatcctgcaaattctgaagatggagaataaggaagtcctgccccagctggttgatgccgtgacctctgcgcagaccagcgactccctcgaggccatcctcgactttctggattttaagtcagattctagcatcatcctccaggaaagattcctctatgcctgtgggttcgcgtctcatcctaatgaagagctgctgcgggcgcttatcagcaaattcaaaggcagtatcggcagctccgacatcagggagactgtgatgatcattacaggtacactggtaagaaaactgtgtcagaacgaaggttgcaagcttaaagccgtcgtggaggcaaagaagctgatcctgggggggcttgagaaagctgagaaaaaagaggatactcgcatgtacttgctggcattgaagaatgcccttctccccgaaggaattccatcactgctgaagtatgcggaggcgggggaaggtccaattagccatctcgccactaccgcgctgcaacggtatgatcttcccttcataactgacgaggtaaagaaaacactgaaccggatttaccaccagaaccggaaggtccacgagaagacagtcagaaccgcagccgcagccatcatacttaacaacaatccgagttatatggatgtcaaaaatatcttgctctctattggtgaactgccgcaggagatgaacaagtatatgttggcgatcgtgcaggacatactgcggttcgagatgcccgctagcaagatagtacgacgcgtgctgaaagagatggttgctcataattatgaccggttttctaggtctgggtcatctagcgcctacacagggtatattgaaagatccccgcgatctgcgagcacttatagtctggacattctgtactcagggtccggaatcctgagacgatctaacctgaacatctttcaatatataggtaaggcagggctgcacgggagtcaagtcgtcatcgaagcgcaagggctggaggcattgatcgctgcaacgcccgacgagggggaagagaacttggattcatacgccggaatgtccgccatcctgtttgatgtgcagctccgacctgttacttttttcaatggctacagcgacctgatgtcaaagatgctcagcgcctccggtgaccccattagcgtggtgaagggactcattctgcttattgatcattcccaagaactgcagctccagtctgggttgaaagctaacatagaggttcagggcggactggcgatagacatcagcggagccatggaattttccctgtggtacagagagtccaaaacacgcgtcaaaaatcgggtgactgtcgtgattaccaccgatatcaccgttgattcctcattcgtgaaagcaggcctggagacctccactgagacggaagcgggactcgaatttataagtacggtccagttcagccagtatccatttctggtgtgtatgcaaatggataaggacgaggcaccctttaggcagttcgagaagaagtacgaacggctttccacagggcgcgggtacgtgtcccagaagcgcaaggagagtgttctcgctgggtgcgagtttccattgcatcaagaaaactcagagatgtgtaaagttgtattcgccccacagcccgactccacctcctccggatggttt

SEQ ID NO: 5508 - DNA, 2682 bp, Artificial Sequence
  derived and/or modified sequence
atgatcctgctcgccgtgctctttctctgtttcatctcgtcctactccgcctcggtgaagggccacaccaccggactctccctcaacaacgaccgcctgtacaaactcacttattcgaccgaggtgttgcttgatcgtggtaaggggaaacttcaggactcggtggggtatcggatctcgtccaatgtggacgttgcgctgctgtggcgcaacccggatggagatgacgaccagctcatccagatcactatgaaggatgtcaatgtggaaaacgtgaaccagcaacgaggcgagaagtcgattttcaaaggaaagtccccgagcaaaatcatgggaaaggagaatctcgaagcactgcagcggccaaccttgctgcatctgattcatgggaaagtgaaagagttctacagctaccaaaacgaggccgtggcgatcgagaatatcaagcggggactcgcctccctttttcagacccagctgtccagtggcaccaccaacgaggtcgacatctcaggcaattgcaaggtgacttatcaggcccatcaagataaagtgattaagattaaagccctggactcctgcaaaatcgccaggtcgggtttcactactccgaaccaggtgttgggagtgtcgagcaaggctacttcagtgaccacgtacaaaatcgaggactccttcgtcatcgcagtgctggccgaagaaacgcacaacttcggactgaacttcctgcagaccatcaagggaaagattgtgtccaagcaaaaactcgaactcaagactactgaagctggcccaagactgatgtcgggaaagcaggccgccgcaatcattaaggctgtggattccaagtacaccgcgattccgatcgtggggcaggttttccagagccactgtaaagggtgcccctcgctgtcggagctctggagatcgacccgcaagtacctgcagccggataacctctcgaaggctgaagccgtgagaaactttctggctttcatccaacacttgaggactgccaagaaggaggagatcctgcagattcttaagatggaaaacaaggaggtccttccacagctggtggacgctgtgacctccgcgcaaacttcggacagcctcgaggccatcctggacttcctcgatttcaagtccgattcgagcataatcctccaagagcgattcctttacgcctgcggcttcgcgtcccacccgaatgaggaattgctgagggcgctcatcagcaagttcaaaggatccatcggatcctcagacatcagggaaactgtcatgatcatcaccggcaccctggtgcgaaagctgtgccaaaacgaaggctgtaaacttaaagctgtggtcgaagcgaagaagctgatcctcggagggttggaaaaggccgaaaagaaagaggacacgcgcatgtacctgctggccttgaagaatgcgctgctccctgaaggaatcccttcgctgctcaagtacgcggaagcgggcgagggaccaatctcccatctggccaccaccgctctgcaaagatacgatctgccatttatcacggatgaggtcaaaaagaccctcaaccgcatctaccaccagaaccgcaaggtgcacgaaaaaaccgtgcgcaccgctgccgcagcgatcatcctcaataacaacccgtcatacatggatgtgaaaaacatcctcttgagcatcggagaactgccgcaagagatgaacaaatacatgcttgcaatcgttcaagatatactgcgatttgagatgccggcgtcaaagatcgtgcggagagtgttgaaagaaatggtcgcacataactatgataggttctcgcggtcaggatcgtcaagcgcgtacactggatacatcgaacggagcccccggtccgccagcacttattccctggatatcctgtactccggttcaggcattctccgacgctccaaccttaacatcttccagtacattggcaaggcgggactgcatggctcgcaggtcgtgattgaagcccaaggactcgaggccctgatcgcggctacgccggatgaaggtgaagaaaacttggattcctacgcgggtatgagcgcgatcctcttcgatgtccagctcaggccagtgaccttcttcaacggatacagcgacctgatgtcaaagatgctgagcgcctccggagatccaatcagcgtggtgaaagggctcatcctcctgatagaccactcacaagagctgcaacttcaatcggggctgaaagcgaatatcgaggtgcaaggaggcctggcgattgacatctcaggggccatggaattcagcctctggtacagggagagcaagactcgcgtaaagaaccgggtcactgtcgtgatcaccaccgacatcaccgtggattcatcgttcgtcaaggccggactggaaacttcaactgaaaccgaggctggcctggagtttatctcgacggttcaattttcgcaatacccgttcctggtttgcatgcagatggacaaggacgaggctccgttccgccaatttgaaaagaagtacgaacgcctgtcaaccggacggggatacgtgtcccagaaaagaaaggaatcggtgctggcgggatgcgaattcccgctccatcaggagaactccgaaatgtgcaaggtggtgttcgctccccagccggatagcacgagctcgggctggttc

SEQ ID NO: 5509 - DNA, 2682 bp, Artificial Sequence
  derived and/or modified sequence
atgatactcttagccgtgctcttcctgtgcttcatctcgagctacagcgcttcggtgaaaggtcataccacaggcctgagcctcaacaacgacagattgtacaagctgacatattcaacagaagtcctgcttgatagagggaaaggaaagcttcaagattcagtggggtatcgaatatcgagcaacgtggatgtcgcgctgctgtggcggaacccagacggcgacgatgatcaactcatccaaatcaccatgaaagatgtgaatgtcgagaacgtcaaccaacagcgaggagaaaaatctatattcaagggaaagtcccccagcaagataatgggcaaagagaaccttgaggccctgcagagacccactttgctgcaccttattcatggaaaagtgaaagagttctactcttaccagaacgaagcagtggctatcgagaacataaagcgcgggttggcttccctgttccaaacccaactctcctcaggcaccactaacgaggtggatatttctggcaactgtaaagtaacctatcaagcccatcaggacaaggtaatcaaaataaaagcactggactcgtgtaagattgcaaggtcgggctttaccacacccaaccaggtgctgggagttagcagcaaggccacctctgtgacaacatacaaaatcgaggatagttttgtgatcgcagtactggctgaagagactcacaactttggactgaatttcttgcaaacaatcaaaggaaagatagtcagcaagcagaagctcgaacttaaaaccaccgaagctggcccacgcttaatgtcaggaaagcaagccgctgctataatcaaagcagtcgatagcaagtacacagcaattccaatcgttggccaggtatttcaaagtcactgtaagggctgtccatcacttagtgagctttggagaagcacgcggaaatacttgcagcccgataacctgagcaaagctgaagctgtgcgcaacttcctcgcgtttattcagcacctgcggaccgccaaaaaggaagaaatccttcaaattctgaagatggaaaataaggaagttttgccacagctggtcgatgcagtgacctcagctcaaaccagcgactcgctggaggctatactagactttctggactttaaatcagactccagcatcatactgcaggaaagatttctttacgcatgcggattcgctagccaccccaacgaagagctgcttagggccttaatttcaaagttcaaaggatctattgggtcctcagatataagagagacagttatgattataactggcacactggtgaggaaactgtgtcagaatgaggggtgcaaacttaaagctgtggtagaagctaagaaacttatcctgggagggctggagaaagcagaaaagaaggaggacaccaggatgtatctgctggcattaaagaacgcgctcctgcccgaaggcatcccttcgctcctgaaatacgccgaagctggagaagggcccatctcccatttggccacaaccgcattgcagcgctacgatctgccatttattaccgacgaagtgaaaaaaacgttgaacagaatctaccatcagaaccgcaaagtgcacgagaaaactgtccggacggctgccgcagccataattctgaacaacaacccctcctacatggacgttaaaaacatcttgctctcgatcggagagctgccacaggagatgaacaagtacatgctggctattgtgcaagacatcctccggttcgaaatgcctgcaagcaaaattgtgcgccgggtactcaaggagatggttgcacacaactacgatcgatttagccgcagcggcagtagcagcgcctatacgggctacattgaaaggtctccgagatcagcatctacttatagcctggatatactgtactccggctcgggaatcctcaggaggagcaacctgaacatcttccaatacataggtaaggctggactgcatggcagtcaggtcgtgatcgaagctcaaggtctggaagctctcattgctgccactccagacgagggtgaagaaaacctggattcttatgcaggcatgagtgccatcctctttgacgtccaactgaggcccgtcacatttttcaatggttactctgatctgatgagtaaaatgctttccgcttcaggtgaccctatatcggtcgttaagggcctcatcctcctcatcgaccactcacaggaattgcagcttcaatccggactgaaggcaaatattgaagtgcaaggaggcctggcaatcgacatcagcggcgctatggagttttctctgtggtatcgggaatcaaagaccagggttaagaaccgggtgacggtggtaattaccaccgacatcacagtggatagcagctttgtaaaagctggattagaaacgagcactgagacagaagcaggacttgaattcatcagtacagtgcagttttctcaatatcccttcctggtgtgcatgcaaatggacaaggatgaagcgccattcaggcaattcgagaaaaagtacgagaggctcagcacaggacgcgggtacgtaagccagaagagaaaagaaagtgttctggctgggtgcgagtttccacttcatcaggagaactcagagatgtgtaaggttgtttttgccccccagcccgacagcacatcctccggctggttc

SEQ ID NO: 5510 - DNA, 2682 bp, Artificial Sequence
  derived and/or modified sequence
atgattcttctggcagttttgttcctgtgtttcatctcctcttactctgcttcagtgaagggtcataccaccggcttgagccttaataacgacagactctacaagctgacatattccaccgaggtgctcttggaccgcggaaaaggtaagttgcaggatagcgtaggctatagaatcagctcaaacgtagatgtggctctcctgtggaggaatcccgacggagatgacgatcaacttattcagatcaccatgaaggacgtcaacgtcgagaacgtgaatcaacaaagaggcgagaaatctatcttcaagggtaaatcacctagtaagattatgggtaaggaaaacttggaggccctgcagaggccgaccctgctgcatcttattcatggaaaggtgaaggagttctactcctaccaaaatgaggccgtagcaatcgagaatatcaagaggggtctggcctctctcttccagacccagctgtcaagtggaactactaatgaggtggacatcagcggaaactgcaaagttacctaccaggcccatcaagacaaggtcattaaaattaaggccttggactcctgcaaaatcgctagatcaggttttacaactcctaaccaggtgctgggcgtcagtagcaaagctacaagcgtgactacatacaaaatcgaggatagcttcgtgatagccgttctggccgaggagactcacaatttcggattgaacttccttcagaccattaagggcaagatcgtaagcaagcagaagctggagctgaagaccactgaagccggcccaaggctgatgtctggcaagcaggctgctgccattattaaggctgtcgactcaaaatataccgcgattccaattgtgggccaggttttccagagccattgcaagggatgcccgtccttgagcgagctctggaggagcactagaaagtaccttcaaccagacaacctgtctaaagctgaggcggttaggaactttctggctttcatccagcatctcaggactgccaagaaggaagagatcctgcagatcctcaagatggaaaacaaagaggtgttgcctcagctcgtcgacgcagttaccagcgcccagacttctgactctctcgaggctattctcgatttcctcgacttcaaatctgatagtagtataatcttgcaggaaaggttcttgtacgcctgcggattcgcttctcaccctaacgaagaactgctccgcgcactcatcagtaaattcaaaggttccattggctcaagtgacatcagagagacagtcatgatcattacgggaacgctggtgaggaaactctgccagaatgaaggttgcaagctgaaggcagtcgtggaggcgaagaagctgatcctgggtggtctggaaaaggcggaaaagaaggaggataccaggatgtatttgctggcgctgaagaacgcattgttgccagaaggtatcccaagcctgctcaagtacgcggaggccggagagggccctatttctcaccttgcgaccaccgcgctccagcgctatgatttgccattcatcaccgacgaggttaagaagacactgaatagaatctaccaccaaaacagaaaggtccacgaaaagactgtgcgcacagccgccgcagctattatcttgaataacaaccctagctacatggatgtgaaaaatatcctcctctccatcggtgaattgccccaggagatgaataaatacatgctggcaattgtgcaggatattcttaggttcgagatgcctgcttctaagatcgtacgcagggtccttaaggaaatggtggcccacaactacgatagattctcaagatcaggaagttcatccgcgtacaccggttacattgagcgctctccaagaagtgcaagcacatatagcctggacatactttacagcggctccggaattctgagaaggtctaaccttaacatatttcagtacattggcaaggctggcctgcacggcagccaggttgtgatcgaagcgcagggactggaagccttgatcgcagctactcccgacgagggagaagagaaccttgactcctacgccggtatgtccgccatcctgtttgacgttcagctcagacctgtcaccttctttaacggttattccgacctgatgagcaaaatgctgagcgcctcaggtgatccgatcagtgtggttaagggtctgattctgctgatcgatcactcacaggagctccagctgcaatccggtctcaaggcaaatatcgaagttcagggcggcttggccatagatatctcaggcgctatggagttttctctctggtaccgcgaatccaagactagggtgaagaacagggtcaccgtggtgatcaccacagacatcacggtggattcctcattcgtaaaagctggactggagacctcaacagagaccgaggccggcctggaattcatttccactgtgcagttcagccaatacccattcctggtatgtatgcagatggacaaggatgaggcacctttccgccaatttgagaagaaatacgagcgcctgtcaactggacgcggatatgtttcacagaaaagaaaggaaagtgtgctggcaggatgtgaattccccctccatcaggagaactccgagatgtgcaaggtggtgttcgcacctcaacctgacagcacctcctccggctggttt

SEQ ID NO: 5511 - DNA, 2682 bp, Artificial Sequence
  derived and/or modified sequence
atgatattgctggcagtgctttttctctgcttcatatcctcttattccgcatcagtgaagggccacactacggggttgtccttgaacaacgacaggctgtacaagcttacatattccactgaggtacttctggatagaggtaagggcaagctacaagacagtgtagggtatcgcatcagttcgaatgtggatgtagccctgctgtggcggaacccggatggggatgatgaccagttgatccagatcacaatgaaagatgttaacgttgaaaatgtgaatcagcagaggggtgaaaaatcaatttttaagggcaagtctccctccaagatcatgggcaaagagaacctggaggcgttgcaaaggcctactctcctgcacttaatccacggaaaggtcaaggagttctactcttatcagaacgaggcagtggcaattgagaacattaaaagaggcctagcatctttatttcagacccagctctcaagcggcactaccaatgaggtggatattagcgggaactgcaaggtgacttaccaggcacatcaggacaaggttataaaaattaaagcactggatagctgtaagatcgccaggtctggcttcaccacccccaatcaggttctcggcgtgtccagcaaagcgacttctgttactacatacaaaatcgaggacagcttcgtcatcgcggtactggctgaggaaacccataacttcggcctaaattttctccaaaccatcaaggggaagattgtgagcaaacagaagcttgagttgaagaccactgaggcgggaccccggctgatgagtgggaaacaggcagctgccataatcaaagctgtggactccaagtataccgccatccccatcgtcggtcaggtctttcaatctcactgcaaaggatgcccctccctgtcggaattgtggcgctccacaagaaaatacttgcagcccgataacctatctaaagcggaggccgtgaggaattttttagccttcattcagcacttgagaacggctaagaaagaggagatattgcagatcctaaagatggagaataaagaggtcctgcctcagttggtcgacgccgttactagcgcccagacctcagactccctcgaggcaatcctagatttcctcgatttcaagagcgactccagcatcatcttacaggagcgatttctgtacgcttgcggctttgcttctcaccccaatgaggagctgcttagagccttaatttcaaagtttaaaggctcaatcggctcatcagacattcgcgaaaccgtcatgatcattaccgggaccctggtccgtaagctttgtcagaacgaaggctgcaagcttaaggctgtggtggaagctaaaaaactgatcctgggggggctcgagaaagccgagaaaaaggaggatacacgcatgtacctgttggccctcaaaaacgccctgcttcctgaagggattccaagcctcctcaagtacgccgaagcaggcgagggccccatctcacatctggcgacaaccgctctgcaacgctacgacctaccctttatcactgacgaggtcaaaaaaactttgaatagaatctatcatcaaaatagaaaagtccacgaaaagactgtgcggaccgccgccgcagccattatactgaataacaatccttcttatatggacgtgaagaatatcctgctgtccataggtgagctgcctcaggagatgaataagtacatgctggcaattgtgcaagatattctgaggttcgagatgcctgcgagcaaaattgtgaggcgggtgctgaaagagatggtcgcgcacaattatgataggttctcacgttccgggagcagctccgcctacaccggatacatcgagaggagtccacgaagcgcctctacctattcgttggatatcctttatagtgggtcagggatcctaaggcggagtaacctgaatatcttccagtatatcggaaaggcaggtctccatggttcccaagttgtcatcgaggctcagggcctagaggcacttatcgcggcgaccccggatgagggcgaggaaaacctcgactcttatgctgggatgtccgcaattctgtttgatgtacaacttagaccagtcacatttttcaatggctactcagacctgatgtctaagatgctctctgcgagcggcgaccccattagtgtcgtgaaagggcttattttgttgatcgatcatagccaagagctgcagttgcagagtggcctcaaggcaaatatcgaggtgcagggcgggctggccatcgacattagcggcgcgatggagttcagcctctggtaccgggaatccaagaccagagtaaaaaatcgagttacagtggtcatcacgaccgacattactgtggacagtagttttgtgaaagccgggcttgagacctctacagaaaccgaggcgggcctcgagtttattagcaccgtgcagttcagccagtaccctttcctggtgtgcatgcagatggacaaggacgaggccccatttagacaattcgagaagaaatatgagagactgtccacaggtcgaggctatgtgtcacagaagagaaaggagtccgtcctcgctgggtgtgaatttccccttcatcaggagaactccgaaatgtgcaaagtggtttttgcaccacagccggattctacttcctctggttggttt

SEQ ID NO: 5512 - DNA, 2682 bp, Artificial Sequence
  derived and/or modified sequence
atgatcttgctcgcagtgctctttctgtgttttatttcatcctattcagcatctgttaaagggcataccaccgggttaagcctcaacaacgacaggctttataaactgacttattccactgaagtgcttctggatcgcggcaaaggtaaactgcaggattccgttggctaccgcataagctcaaacgtcgacgttgcactcctgtggcgcaatcccgacggggacgatgatcagctgattcagattaccatgaaagacgtcaatgtggagaacgtgaatcaacagcggggcgaaaagagtatcttcaaaggtaagtccccatcaaaaatcatggggaaggagaatcttgaggctctacagcggccaacactccttcacctcattcacgggaaggtaaaggagttttattcctaccagaacgaggcggtggctatagagaacattaaacgaggcctagcttccctgtttcagacacagctgtccagcggaactaccaacgaagttgacatctccggcaattgcaaggtaacctatcaagctcaccaagataaggttattaaaatcaaggctttggatagctgcaaaatagctcgtagtggctttacgacgcccaaccaggtgctgggtgtgtcctcaaaggcaacatctgttactacatataaaattgaagactcatttgtaattgccgtactagctgaagagacacataacttcggattaaattttctccaaactataaagggaaagatcgtgtccaaacagaagctggagctgaaaaccaccgaggctggtcccagacttatgtctggaaaacaggcggctgccatcatcaaagccgtcgactcaaaatatactgcaattccaatcgttggccaggtatttcagtctcactgcaaaggatgcccctcactgtcggagctgtggcgcagcactcgcaaatatttgcagccggataacttgagtaaagcagaggccgtgcgtaatttcttggctttcatccaacacctgaggaccgctaaaaaggaggagatcctccagatcctgaaaatggagaacaaggaagtgcttccccagttagtcgacgcggtgacttctgctcagacgtcggacagtttggaggccatcctggactttctggatttcaaatccgattccagcatcattctgcaggaacgttttttgtatgcctgcgggtttgcctcgcacccgaacgaggaacttttacgggcccttattagcaagtttaaaggaagtatcgggagctccgatattcgcgagactgtgatgattatcacaggtacactggtacgcaagctgtgtcagaatgaaggatgcaagcttaaggccgtagtggaggcaaaaaagctgattctgggaggactggagaaggccgaaaaaaaagaagacacacgcatgtacttactggctcttaagaacgctctcttacccgaaggtatcccctcgctcctcaagtatgccgaggcaggcgagggccctattagccatctggcaacaactgccttacagcgctatgacctgccatttattactgatgaagtgaaaaagactctgaacaggatttatcaccagaatcgcaaagtgcacgagaagactgttcgcacagcagccgccgcgattattctgaacaacaacccgtcctacatggatgtgaaaaatatactgctatccatcggcgaactgccacaggagatgaacaagtatatgctggctatcgtgcaagacatcctccggttcgaaatgcccgccagtaaaatcgtgcggagggttctgaaggaaatggtggcgcataattacgaccgcttcagccgcagcggtagcagtagtgcctacactggatacatcgagaggtcaccccggtccgcaagtacttacagcctggacatactgtattcgggctcgggtattctgcggagaagcaaccttaacatttttcagtatataggcaaagccggtctgcacgggagccaggtggtgattgaagcacagggtctcgaagcgttaattgcggcaactccggatgagggagaggaaaacctagattcttacgcggggatgtccgccattctcttcgatgtgcagctcaggccagtgactttcttcaatggctactctgatttgatgtcgaaaatgcttagcgcaagcggcgatcccatctccgtggtgaaggggctgatccttctcattgatcattcacaggagctgcagctccagtcaggcctaaaggcgaatattgaagtccaggggggccttgcgattgacatttcaggggccatggaattctctctctggtatcgggaatccaagacacgcgtaaaaaacagggtgacagtcgtgattacaaccgacatcaccgtggatagcagctttgttaaggcgggcctggagacgtcgacggaaaccgaggccggccttgaattcatttcaactgtacagttttcccagtacccttttctggtttgtatgcagatggacaaggacgaggctccatttagacaatttgaaaagaagtacgagaggctctctacaggacgcggctatgtgagccagaaacgcaaagagtccgtactggctggatgcgaattccccttgcaccaggaaaacagcgagatgtgcaaggttgtattcgccccgcagcccgattccacgtcttcagggtggttt

SEQ ID NO: 5513 - DNA, 2682 bp, Artificial Sequence
  derived and/or modified sequence
atgatcctcctcgcggtgttgttcctctgtttcatcagctcttattcggcatctgtcaagggacacactaccggactctcattgaacaacgaccggctgtacaaactgacttactccacggaagtgctgctggacagaggaaaggggaagctgcaagactccgtgggctaccggatttcctccaatgtcgacgtggcgcttctgtggagaaatcccgacggggacgacgaccaacttattcagatcactatgaaggatgtcaacgtggaaaacgtgaaccaacagcgcggcgaaaagtccatcttcaagggtaagtcgccgagcaagatcatgggaaaggagaacctcgaagcgctgcaacggccgactttgctgcatctcatccatgggaaggtgaaggaattctactcgtaccagaacgaggcggtggccatagagaacatcaagagagggctggcgagcctgttccagacccagctgagctccggtactacgaacgaggtggacatctcaggcaactgcaaagtgacttaccaggctcatcaagacaaagtcatcaagatcaaggccctggattcttgcaagatcgctaggagcggatttactaccccgaatcaagtgctcggcgtgagctcaaaagctacctccgtgaccacctacaagatcgaggactcatttgttattgccgtactggccgaggagactcacaatttcggactgaactttttgcagactatcaaaggcaagatagtgtcgaaacaaaagctcgagctgaaaaccaccgaggcaggccccaggttgatgtcgggaaagcaagccgccgccatcatcaaagcagtggactccaaatacactgcgatcccgatcgtggggcaggtgtttcagtcccactgtaaaggctgcccgtcgctgtcagagctctggcgctcaactaggaagtacctccagccagacaacctcagtaaggccgaggccgtccggaatttccttgcgtttatacagcacctcagaacggcgaaaaaagaggaaatcttgcaaatcctcaaaatggaaaacaaagaagttctgccgcagctcgtggacgccgtgacgtcggctcagacctcggacagccttgaagcaatcctcgacttcctggatttcaagtcggactcctccatcatcctgcaggaaaggttcctgtacgcctgcggtttcgcatcgcacccaaatgaggaacttctccgtgcgctgatcagcaagttcaagggctcgatcggctcgtccgacattagagaaactgtcatgatcatcaccggaaccttggtccgcaaactctgccagaacgaaggctgtaagctgaaggcagtcgtcgaggctaagaagctgattctcggaggcctggagaaggcagagaagaaggaagatactcgcatgtatctgttggcgctgaagaatgccctgcttccagaaggaatcccctcattgctgaaatatgcggaagctggggaaggtccaatctcccacctggccaccaccgcccttcagcggtacgatctcccgtttatcaccgatgaggtgaagaaaacccttaatcggatttaccatcagaatcgcaaggttcacgaaaaaaccgttcgcactgcggccgcggcaatcatcttgaacaataatccttcatacatggatgtgaagaacattctcctttccatcggcgagctgccacaggagatgaacaagtacatgttggcaatcgtgcaagacattctcagattcgaaatgccggcatccaagatcgtgcgcagagtgctgaaggagatggtggctcacaattatgatcggttctcacggtccggaagctcttccgcctacaccggatacatcgaacggtcgccaagaagcgcttcaacctactccttggatattctgtactcgggatccggaatccttcggagatccaatttgaacatcttccagtacataggaaaggcaggactgcatgggtcccaggtcgttattgaggctcagggattggaagccctcatcgccgccaccccagacgagggcgaggagaatctcgattcctatgccggaatgtccgctattctgttcgacgtgcaactccgccccgtgaccttctttaacggatatagcgatttgatgagcaaaatgctctccgcctctggagatcctatctcggtggtcaaggggcttatcctgctgatcgaccattcccaggagctccaactccagagcgggcttaaggcaaatatcgaagtccaaggcggcctggccattgatatctccggagctatggaattttcgctctggtaccgcgagtcaaagaccagggtcaaaaaccgggtcactgtggttatcactacggatatcacggttgactcctccttcgtcaaagctggactggagacgtctactgaaaccgaagccggcctggagttcatctcgaccgtccagttctcacagtacccattcttggtgtgcatgcaaatggataaagatgaagccccgttccggcaatttgaaaagaagtacgaacggctgagcaccggccgcggatacgtgtcacagaagcggaaggaatcggtgctcgcaggctgtgagttccctctccaccaggaaaattcagagatgtgcaaggtcgtgttcgcgccgcagccggactcgacctcttcaggttggttt

SEQ ID NO: 5514 - DNA, 2682 bp, Artificial Sequence
  derived and/or modified sequence
atgatcttgctggctgtcctgtttctttgctttatcagttcctattccgcttctgtgaaaggacacacaactggactaagtctcaataatgacagactgtataaactgacttatagtactgaagttcttctggatcggggaaagggaaagctccaggattcagtagggtataggatcagttccaatgtggatgtagctctactttggagaaatcctgatggagatgatgatcagttaattcagattacaatgaaagatgtaaacgtcgaaaacgtgaatcaacagcggggggaaaaatctatctttaaaggaaaaagtccatcaaaaataatgggaaaagaaaatttagaggcgctccagcggccaacactactccatctgatccatgggaaagtaaaagaattttattcttaccagaacgaggcagtggctatcgaaaatattaaaagaggacttgcatctctcttccagacacagctctcttctggaacaactaacgaagtcgacatatctggaaattgtaaagtgacatatcaggcccaccaggataaagtgataaaaataaaagcacttgatagttgtaaaatagcacggtccggatttactactccaaaccaggtgttgggagtttcctctaaggccacaagtgtcactacttacaaaatcgaagattcctttgtgatcgccgtgctggcggaagaaactcataacttcggactgaactttctccagacaatcaaagggaaaatcgttagtaaacagaaactcgagctcaaaactactgaagctggaccaagactgatgtccggaaaacaggcggctgctatcatcaaagctgtagatagtaaatatacagcgattcctatcgtagggcaggtgttccaatctcattgtaaagggtgtccatctctttccgagctttggcggtccactcgcaaatatctacagcctgataacctctccaaagccgaagctgtgagaaactttctcgcctttatccagcacttacggacagctaagaaagaagaaattttacagatcctgaaaatggaaaacaaagaagtgttaccacagctggtggatgccgtgacgtccgcacagacatcggatagtttagaagctatcctggactttttagactttaaaagtgattcctccattattctacaggaacggttcttatatgcctgtggattcgcttcacatccaaatgaagaacttctgagggcactcataagtaaatttaaagggtccatcgggtcttcagatataagggaaacagttatgataattactgggactctggtgcggaaattgtgccagaatgaggggtgtaagctgaaagcagtcgtggaagctaaaaaactaatcctggggggactggaaaaagccgaaaagaaagaagatactcggatgtatctacttgctctcaagaacgcactcctgccagagggaatcccatcactcttaaagtacgccgaagcaggggaaggaccaatctcacaccttgcaacaacagcccttcagagatatgatctgcctttcattacagacgaagttaaaaaaacactcaatcggatctatcatcagaacaggaaagtacatgaaaaaactgtgcggacagccgcagccgccataatattaaacaataacccttcttacatggatgtgaagaatatcctgttatcaataggggaactccctcaggaaatgaataaatatatgttggcgattgtgcaggatattcttcggttcgagatgccagcctctaaaattgtcaggcgggtgctcaaagaaatggtagcccacaattatgatagattctctcgatctgggtcctcgtccgcctatacaggatacatagaacgcagtcctcggtcagcttctacatattccctcgacatactctattccggatccgggatactgagacggtctaatctaaacatctttcaatatatagggaaagcagggcttcacgggtcacaagtcgtgatagaggcccaaggattggaagctctaatcgcagcaacacccgatgagggagaggaaaacctcgatagttacgccggaatgtctgctatacttttcgatgtccagctaagacccgtgacttttttcaacgggtattctgatctcatgagtaaaatgctaagtgcttcaggggatccaatatccgtggtaaaaggactgattctactgatcgaccattcccaagagctgcagctgcaatctggactcaaagcaaacatcgaagtgcagggagggctcgcaatcgatatcagtggggcaatggaattttcactctggtatcgcgagtccaaaactcgggtgaaaaacagagttacagtcgtaattactactgatatcacagtggattcttcgttcgtgaaagctgggctggaaacttcgacagaaacagaagccggactcgaattcatatccacagtacagttttcccagtaccctttcttagtgtgtatgcagatggataaagatgaagctcccttccgccagtttgagaaaaagtatgaaaggctttccacagggcgcgggtatgtgtcacagaaacgtaaagagtctgttctcgcagggtgcgagtttcccctgcaccaggaaaattcagaaatgtgtaaagtcgtctttgcgccacagcccgattctacatccagtgggtggttc

SEQ ID NO: 5515 - DNA, 2682 bp, Artificial Sequence
  derived and/or modified sequence
atgattctgctggcagtgttgttcttgtgctttattagttcttattccgcctctgtgaaaggccacaccaccgggctgagcctgaacaacgacagactctacaagctaacatattcaactgaggtcctgctggaccggggaaaggggaaactacaggacagcgtgggataccgaataagcagtaatgtagacgtcgcattactgtggcgcaatccagacggagacgacgaccagcttatccagattaccatgaaggatgtaaatgtcgaaaatgtgaatcagcagaggggcgaaaagtctatcttcaaagggaaatctcccagcaaaatcatgggtaaggaaaatctggaagcgctccagagacctacccttctgcacctgatccacggtaaggtcaaggagttttactcataccagaacgaagcggtcgccatcgagaatattaaacgaggtctggcttcactattccaaactcagttgagttccggaacaaccaacgaagtggacatcagtgggaactgcaaagtcacgtaccaggcccaccaagacaaggtgatcaagataaaagctctggacagttgcaaaattgccagaagcggatttaccactccaaatcaggtcttgggcgtaagtagcaaagcgacctccgtaaccacctataagatcgaagattcctttgttatcgccgtgttggctgaggagacccacaactttggactgaatttccttcagacaatcaagggcaaaattgtatccaagcagaagctggagttaaaaactaccgaggccggaccccgccttatgtccggcaaacaagccgctgccatcataaaggccgtggattccaaatacacagcaatccctattgttggtcaagtgttccaaagtcattgcaagggttgtccatccctgtccgagctatggcgcagtacaagaaagtatctgcagccagacaatctctcgaaagccgaagccgtgagaaatttcttggcgttcatccagcatcttagaacagccaagaaggaagaaattctccagatcttaaagatggaaaacaaagaggtgctgcctcagctggttgatgccgtgacttctgcacagacatctgacagcctggaggcaattttggatttcctggacttcaagtctgactcatcgatcatcttacaggagcgatttttatacgcctgcggattcgcttcccatcctaacgaagagctccttcgggcattaataagcaagtttaaggggagcattggttcatcagacatccgtgaaacggtgatgattatcaccgggacactcgtccgaaagctatgccaaaatgagggttgtaaattgaaagccgtggtggaagcaaaaaagctcattctgggcggcctcgagaaggcagagaagaaggaagatacccgaatgtacctgctggccctgaagaatgccctactgcctgaagggatcccatctctccttaagtacgccgaggccggggaaggaccaattagtcatttggctacaacagctctgcagagatatgatcttccatttataacagatgaagtgaaaaagaccctcaaccgaatctatcaccagaacaggaaggtgcacgagaagacagtgaggacagccgcagccgcgattattctgaataacaacccaagctatatggatgttaaaaatattctgctgtccatcggagagctccctcaggagatgaacaaatacatgctagcaatagttcaggatatcctgcgcttcgaaatgcctgcatctaaaatcgttaggagggtgcttaaggagatggtcgcccacaactacgatagattcagcagatctggctccagctccgcctataccggctacattgaaaggtcccctaggtcagcatccacatacagcttagacatcctctacagcgggtcgggcattttgaggagaagcaacctcaacattttccagtatataggaaaggccgggctacacggcagtcaggtcgtaattgaagcacagggattggaggccctgattgcggctactccggacgagggcgaagagaatttggactcttatgccggtatgtctgccatccttttcgatgtgcagctacgacctgtaaccttcttcaatggctattccgacctcatgagtaagatgttgagcgccagcggcgatcctatatcagtggtgaaaggcctaatactcctcattgatcactcccaggagttgcagctccagagcggcttaaaggccaatatcgaggtccaggggggcttggccatcgacatatccggggccatggaatttagcttgtggtatagggaatccaagacacgggttaaaaacagggtcactgtggtcatcacaacggacattaccgtggattcttctttcgtcaaagccgggctggagaccagcaccgaaaccgaggcggggttggaattcatttctactgtccagtttagtcagtatccatttctggtttgcatgcagatggacaaggacgaggcgcctttccgccagtttgagaagaaatatgaaagattgtccacagggaggggatatgtaagtcagaaacgaaaagagtcggtgctcgctggctgtgaattccctctccaccaggagaactccgagatgtgtaaagtggttttcgcaccacagcctgacagcacttcttctgggtggttc

SEQ ID NO: 5516 - DNA, 2682 bp, Artificial Sequence
  derived and/or modified sequence
atgattctacttgcagttctgttcctctgtttcattagctcatattctgcgagcgtgaaaggacacacaaccggtctgtccttgaacaatgatcgcctctataagctcacctacagcactgaggttctgctagataggggcaagggcaagctacaggactcagtggggtacaggatctccagcaatgtcgatgtcgcgcttttgtggaggaacccggatggagacgatgatcaactcattcagattaccatgaaggacgtcaatgtggagaatgtaaaccagcagagaggggaaaaaagcatctttaaagggaagagcccgagcaagatcatgggcaaggagaacctagaagcgttgcagaggcctaccctgctccaccttatacacggcaaggttaaggaattttacagttaccaaaatgaagcagttgcgatagaaaacatcaaacgaggcttggccagtttgttccagacgcagttatcgtcgggcacgacaaatgaggtggatatcagcggtaactgcaaagtcacttatcaagcccatcaggataaggtgattaagattaaggctcttgactcttgcaagatagctcggagtggctttaccacacctaaccaagtgctgggcgtgtcaagtaaggccacttctgtgactacctataaaattgaggacagttttgtcattgcggtgctggctgaagagactcacaattttgggttaaattttcttcaaactatcaaaggcaagatagtgtctaaacaaaaactggagctgaagaccacagaggcagggccgcgcctgatgtccggtaaacaggccgccgccatcatcaaggccgtggactctaaatacacagccattcctatcgtgggtcaggtttttcaatcacactgcaaaggctgccctagcttgagtgaactgtggagaagcacaagaaaatacctgcagccagacaacttgagcaaggcagaggcggtacgaaactttttggcattcattcagcacttgcgcactgccaaaaaagaggaaattctgcaaatcctgaagatggagaataaagaggttctgccccagctggtggatgctgtaacttcagcccagacatccgattcccttgaggccatactggatttcctagattttaaaagtgactcctccataattcttcaggagcgcttcctgtatgcttgtggcttcgccagtcaccccaacgaagaactgctacgcgctctgatctcaaagtttaagggctctatcggctcatcagacattagggaaaccgttatgataatcaccggaactcttgtgaggaaactctgccagaacgaagggtgtaagctgaaagcagttgtagaagccaaaaagctcatcctgggcggtctggagaaggccgaaaaaaaggaggacactcggatgtatttgttagccctgaagaacgcgttacttcccgaaggcataccgtcccttctgaagtatgccgaagccggcgaaggacccatctcgcatttagcgaccacggccctccagagatacgatcttccctttatcacggatgaagtgaagaaaacactaaataggatttatcaccagaaccgcaaggtgcacgagaaaacggtacgaacagccgctgcagcaatcattctcaataataatccttcatacatggacgtaaagaacatcttgttatccattggagagctgccccaggagatgaacaagtacatgctggccatcgtacaggatatcttacgcttcgaaatgccggcgagcaagatcgtgcgcagggtactgaaagaaatggtggcccacaactatgatcgttttagtcgcagcgggagtagctcagcctacaccggctacatagagcgttctccacgcagtgcctcaacttactccctggacattttgtattctggttctgggattctgcgtaggtcaaatctgaacatcttccagtacatagggaaggccggattacacgggtcacaagttgtaattgaggcgcaaggtctggaggcgttaattgccgcaacgcccgatgagggtgaagagaatctcgactcctacgcaggaatgtcagccatcctgtttgatgtgcaacttcggcccgtgaccttttttaacggttacagcgacttaatgagcaaaatgttgtcagcatctggagacccaatctcagttgttaagggtctgatcctgctcatagatcacagccaggagttgcaacttcagagtggtctgaaagcgaatattgaggtgcagggtggcctggccattgacatttccggcgctatggaattctcactgtggtaccgggagtcaaagacgagggtcaagaatcgagtgacggtggttattacaaccgatattacagttgactcctcattcgtgaaagccggtttagaaacttccacagagactgaagcgggcctggaattcatcagcaccgtgcaattcagccagtaccctttcctggtttgtatgcagatggacaaagatgaggccccattccgccagttcgagaaaaaatatgagcgactcagcacggggcgggggtatgtgtcacagaagcgaaaagaatcagtcctggccggatgcgaattcccactgcaccaggaaaactctgagatgtgcaaggttgttttcgccccccagccagacagcacaagctctgggtggttt

SEQ ID NO: 5517 - DNA, 2682 bp, Artificial Sequence
  derived and/or modified sequence
atgatactcctggcggtattgtttctctgcttcatcagcagttattccgcctctgtgaagggacatacgacaggcctctccctcaataatgatcgactgtacaagttgacctacagcaccgaggtgttattggaccgcggcaaagggaaattgcaggattccgtgggttatagaatctcaagtaatgtcgatgttgccctgttgtggcgcaacccagacggcgatgatgaccagttaatccaaattactatgaaagatgtgaatgtagagaatgttaaccagcaaaggggggagaagtctatctttaaaggcaagtccccatccaaaatcatgggcaaagaaaacctagaagccctgcaacgtccaaccttgttgcatttaattcacggtaaagtcaaagagttttattcttatcagaacgaagcggttgccatagagaatatcaagaggggcctggcgtcccttttccagacacaactctcgtctggtacgaccaatgaagtggacatctccgggaactgcaaagtgacgtatcaggctcatcaggataaggtgattaaaattaaagccttggacagttgcaagatcgccagaagcgggttcacaacaccaaaccaagtcctgggtgtgtcctccaaagcaacatcggttactacctacaagattgaggatagtttcgtcattgccgtcctagccgaggaaacccacaattttggcctgaatttcctgcagactattaaaggaaaaattgtgtcaaagcagaagctcgagctaaagactaccgaagcgggaccgcgactgatgtcagggaaacaggctgctgctatcatcaaagccgtggattccaagtacacagccatccccatagtcggacaggtgtttcagtcccactgcaagggttgccccagtcttagcgagctgtggcgctccacaaggaaatacctgcaaccagataacctgagcaaggccgaagccgttaggaattttttggcctttatacagcatcttcgcaccgcaaagaaggaggagatcctccaaatcttaaagatggaaaacaaggaggtgctgccgcaattggttgacgccgtgacctctgcccagactagcgacagcctggaagctatccttgacttcttagacttcaagtcggactcttccatcatccttcaggagagattcctgtatgcctgcggattcgcgtcccaccctaatgaagagctactgcgggctctcatctcgaagttcaagggtagtatcggctccagtgacatccgagagactgttatgatcattacagggactctcgtgcggaaactttgccaaaacgagggctgcaaattgaaggccgtggttgaggcaaagaaacttatattagggggccttgaaaaggcagaaaagaaagaagacactaggatgtacctgctggcactgaaaaacgccttgctgccagaagggattcctagtctgctgaagtatgccgaggctggtgaggggcctatctcccaccttgcaacaaccgcactccagaggtatgacctgccgttcattaccgacgaggtcaaaaagacccttaatagaatttaccatcagaaccggaaggtccacgagaaaactgtccgaacagctgctgcagccataattctaaacaataacccatcgtacatggacgtgaaaaacattttactgagcatcggagagttacctcaggaaatgaacaagtatatgctggccattgtgcaggatatcctgaggtttgagatgcccgctagcaagatcgttagacgagtgctgaaggagatggtggcacataactacgatcgcttctctcggtccgggagctcatctgcgtacactggctatattgaacgctcaccaagatctgcctccacttactcgctagatatcttgtattccgggtccggaattctgagaaggagcaatttgaacattttccagtacattggcaaggcaggactacatgggagccaggtcgtcatcgaggctcagggcctggaagctctgatcgcagccacccctgatgaaggtgaggagaatttggatagttatgcaggtatgtctgcaattctcttcgatgtgcagctgcggccggttacgttttttaatgggtattcagacctcatgagtaagatgttgtcagcctcaggggaccccatttcagtggtgaaaggtctcattctgcttattgaccattctcaggaattacagttgcagagcggcctgaaggcaaacattgaagtgcaggggggcctggctattgacattagtggagctatggagttcagcctttggtatagggagagtaaaacacgggtgaagaatagagtgacagtggtaattaccactgatatcacggtagattcttctttcgtcaaggctggactggagacaagcaccgagactgaggccggtctcgaatttatttcaaccgtgcaatttagccagtatcccttcctggtatgtatgcaaatggacaaggatgaagcccctttccgtcagtttgaaaaaaagtatgagcgcctgtcaacagggagaggctatgtaagtcagaagcggaaggagtcagtgttggcgggttgtgaattcccgttgcaccaggaaaacagcgaaatgtgcaaggtagtttttgcaccccagcccgactccactagctccgggtggttc

SEQ ID NO: 5518 - DNA, 2682 bp, Artificial Sequence
  derived and/or modified sequence
atgatcctgctggccgtgttgtttctctgcttcatttcgagctactccgccagcgtgaagggccacaccacaggtctgagtcttaataacgaccggctttacaagctcacatactcgacggaagtacttctggataggggaaagggcaagctgcaggacagcgtaggttaccgcatctccagtaacgtggatgtggccttgttgtggcgcaacccagacggcgacgacgaccagttgatccagataaccatgaaggatgtgaacgttgagaacgtgaaccagcagagaggagaaaagagcatcttcaaaggaaagagcccgtccaagataatgggcaaggaaaacttagaggcccttcagcggcccacactgctacaccttatccacggaaaagtgaaggaattttactcttaccagaatgaagccgtggccatcgagaatattaaacgcggcctggccagcctttttcaaacacagttgtcgagcggaaccaccaacgaggtggatattagcggcaattgcaaggtcacgtatcaggcccatcaggacaaggtgataaagattaaggcactagactcctgcaagatagccagatccggcttcacaacccctaatcaagtcttgggcgtatcgtcgaaagcaacctcagtgacgacatacaaaatcgaagattccttcgtcattgccgtgctcgcggaagagacacataacttcggattgaacttcctgcagacgattaagggtaagatcgtgagcaagcagaagctggagctgaagactacagaagccggcccgcgactcatgtccggaaagcaggcagcggccattataaaagccgtggattccaagtacacggctatcccaattgtaggccaggtgttccaaagccactgtaagggctgcccctcactgagcgaactgtggcggagcactaggaagtaccttcaaccggacaacttgagcaaagccgaggctgtccgcaattttctggctttcatccagcatttgcgtactgccaagaaagaggagatcctgcagatcttaaaaatggagaacaaggaggttctaccacaacttgtggatgccgtgacatccgcccaaacctccgacagccttgaggcaatcctggatttcctggactttaagtccgactcgagtattatactccaggagcgctttctgtacgcttgcggcttcgcgtcccatccgaatgaggaactgctacgggccctcatcagtaagttcaagggcagcattggcagctcggatatacgtgagaccgtgatgatcattaccggcaccttggttcgcaagctctgtcagaacgaaggctgtaaactgaaggctgtcgtagaagcgaagaaactgatactgggcggcctcgagaaggctgagaagaaagaagatacccgtatgtacctgttggctttgaagaacgccctgctgccggagggaatcccctcactgcttaagtatgccgaggcaggcgaaggcccaatctcgcatcttgccaccacggcgctgcaacggtacgatttgccttttattacagacgaggtaaagaagacgttgaaccggatctaccaccagaaccgtaaagtacatgagaagactgtacgcactgccgccgcagccatcattttgaataacaatcccagctacatggacgtcaagaatatcctattgagcataggagagttgccgcaagaaatgaataagtacatgttagccatcgtgcaagatatcctgcgatttgagatgcccgcgagtaagatcgttcgtcgtgtgttgaaggagatggtggcccacaattacgataggttcagccgcagtggttcgtcttcggcctacaccggttacatcgaacgctcgccccgcagtgcctcgacttactccctggatattctctatagcggaagcgggattctgcggaggtctaacctgaacatcttccagtacatcggtaaggccggactgcacggatcccaggtggtgattgaggcccaagggttggaggctctcattgcggctactccggacgaaggcgaggagaatttggattcgtacgctggtatgagtgccatactgttcgatgtgcagttgcgaccggttactttcttcaacggctatagcgatctgatgtcgaagatgctgagcgcgagcggcgatccgatttcggtagtcaagggcctgatactgctgatagaccatagccaggagttacagctgcaaagtggactaaaggctaatatcgaagtccagggcggcctggccattgatataagtggagccatggagttcagtctgtggtaccgcgaaagcaagactagggtcaaaaaccgtgtaaccgtagtgattactaccgatattactgtggactccagcttcgtgaaagctggcctggagacctctacggagaccgaggcaggattggagttcattagcaccgtccagttttcccagtacccgttccttgtctgcatgcagatggataaggacgaagcaccgttccggcaatttgagaagaagtatgagcgtctcagcaccggtcgcggctacgtttcccagaaacgcaaggagtcggtcctagccggctgtgagttcccactccaccaggagaattccgagatgtgcaaagtggtctttgcaccgcagccggactcgacaagtagtggctggttt

SEQ ID NO: 5519 - DNA, 2682 bp, Artificial Sequence
  derived and/or modified sequence
atgatattgctcgcagtcctcttcctctgcttcatttccagttatagcgcttctgttaaaggacatacaacaggactctccttgaataatgatagactgtataagctgacctattccactgaagtcctgttggaccgcggaaagggcaaacttcaggattccgtgggctaccgcatcagctctaatgttgatgttgcactactgtggcgaaaccccgacggagatgacgaccagcttatccagatcactatgaaggatgttaacgtcgagaacgtcaatcagcaaagaggcgagaaaagcatatttaaggggaagtccccttcgaagattatgggaaaagagaacctggaggccctgcaacgtccaactctgcttcacctcatacacgggaaagtgaaagaattctacagctatcaaaacgaggccgtggccattgagaatataaaacgggggctggcctctttgtttcaaacacagctgagctctggaacaacaaatgaggtcgacatctcaggtaattgcaaagtcacgtaccaagcacaccaggataaagttataaagattaaggcactggatagctgtaaaatagcccgctccggcttcacgaccccaaaccaggtgctgggggtatccagcaaagctacatccgtgaccacctataagatcgaggatagcttcgtaattgctgtgctggccgaggaaacccataactttgggctgaactttctgcagactatcaagggaaaaatcgtctcaaagcaaaagttggagttaaaaactactgaggctggtcctaggctcatgtcaggtaaacaggcagccgcgataatcaaagctgtagattctaagtatacagccatacccatcgtgggacaggtgttccagtcccattgcaaaggatgcccatcactgagcgaactgtggcgcagcacacgcaaataccttcaacccgataatctgagcaaggctgaagctgtgcgcaattttttagcctttatccaacatttgcgtaccgccaagaaggaggaaattctgcaaatactgaagatggagaacaaggaagtgctgcctcagctagtggacgccgtgacatccgcacagacatccgactcgctggaggctattttggacttcctggatttcaaaagcgactcatccattatcctacaagaaaggttcctatatgcttgtgggttcgccagccatccaaatgaagaactcctcagagctttaatatcgaagtttaaaggctccataggcagcagcgatatccgggagaccgttatgatcataacaggtacgctggttaggaagttgtgccagaatgagggctgcaaactgaaagctgtggttgaggccaaaaaactgatcctaggcgggctggaaaaggctgagaaaaaggaggacacacgcatgtatctgttagccctcaaaaacgctctccttcccgaggggattcccagcctccttaaatatgcagaagccggcgaggggccaatttctcacctggccactaccgcattgcaaaggtacgacctcccctttataaccgatgaggtgaaaaagacgctaaaccgcatttatcatcagaatcgaaaagtgcacgagaagacagtcaggactgccgctgccgccattattctaaacaacaacccctcctatatggacgtaaagaatattttattatccattggcgaactgccgcaggaaatgaataaatacatgcttgcaatagtgcaggatatactcaggttcgagatgccagcctccaagattgtaagaagggttttgaaagagatggtagcccacaactatgaccggtttagtcggtccgggtcttcgtccgcttacactggctacatagaaaggtctcctcgctcagcgagtacatattccctggatatcctctatagtggttctggaatccttaggcggtctaacttgaacatctttcaatacatcggcaaggcggggcttcacggtagtcaggttgtcatcgaagcccaggggctagaagcactcattgcagcaaccccagatgaaggagaagagaatcttgattcatacgccggaatgagcgctatcctgttcgacgtccagttgcgtcctgtgaccttctttaacggctactctgatctgatgtctaagatgctgagtgcttctggcgatcccatttctgttgtcaagggattgatcctgctgatcgatcattcacaagagctccagcttcagtcaggccttaaagcgaatatcgaggttcaggggggtctggcgatcgatatcagtggcgctatggagttctccctgtggtacagggagtctaaaactagggttaagaaccgggtgacggtggtcattaccacagacattacagtggactcgtcttttgttaaggcagggctcgagacaagcactgaaaccgaggccggtctggaatttattagtaccgtgcagttcagtcagtaccctttcctggtgtgcatgcagatggataaagatgaggctccctttaggcagtttgaaaaaaagtatgagcgcctgtctaccgggcgggggtatgtgtcccagaaacgtaaagaatctgtgctggccgggtgtgaattccctcttcatcaggaaaattccgagatgtgtaaggtggtgttcgctccccagccagactccactagcagcgggtggttc

SEQ ID NO: 5520 - DNA, 2682 bp, Artificial Sequence
  derived and/or modified sequence
atgatcctgttggctgtgcttttcctgtgcttcataagttcatattccgccagtgtcaagggccatactaccggccttagccttaataatgaccgcttgtataaactgacctattccaccgaggtcctgcttgatagggggaagggaaagctgcaggactctgtcggttaccgcattagcagtaacgtggacgtggcactgctgtggagaaatcccgatggggatgacgatcagcttatacaaatcaccatgaaggatgttaacgtggaaaacgtcaatcagcagcggggcgaaaagtccatatttaaaggcaaatcccccagcaaaattatgggcaaggaaaatctggaggcactccagaggccgacattgttgcacctgatccacggaaaggtcaaagagttttactcctaccagaacgaggcggtggctatcgaaaacatcaagaggggcctggcctcactgtttcagacacagctcagctctgggaccactaacgaggtagatatttctgggaactgtaaagtcacatatcaagctcatcaggacaaagtgatcaagattaaagctctcgattcatgcaagatagccagatctggatttactactcctaatcaggtcctgggggtatccagcaaggcgacaagcgtaacgacctacaaaatagaagatagcttcgtaattgcagtactcgcggaggagacacataactttggattgaactttctgcagaccatcaaaggtaagatcgtgtccaagcagaagctggaactgaaaaccacggaagcagggcctcgcctcatgagcggcaaacaagcggccgctattatcaaggccgtggacagcaagtacacggctatacccatcgtgggtcaggtattccagtctcactgtaaggggtgcccctccctgtccgagctgtggaggtccactaggaaatacctgcagccagacaatctgagcaaagcagaggcagtcagaaacttccttgcattcattcagcatttgaggaccgccaagaaggaggaaatactgcaaatcctcaagatggaaaacaaggaggttctcccccagttggtggatgccgtgacatccgcccaaacctctgatagcttggaggcaatccttgactttctggattttaaatccgactcttctatcatcctccaagaacggttcctgtacgcctgtggatttgcgtcccatcccaacgaagagctgctgcgggctctgatcagtaagtttaaaggcagcatcgggtcatccgatatcagggaaacagtaatgatcattaccggcacgctcgtgagaaaactctgtcaaaatgagggatgcaagctgaaggccgtcgtcgaagcgaaaaagctcatcctgggagggctcgaaaaggctgaaaaaaaagaggacacgcgaatgtacctccttgctctgaaaaatgcgcttctgcctgaaggcattccgtcacttttgaaatatgccgaggctggggaagggccaatttcacacctcgcgacaacagccctgcagcgctacgacctgccattcattactgatgaggtgaagaagacattgaatagaatataccaccagaacagaaaggtacacgagaagacagtccgaaccgccgctgccgctattatcctgaacaataacccctcctatatggacgtgaaaaacattcttctgtccattggggagttgcctcaggagatgaacaagtacatgctggctattgtccaggatatactgcggtttgagatgccagcctcaaagatcgtacggcgggtcctcaaggagatggtcgctcataactacgacaggttcagccgctccggttcatcatcagcctatacaggctatatcgagcggtcacccagatccgcaagtacttatagcttggatatactgtattccggaagtggaatcttgaggaggtctaacctgaatatctttcagtatatcggcaaggccgggttgcatggctctcaggtcgtgatcgaggcccaggggctcgaggccctcattgccgccacccccgatgagggtgaagaaaacttggactcatacgccgggatgtccgctatcctgtttgacgttcaattgaggcccgtcacgttctttaatggttacagcgatctgatgagcaaaatgctttcagcctctggagatccaatcagtgtggtcaagggtttgatcctgcttatagatcattctcaagagctccagctgcaaagcggactgaaggcaaacattgaggtacaaggcggactggcgattgatataagtggggccatggaattttcactgtggtacagagaaagcaaaacacgcgtaaagaaccgcgtgaccgtggtcatcacgacagacatcactgtggatagcagcttcgtgaaggcgggtcttgagacatctactgagaccgaggctggcctggagtttatcagtactgtgcagttctcacaataccccttcctggtctgtatgcaaatggacaaggatgaagcaccctttagacagttcgagaagaagtatgagcgactctctactggccgcggctacgtgtctcagaaacgaaaagagagcgtcttggccggctgtgagttccctctgcaccaggaaaattccgagatgtgcaaagtcgtcttcgcacctcaacccgatagtacgtcctctgggtggttt

SEQ ID NO: 5521 - DNA, 2682 bp, Artificial Sequence
  derived and/or modified sequence
atgatactgttggcggtcctgttcctctgcttcatcagtagttactcggcttccgtgaagggacacactaccggcctgtcactcaacaatgatagactgtataagttgacttactccactgaggtgcttcttgatcgcggcaagggtaaactgcaggattctgttggctatcgaatttcatccaatgtcgacgtggccttgttatggcggaacccggacggggacgatgaccagttgatccagattactatgaaggacgtgaatgtcgaaaacgtcaaccagcagcgtggtgagaagtcgatattcaagggcaagtcaccttccaagatcatgggcaaagagaaccttgaggcccttcagcgcccaaccttgctccatttgatccatggcaaggtgaaggagttctactcttaccagaacgaggcggtcgcaattgagaatatcaaaaggggtcttgcatctctgttccaaacccagctgtctagtggcaccacaaacgaagtggacatttccggcaactgcaaggtaacttaccaagctcatcaagacaaggttataaagatcaaggcactggactcgtgcaagattgcccgtagtggctttaccacacccaaccaggtcctcggcgtgagctccaaagcgacctcggttacgacctataagattgaggatagcttcgtgatcgccgtcctggctgaggagacccacaacttcgggctgaatttcctgcagacgatcaaggggaagatcgtgagcaagcaaaagctcgagttgaagaccaccgaggcgggcccccgcctgatgtccggtaagcaggccgccgccattatcaaagccgttgactccaagtatacggccatcccgatcgttggtcaggtgttccagtctcactgcaaaggttgtccctctttgagcgagttgtggcgttccaccagaaagtacttgcaaccagacaacctctctaaggctgaggccgtccgcaattttcttgcgtttatccagcatctgcgtactgcaaagaaggaggagatccttcagatactgaagatggagaacaaggaggtgctacctcagctggttgatgccgtcaccagcgctcagacttcagattccttggaggctatcctggatttcctcgattttaagagtgactcctcgataatcttgcaggaacgcttcttgtacgcctgtggattcgcgagtcaccctaatgaggaacttctccgcgccctgatttcgaagtttaagggcagcataggcagttccgacatccgcgagaccgtcatgattattacaggaaccctggtacgtaagttgtgccaaaacgagggttgtaagcttaaggctgtcgtagaggccaagaagttgattctcggtgggctggagaaggcggagaagaaagaagacactcgtatgtatctcctcgcccttaagaacgccctgctgcctgaaggtatcccctctctcctgaaatacgccgaggctggcgaaggccctatcagtcacttggctacgacggcactccagagatacgacctgcccttcatcaccgacgaggtgaagaagacccttaaccgtatttaccatcagaatcgcaaggtgcacgagaaaactgtgaggactgcggccgcagccataatcctcaacaacaatccctcttacatggatgtgaagaacatccttttgtcgatcggggagctacctcaggagatgaacaagtacatgctcgccatcgtgcaggatatcctccgcttcgaaatgcccgcctctaagatcgtcagacgcgtcttgaaggagatggtcgcacataactacgatcgtttcagcaggtctggttcatcgtccgcttatacggggtatattgaacgtagtccccgtagtgcctccacctactctcttgacatcctctactccggaagtggtatcctgcgccgttcgaaccttaacatctttcaatacatcgggaaggccggcctccacggttcgcaagttgtgatcgaagctcagggtcttgaggccctgatcgccgctacccccgacgagggggaggagaaccttgatagctacgccggaatgtcggcgatcctcttcgatgtgcaactgcggccagtgaccttcttcaacggctactcggacttgatgtctaagatgctctccgcgtccggggatcccatctctgtggtgaaggggctcatactgctgattgatcactctcaggagctgcaactgcagagcggcctcaaggccaacattgaagtccaggggggtctcgctatcgacatttctggggctatggagttcagcttgtggtaccgtgagtcgaagacaagagttaagaatcgcgtcacagtggttatcacaactgacatcaccgtcgacagctccttcgtgaaggcgggattagagacctctactgagaccgaggcaggcctggaatttatttccaccgtccagttctcccagtaccccttcctcgtctgcatgcagatggacaaggacgaagctcctttccgccagttcgagaagaaatatgaacgcctctccaccggacgcggatacgtctcccagaagcgaaaggagtctgtgctcgcaggctgcgagttcccgctgcatcaagagaactccgagatgtgcaaggtggtcttcgctccccaacccgattctacctctagtggatggttc

SEQ ID NO: 5522 - DNA, 2682 bp, Artificial Sequence
  derived and/or modified sequence
atgatactcctggccgtcttgttcctatgcttcatttcttcatactccgcaagtgttaagggacatactaccggactctctcttaacaacgacaggctttacaagctcacatactccaccgaggtgcttttggacaggggcaaggggaaactgcaggactccgttggctaccgtatctccagtaacgtggatgtggcgttactgtggagaaatcccgatggagacgacgaccagctcatccagatcaccatgaaggatgtgaacgtggagaacgtcaaccagcagcgaggggagaagagtatcttcaaaggtaaatccccaagcaaaatcatgggaaaggaaaacctggaggcacttcagcgccccacactcttgcacctcatacacggcaaagtgaaggaattctactcctaccagaatgaagcagttgcaattgaaaatattaagagaggcttagccagcctgtttcaaacccaactgtctagcggcacaacaaacgaggtcgacatctccgggaactgcaaggtcacctatcaggcccaccaggataaggtgatcaagatcaaagctctggatagttgcaagatcgccagatctggtttcacaacacccaatcaggtcctgggggtgtcgagcaaagctacatcagtcaccacttacaaaatcgaagatagcttcgtgatcgccgttctggctgaggagacccacaattttggactgaactttctgcaaaccatcaaaggaaaaattgtctccaaacaaaaactggagttgaaaacgacagaagccggcccccgtcttatgagtggcaagcaagctgctgcgatcattaaagccgtggatagcaagtacactgccataccaatcgtcggtcaggttttccaatcacactgcaaaggttgcccctccctcagcgagctgtggaggtctacacgcaagtacctgcagcctgacaacctttctaaagcagaggctgtccgcaattttctcgcatttatccagcacttgaggaccgcgaagaaagaggaaattctgcagatcctgaagatggagaacaaagaggtgctgccccagctggtagacgcggtcacctcagcacagaccagcgattcgctggaagctattctggattttctcgattttaaatccgattctagcataatcttacaggaacggttcctgtacgcctgtggctttgccagccacccaaatgaagaactgcttcgggccctgataagtaaattcaagggaagtattggtagtagcgacattcgggagacagtcatgatcatcacaggcactcttgtccgcaaactgtgtcagaatgagggctgcaagctgaaggccgtggtggaggccaaaaaactgatactggggggccttgagaaggctgagaagaaagaggatacccgtatgtacctattggccctgaagaatgccctactcccagagggcattcctagccttctcaagtatgctgaggctggggaaggaccgatcagccatcttgctacaacagccctccagcgatacgatctgcccttcatcactgacgaggtcaagaagactctaaatcggatttaccaccagaaccggaaagttcatgaaaaaacagtgcgtactgccgccgccgccatcatcttgaataataaccccagctacatggatgtcaagaatattttgctatcaatcggcgagctgcctcaagagatgaacaaatacatgcttgcaatagtccaggatatcctgaggtttgagatgcctgcctcgaagatcgtgcggcgtgttctcaaagagatggtcgcccataattacgaccgctttagtcgatccggctcctcctccgcatatacggggtatatcgagagatcgccccgctcggcatcaacttactcccttgatatactatatagcgggtctggcatcttgcgtagatctaacctgaatatctttcaatatattggaaaggctgggcttcacggatcccaggtcgttatcgaagcgcagggcctggaagcactcatcgcagcgactcctgacgaaggagaggagaatttggacagttacgctgggatgtccgctatcctcttcgatgtgcagctgcggccagtgactttctttaacggctacagcgatctgatgagcaaaatgctatcagccagtggcgacccaatttcggtggttaagggtctgatactgctcatcgaccacagccaggagttgcagctgcagtctggcctgaaggccaatattgaagtacagggcggattggccattgacatcagtggcgccatggaattttccctttggtatcgcgagtccaagactagagtcaagaaccgagtcactgtggtgatcactaccgatattacagtggattccagtttcgtgaaagcaggactggaaacgagtacagaaaccgaggccggcctcgagtttatcagtacggtgcagttctcacagtacccttttttggtgtgcatgcagatggacaaagatgaggctcccttccgacagtttgagaagaaatatgagcgtttaagcactggaagaggatacgtatcgcagaaaagaaaagagtccgtgctggcaggctgtgaattccctctacaccaggaaaactccgaaatgtgtaaagtcgtcttcgccccacagcccgactccactagttctgggtggttt

SEQ ID NO: 5523 - DNA, 2682 bp, Artificial Sequence
  derived and/or modified sequence
atgattcttctggctgtcttgttcctatgttttatctccagctactcagcttccgtcaaggggcatactaccgggctctccctcaataatgatagactgtacaagctcacctatagcaccgaggtgctactggacaggggcaaggggaagttgcaggattcagtgggatataggatctcctccaacgtggacgttgctctgctctggagaaatcccgatggggacgatgaccaacttatccaaatcactatgaaggacgtgaacgtggaaaacgttaatcagcagcggggggaaaagtccatttttaaaggcaagagtccgtcaaaaattatgggcaaggaaaatttggaagcactgcagcgccctaccctgctgcacctaatccacggaaaggtgaaggagttctacagctaccagaatgaggcggtggctattgaaaacattaagcggggactcgcctcccttttccagactcagctgtcctccggaaccacgaacgaggtggatataagtggcaactgtaaagtgacttaccaagcacaccaagacaaggttataaagatcaaagcgctggattcatgcaaaatcgctaggagcgggtttacgacgcccaatcaggtgctcggggtgtccagcaaagcaacaagcgtaacaacatacaaaatagaggattccttcgttatagctgtgctggcagaagaaacccataacttcggcctaaacttcctacaaacaattaagggcaagatcgtttctaagcagaagcttgagctgaagaccaccgaggccggacctagactgatgtccggaaagcaagctgctgcgattattaaggctgtggattctaagtacacagccatccccattgtgggccaggtgtttcagtcccattgtaaaggatgtccttctctttcagagctttggaggtctacacgaaaatatctgcagccagacaatttgtcgaaagccgaggccgtgagaaacttcctggcgttcatccagcacttgagaactgctaaaaaggaggaaattctgcagatcctcaagatggagaataaagaggtgttgcctcaacttgtcgatgcggtgacatcagcccagacttccgactcactggaagctattctggatttcctagacttcaagtccgattccagcatcattttgcaagagcggtttctctacgcctgcgggtttgcaagccatccaaacgaggagttgctgcgagcactgatctcgaagttcaagggcagtatcggctcaagcgatattcgggagacggtgatgattatcacaggaactctggtgcgtaaactgtgtcagaatgaggggtgcaagttgaaagccgtggttgaagcgaaaaagctgatcctcggcggactggaaaaggccgaaaagaaggaggacacgaggatgtacctcctagccttgaagaatgcactgttgcccgaaggaatcccaagtctcctaaagtacgctgaggcgggcgagggtccgatcagccatctggcaacgacagcactgcagcgttacgatttaccattcattacagacgaagtgaagaagacccttaacaggatttatcatcagaataggaaggttcacgaaaagacagtgcgcacagcggcagcagctattatcctgaataataacccaagctatatggatgttaaaaatattctgctgtctattggggaactacctcaagagatgaataagtatatgctcgctatcgtccaggacattctgcgttttgaaatgccggcctcgaaaatcgtacgaagggtgttaaaggaaatggtggctcataactatgacagattctccagatcgggttcctcttccgcctatactggatatatcgaaagatcccctcggtccgccagcacttactctctagatatcctctactctggctccggcatcctccgccggtcaaaccttaacatcttccagtacatcggcaaggcgggcttgcacggctctcaggtcgtaattgaggcccaggggctggaagctctgattgcggccacgccagacgagggagaggaaaacctcgactcctacgccggcatgagcgcaattctgttcgacgtacagctgcgccccgtgaccttctttaatggatactcagatcttatgtctaaaatgttgagcgcctctggggatccaatctctgtcgtcaagggcttgattctcctgatcgatcacagtcaagagctgcagcttcagagcggcctgaaagccaatatcgaggtgcagggcggactggccattgatatctcgggagctatggaatttagcctgtggtaccgagagtccaaaacgagggttaaaaacagagtgacagtggttatcaccactgatattactgtggatagttcattcgtgaaggctggactggagacgagcaccgaaaccgaggccggccttgaatttataagcaccgtccagttttctcagtacccattcttggtatgtatgcagatggacaaggatgaagccccattcaggcagttcgagaagaaatatgagcgactctctactgggcggggttacgtcagtcagaaacgcaaggagagcgtgcttgcaggatgtgaatttcctcttcaccaggagaactctgagatgtgcaaggtggtctttgcaccacagccggatagtacgagctcaggatggttc

SEQ ID NO: 5524 - DNA, 2682 bp, Artificial Sequence
  derived and/or modified sequence
atgatcctgctcgctgttctgttcctgtgcttcattagctcatactcggcaagcgtcaagggacacacaacagggctgagtttgaacaatgatcggttgtacaagctcacatactccaccgaggtacttctggatcgaggcaaggggaaactccaagattcagttggttatcggatatcctcgaacgtggatgtggctcttctgtggcgcaacccagacggtgatgatgaccaattgatccagatcaccatgaaggacgttaatgtcgaaaacgttaaccagcaaagaggcgagaagtctatattcaagggtaagagcccctctaaaatcatgggcaaggaaaacctcgaggcattgcagcgacccaccctcttgcacttaatacatggaaaagtcaaggagttttatagctaccagaacgaggcagtggcaatcgagaatatcaaaagaggactagcttcgctgtttcagacccaactttccagcggtaccacgaatgaagtcgatatcagtgggaactgtaaggttacgtatcaagcgcaccaggataaggttataaaaatcaaagcgctggattcatgcaagattgcaagatcgggcttcacaacaccaaaccaggttctcggtgtttctagcaaggccacgagcgttactacatacaagatcgaggactcgttcgtaatagccgttctcgcagaggagacgcataacttcggacttaacttcctgcagactatcaagggaaagattgtgagtaagcaaaaacttgagttgaagacgactgaagccggcccgcgcttaatgagtggtaagcaagctgcagcgattataaaggcagtggactccaagtacaccgccattcctatcgtgggacaggtcttccagtctcattgtaaagggtgcccttctctctctgagctgtggcgaagcacacgaaagtacttgcagccagataatctctcgaaggctgaggcagtccgaaatttcttagcattcatccagcatttgcgcacagcgaaaaaagaggaaattctgcagattttgaaaatggagaacaaagaagttcttccgcagcttgtggacgcggtcacctcggctcaaacctccgacagtctggaagccatccttgattttctagactttaagagcgattctagcatcatcctgcaggaacgctttctgtatgcttgcggcttcgcgtcccatccgaacgaggagcttttgagagcccttatcagtaagttcaaaggttccataggatcatcagacatccgagagactgtcatgattatcaccggcacccttgtacggaagctgtgtcaaaacgagggatgcaagctcaaggccgtcgttgaggccaagaaacttatcctcggaggtctcgagaaagccgagaaaaaggaagatactcgtatgtatctacttgccctcaaaaacgctcttcttcctgaaggcataccttctctgcttaagtacgctgaggcgggggagggtcctatcagccatcttgctactacagccttgcagcgatacgatctccccttcatcacggatgaggtcaaaaaaacactgaatcggatttaccaccagaaccgcaaggtccacgagaagaccgtccgtacagcagccgcggcaatcatcttgaacaataacccatcttacatggacgtcaagaatatccttttatctatcggtgagctcccgcaggagatgaacaaatacatgctcgcaatcgtgcaggatattttgcgttttgaaatgcctgcatcaaagatagtccgccgcgttttgaaggagatggttgcacataattacgatcgattttcgaggtccggtagcagctctgcctataccggctacattgaacgaagtcctcggtctgctagcacttactccttagacatcctctacagcggttcaggcatcttaaggaggtcgaatcttaatatattccagtacataggtaaggctggcctccatgggtctcaggtcgtaatcgaagcgcaaggcctcgaagccctgattgctgctaccccagacgaaggggaagagaacctcgattcttatgctggcatgtctgctattctcttcgatgttcagctgcgacctgtgacctttttcaatggttattcggatctgatgtctaagatgctctctgcctccggcgatccgatttcagttgtaaaaggtctgattcttctaatcgatcattcccaagaattacaactgcagagtggcctcaaggcaaacatcgaggtacagggcggccttgcaatcgatatcagcggcgctatggagttctctctctggtatcgtgaatcaaagacccgagttaagaacagagttactgttgtcatcaccaccgacattactgttgactcgtcctttgttaaggcgggtttggagacctctactgaaacagaagcgggcctcgaattcatatcgacagtccagttctctcaatacccatttctcgtctgtatgcaaatggataaagatgaggctcctttccgccaatttgaaaaaaagtacgaacgcttgagcaccgggcgcgggtacgtttcacagaagcgcaaggagagcgtgctcgccggttgtgaattcccattacaccaggagaactcggagatgtgcaaggtcgtgttcgccccgcaaccggactcaacctctagtggttggttt

SEQ ID NO: 5525 - DNA, 2682 bp, Artificial Sequence
  derived and/or modified sequence
atgatcttgttggcggttctgttcttgtgcttcatcagttcatactcagcctcggtcaaaggtcataccacaggtcttagcctaaacaatgaccgcctgtataaactaacctacagtaccgaggtactattggacaggggtaaaggcaagcttcaagatagtgtggggtatcggatttcaagtaatgtcgacgttgccctgctgtggcggaatcctgacggcgacgacgaccagctcatccagatcaccatgaaggacgtgaatgtggagaatgtgaatcagcaaagaggcgagaaatccatcttcaaaggcaagtcaccttcaaagatcatgggcaaggagaacctggaagctctgcagagaccaacgctactgcatctgatacacgggaaggtcaaggagttctactcttaccagaatgaggcagtggctattgagaatattaaaagaggactcgccagcctctttcaaacacagctctcatctggaaccactaacgaagtggacatatctggtaactgtaaagtcacatatcaggctcatcaggataaggtaatcaaaatcaaggcattggactcttgtaagatcgctcgctcgggatttactacccccaatcaagtcctcggcgtgtctagcaaggccacgagcgttacaacttataaaatcgaagattccttcgtgatcgctgttctggctgaggaaacacataattttggtctcaattttctgcagactattaaaggcaaaattgtgtctaaacagaaactggagttgaaaacaacagaagccggtccccgtttgatgtccggcaaacaggcagcggcaataataaaagccgtcgactcgaagtacacagccattcctattgtgggccaagttttccagtcacactgtaaaggctgtccctctttatctgagctgtggagaagcaccagaaaatacctacagcccgataatctgtcaaaggcggaggcagtaaggaacttcctcgcatttatccagcaccttcgcacagcgaagaaggaggaaatccttcagatcctgaagatggaaaacaaggaagtgcttcctcaattagtcgatgccgtgacgagcgcacaaacctctgactcgctggaggctatcctggactttctcgacttcaaatcagattcttctattatcctgcaggagaggtttttatacgcctgcgggttcgcatcacaccccaatgaggaactccttcgagccctcatcagcaaattcaagggttctatcggcagctctgacatccgcgagaccgtcatgatcattacgggaacgctggtgcgcaagctgtgccagaatgaaggatgcaaactgaaggccgttgtagaggccaagaagcttatcctggggggccttgagaaagccgagaaaaaagaagacacacgcatgtacttgctggcccttaaaaatgctcttctgccagaaggtatcccctctttgcttaagtacgcagaggctggcgagggccctataagccaccttgctacgacagcgcttcagaggtacgacctccctttcataactgatgaagtcaagaagaccctcaatcgcatatatcaccagaatcgaaaggtgcatgagaaaaccgtaaggaccgcagcggctgcaataatcctaaataacaaccctagttatatggacgtcaaaaatatactgctgagcattggcgaacttcctcaggagatgaataaatatatgttggccatagtacaggatattttacgctttgaaatgcccgcttccaagatcgtgcggcgcgtgcttaaagaaatggtggctcataactacgaccgctttagtagatccggctccagtagtgcctataccggttatatagagcgttccccccgaagtgcttccacctattctctcgacattttatacagcggttcaggcatccttaggcggagtaacttgaacatattccagtacatcgggaaggcaggcttgcacggatcgcaggttgttattgaagcacaaggcctggaggccttgattgcggccacccccgatgagggggaggagaatctggacagctacgctggaatgagcgctatcctgtttgatgtccaactcaggcccgtcaccttcttcaatggatattcagacctaatgagtaaaatgctctccgcatcaggcgacccaatcagtgtcgtgaaaggacttatcctgctcatcgaccatagccaggagctccagctgcaaagtggcctgaaagcaaatatcgaggtgcagggaggcctggccattgacatcagcggtgcaatggaatttagcctatggtaccgggagtccaaaactagggttaaaaacagagtcactgtagtaatcaccaccgatatcacagttgattcatccttcgtgaaagccggcctcgagacctccactgagacggaagctggtcttgagttcatctcaacagtgcaattttcccaatacccgtttttagtgtgtatgcagatggataaagatgaggctccttttcgccaattcgagaagaagtatgaaagactgtctaccggtagagggtatgtgtcgcaaaagagaaaagaaagtgtcctagctgggtgtgagtttccactacatcaggaaaacagcgaaatgtgtaaggtggtttttgcgccccaaccagatagcacgagttcaggatggttt

SEQ ID NO: 5526 - DNA, 2682 bp, Artificial Sequence
  derived and/or modified sequence
atgattctgctggccgtcctcttcctgtgcttcattagcagttattcagcctcagtgaaagggcataccacaggcctctcattgaacaacgaccggctatacaaacttacatactctacagaggtactgctcgacagggggaagggaaagctgcaggactcggtgggataccgtatttcctccaatgtggatgtcgccctactgtggaggaatcccgacggagacgatgatcagttaatccaaataacgatgaaggatgtgaacgtagaaaatgtgaaccagcagcgcggcgaaaagtctatcttcaaaggaaagtcaccatctaagataatgggaaaggagaatttggaagcactgcagaggccgaccctcctgcaccttattcacggtaaggtcaaagaattctattcttaccagaacgaagcggtcgcaatcgagaatattaaaagaggactggctagcttatttcagacacagctttcctctggcaccactaacgaagtagacatatctggaaattgtaaagtgacataccaagcgcatcaggataaggttatcaaaattaaagccctcgattcgtgtaagatcgctagatctggcttcacaacccctaaccaggtattgggagtaagctcgaaggctacctcagtcaccacatacaaaattgaagacagtttcgtcatagcagtcctcgcagaggaaacacacaactttggactgaacttcctacagacgattaaggggaaaatcgtctccaaacaaaagctggaacttaagactaccgaggccggcccacgactgatgtctgggaagcaggctgcagctataattaaagccgttgatagcaagtacacggccatccctatcgtgggtcaggtgtttcagtcccactgcaaggggtgtccttctctgtctgagctatggcgatctacacgcaaatatctgcagccggataatttaagtaaggccgaggctgtcaggaactttctggcattcatccagcatcttcgtactgcaaagaaggaagagatacttcagatcttgaagatggaaaacaaagaagtgctccctcagctcgtggacgcagtgacttctgcccagactagtgactccctcgaggccatcctcgatttcttagactttaaaagcgattcaagtataattctccaagaaagatttctgtacgcttgtgggttcgcctcccacccaaacgaggaactgttgcgagcattaattagtaagttcaaggggagcattgggagctccgacattcgcgagaccgtcatgataatcactggtacactggtgcgtaaactctgccaaaatgaaggatgcaaattgaaggctgtcgtcgaagcgaagaagctgatactgggcggcttggagaaagccgagaagaaagaagatactcgtatgtatctactcgctctcaagaatgcactgctgcctgagggaatcccatctttgctgaaatatgctgaagccggagaggggcccattagtcacttggccacgactgctctccagcgttatgaccttccgttcataactgatgaagtgaaaaaaacgctgaatcgaatctaccaccagaatagaaaggtacacgaaaagactgtaagaacagcagccgcagctataatcctgaacaataatcctagttacatggatgtgaaaaacatactcttgagtatcggcgagctgccccaggagatgaacaagtacatgcttgcgattgtacaggacatcctccggtttgagatgcccgctagtaagattgttagacgtgtactgaaggagatggtggcacacaactacgatagattctcccggagtggttcttcatcggcctacactggctatatcgaacgttctcctagatccgccagcacctactccctcgatatcttgtattctgggtccgggatccttcgcagatccaatctcaatatattccagtatatcggtaaagcgggcctgcatggaagccaagtggtgatagaggctcaggggcttgaggcactcattgccgcaactcccgacgagggggaggagaacctcgactcttacgccggcatgtcggccatcttatttgacgtacaactgaggcccgtcacttttttcaacggatactctgacctcatgtctaaaatgttatccgcttccggagacccaattagcgtggtgaagggtctgatactactaattgatcatagccaagagcttcaattacagagcggcctcaaggcaaatattgaggtgcaagggggcctggccatcgatatatctggggccatggagttctctctgtggtacagggaaagcaaaacaagagtgaagaacagggtgaccgtcgtaatcaccacggacattaccgttgattcctcgttcgtcaaggctggcctcgagacctccacagaaacagaagccggtttggagttcatttcaacagtccagttttcacagtatcccttccttgtgtgcatgcagatggacaaggatgaagcacccttcaggcaatttgaaaagaagtatgagcgtttgtcaaccggtaggggatacgtgtcgcagaagcgcaaggaatcggtgctggccggctgcgagtttccacttcaccaggaaaacagcgaaatgtgcaaggtggtgttcgccccacagccagactcaacatcctccggttggttt

SEQ ID NO: 5527 - DNA, 2682 bp, Artificial Sequence
  derived and/or modified sequence
atgattctccttgccgtgctgttcctgtgcttcatttcctcatattccgctagtgtgaaaggtcataccacgggcctttccctgaataatgacaggctgtacaagctgacatacagcacagaggtactactggaccggggaaagggaaaactacaagatagcgttggctatcggatttcgtcaaatgtggatgtcgctttactttggaggaaccccgacggcgatgatgaccagctaatccagatcacaatgaaggacgtgaacgtggaaaacgtgaatcagcagcgaggagagaagtccattttcaaaggaaaaagcccatcaaagattatgggaaaggagaatttggaggctctgcagcgacccaccctgcttcacctgatccacggtaaggtaaaggaattctacagttatcagaatgaggccgtggccatcgaaaatatcaagcgagggctcgcctcgctcttccaaacgcagctcagtagtggtactaccaacgaggtggacatttccgggaactgcaaagtgacataccaggcacaccaggataaagtcattaagataaaagcattggattcttgcaaaatcgcacggagtgggtttactacccctaatcaggttttaggagtaagctctaaggctacgtctgtcaccacttacaagattgaggatagcttcgtcatagccgtgctggccgaagagacacacaacttcgggctgaacttcctgcagacgattaagggtaagattgtgagcaaacagaagctcgagttgaagaccacagaagcagggcccagactgatgtccggaaaacaagcggccgccataatcaaagctgtggacagtaagtacactgccatccctatcgttgggcaggtatttcagtcacattgtaagggttgcccctccctgtccgagttgtggaggagcacgcggaagtatcttcagccagacaatctgagcaaagctgaagctgtcaggaactttcttgccttcatacagcatttgcggacggcgaaaaaagaggagatactgcagatcctgaagatggagaacaaggaagtcctgccacagctcgtggatgctgtgaccagcgctcagacctctgactctttagaggcgatactggatttcctggacttcaaatctgacagctcgataatcttacaggagcggtttctctacgcgtgcggattcgcatcgcaccctaatgaagagctgttaagagcactgattagtaagtttaagggcagtatcggcagcagcgatatcagagagacagtgatgataatcaccgggaccttggtccgaaaattatgtcagaacgaagggtgtaagttgaaggctgtcgttgaggccaaaaagctcatcctggggggtctggagaaggctgaaaaaaaagaggatactcggatgtacctgctcgccctgaagaacgctcttctacccgaggggataccgtctctcctgaagtatgcggaggccggggagggtcccatcagtcatctagcgaccactgctttacagagatatgacttgccctttataactgacgaggtaaagaaaactctaaatcgaatttaccaccagaaccggaaagttcacgaaaagactgttaggacagcggcagctgcaatcatcctgaataacaaccccagctatatggatgtgaagaacatcctgttgtctattggcgagctgccacaggagatgaacaagtatatgctggcaatagtgcaggacattttacgcttcgagatgccagcaagtaagatagtgcgtagagtgctgaaagaaatggttgcccacaattatgacaggttctctcggtccggtagctcttcagcgtacaccggctacattgagcgctcaccgaggtcagccagcacatattctcttgatatcctgtattccggctccgggatcctcagacgatccaacctgaatatcttccagtatataggtaaggccggactacacggcagccaggtcgtcatcgaggcacagggacttgaggctttaatcgcagccacccctgacgagggggaagagaatttggactcttatgccggaatgtcagccatactttttgatgtgcagttgaggccagtaaccttctttaatggctattccgacttgatgagcaagatgttatctgcctccggggatcccatttccgtcgtcaagggactgattctgctaattgaccattcccaggagctccagttgcagtccgggctcaaggctaatatcgaggtgcagggaggtctggctatagatatctccggagccatggaattctccctctggtatcgagagtccaagactagagtcaaaaaccgcgtaactgtggtcatcactaccgacattacggtggattctagtttcgtgaaagccggcctggagacttcaaccgagactgaagctggtctggaatttattagcactgtccagttctctcagtatcccttcctcgtttgtatgcagatggacaaggatgaagctccttttcgccagttcgagaagaaatacgaacggttgtccaccggcaggggctatgtgtcccaaaagaggaaggagtcagtactggccgggtgtgaattcccgctgcaccaagaaaactcagaaatgtgcaaggtggtgttcgctccacagcccgactccactagctcaggctggttt

SEQ ID NO: 5528 - DNA, 2682 bp, Artificial Sequence
  derived and/or modified sequence
atgatcctgctggctgtgctcttcctgtgttttatctccagctactcagcatctgttaaggggcatacgaccgggctatccctgaataacgaccgattgtataagctcacgtacagtactgaggtactccttgacagagggaagggtaaactgcaggacagcgtcggctaccgaatttcatccaatgtggatgtagccctgctgtggagaaaccctgatggggatgatgatcaactcattcaaataactatgaaggatgttaacgtagagaatgtgaaccagcagcgaggggaaaagagtatctttaagggcaagtccccatctaagatcatggggaaagaaaacttggaggcgctgcagcgacctaccctgttacatctcatccacgggaaggttaaagagttctactcgtaccagaatgaggccgtcgcgatcgagaacatcaaacgtgggcttgcttcgctgttccagacccagcttagcagcggcacaaccaacgaagttgatatcagtggaaattgtaaagttacctaccaggcccatcaggacaaagtcattaaaatcaaggccctggacagctgtaagatcgcccgttcaggtttcacaacccccaatcaggtgctgggggtgtcttcgaaagccaccagcgtaacaacctataaaattgaagattcgttcgttatcgccgtactggccgaggaaacccacaactttgggctgaacttcctacagactatcaagggaaaaatcgtttctaaacagaagcttgagcttaagactaccgaagctggcccccgactgatgtcgggtaagcaggctgcggccatcattaaggcagtggattcaaagtacactgccattccgattgttggacaagttttccagtcgcattgcaagggttgtcctagcctcagtgaactgtggcgatccacccggaagtacttgcaaccagacaatctgagcaaggccgaggccgttcgtaacttcctagcgtttattcagcatctgaggacagcaaagaaggaggagattctgcaaattctgaagatggaaaataaagaggtgctccctcaattggtggatgccgtgacatctgcccagacaagcgatagtctggaggctatcctcgacttcctggatttcaagtcagattcctctatcatacttcaggagaggttcctttacgcctgcggctttgcctcgcatccaaatgaggagctgttaagagccctgatctcgaagtttaaggggagcattggcagctcggatattagggagaccgtaatgataatcacgggcactctcgttagaaagctatgtcagaatgaaggttgcaaactgaaagccgtggttgaggctaaaaaacttattctggggggtctggagaaggcagaaaagaaggaagacacacgaatgtatcttctagcacttaaaaatgccctactaccagagggcatcccgtctttattgaaatacgcagaggcaggagaaggccctatctcccatctcgctactaccgccctgcaacggtatgacctcccttttattaccgacgaagtgaagaagactcttaaccgaatttatcaccaaaaccgcaaagtccacgagaagacggttcgaaccgcagctgccgccataatactgaataacaacccaagttatatggatgtgaagaatattcttttgagtatcggcgaactcccacaggaaatgaacaaatacatgctggcaatcgtccaggacatcctgagatttgaaatgcccgcaagcaagatagttaggagggtgctgaaagagatggtagcccacaattatgacagattttctaggtcagggagctcatcagcctacaccggctatattgaaagatctccccgatcggcctctacctattccctggacatcctgtactcgggaagcggcattctaagaaggtcgaacctgaatatcttccaatacatcggcaaagcaggtctgcatggttcacaagtggtcatagaggcacagggtctcgaggctctgattgccgctacccccgacgaaggggaagagaacttggatagctatgcaggaatgtccgccatcctgtttgacgtgcaactgcggcctgttacgttctttaacggctattccgacctcatgagtaaaatgctttctgcctcgggtgatcctatcagcgtagttaaaggactgatactacttatcgatcactcacaggaactccaattgcagtcagggttgaaggccaacattgaggtgcagggcggcctggccatcgacattagtggagctatggagttttccctgtggtacagggaatcaaagacaagggtgaagaacagagtgacagtggtgatcaccacagatatcaccgtagacagcagttttgttaaagccggcctggaaacatctaccgaaaccgaagccgggctggagtttattagcaccgtacaattctctcagtatccatttctcgtgtgcatgcaaatggataaggacgaagcgccctttagacagtttgagaaaaagtacgaaaggttgtctacaggaaggggctacgtgtctcaaaaaaggaaagaaagcgtgcttgccggatgcgagttcccactgcaccaggaaaactccgaaatgtgtaaagtggtgtttgccccacaacccgattcaacatcgtctggctggttt

SEQ ID NO: 5529 - DNA, 2682 bp, Artificial Sequence
  derived and/or modified sequence
atgatccttctggctgtgctgttcctgtgtttcatcagctcctactccgcctccgtgaagggtcacactacaggcctgtcccttaataatgacagactatataagttgacttactcaaccgaggtattgcttgataggggcaagggaaaactgcaggactcagtcggctacagaattagctcaaacgttgacgtggccctgctctggagaaatcccgacggtgatgatgatcagttaatccagattaccatgaaggacgtaaacgtcgaaaacgtaaaccagcagcgcggagagaaatcaattttcaaaggaaaaagcccaagtaagattatgggtaaggagaaccttgaagccctgcagagacccacgctgcttcatctgattcacggtaaggtcaaagagttctattcctatcagaatgaagctgtggccatcgaaaacatcaagcgcgggctggcctccctctttcaaactcagctctcatccgggaccaccaacgaggtcgacattagcgggaattgtaaagtcacgtatcaggcccaccaggacaaagttatcaaaataaaagcactggatagttgcaagatcgctcgctctggctttacgacgcccaatcaggtactgggcgtctcatccaaggccacctccgtgaccacgtacaaaattgaggattcttttgtaatagctgtcctggccgaggaaacacacaatttcggcctaaatttccttcagaccattaaagggaaaattgtgtccaaacaaaagctagagctcaaaaccaccgaggcgggaccccggttgatgtcgggcaagcaggccgctgcgattatcaaggccgtcgactcgaagtataccgcaatccccatcgtgggtcaggtatttcagagtcattgcaagggatgcccaagcctgtctgagctctggagaagcacaagaaaatacttgcagcccgacaatctgagcaaagccgaggcggtgcggaactttctggcattcatacagcacctcagaacagcaaaaaaggaagagatcttacagatactgaagatggagaacaaagaggtcttaccacaattagtggacgcagtaacttcagctcagacaagcgattccctggaagccatcttggactttctggatttcaagagcgacagcagcataatcctgcaggagcgtttcctctatgcctgcgggttcgcttcgcaccctaacgaggaactgctccgggcattgatctctaaatttaaaggatctattggttctagcgacatccgggaaacagtcatgattattacaggcaccctcgtgagaaagctgtgccagaatgaaggttgtaagctgaaagctgtggtggaggccaaaaagctcatacttggcggactcgaaaaagcagagaagaaggaagatacccgcatgtatctccttgccttgaagaacgccctgttgcccgaggggattccctctctcctaaagtacgccgaagcaggcgaagggccaatcagccatctcgcaaccaccgctctgcagcgttatgacctgccattcatcactgatgaagtgaaaaagaccctgaacaggatctaccatcagaatcgtaaggtccatgagaaaacggtccgcactgccgcagctgctatcatcctaaataacaacccctcgtacatggacgtaaagaatatcttgctctcgatcggtgagctgccgcaggagatgaacaagtacatgctggcgatcgtgcaggatatactgcggttcgagatgcccgccagtaagattgtgagacgtgtgctgaaggagatggtggcccacaattacgatcgcttctcacgctcagggtctagctcagcgtacaccgggtacattgagagaagccccagaagcgcctcaacctactccctggatatattatactccggctcaggtatcctgcggaggtctaatctaaacatttttcagtacatcggcaaggctggcttgcacggctcacaagtagtaatagaggctcagggtttggaggccctgattgccgccacaccggacgagggggaagaaaatctggactcttacgccggcatgtctgccattctcttcgatgtgcaattgaggcccgtcacttttttcaacggttactccgatcttatgagcaagatgctttcagctagcggggaccctatctctgtagtgaaggggctgatcctcctgatagaccatagtcaggagctgcagctgcagagtgggctaaaggcaaacatagaggttcagggtggactggccattgacatctccggcgctatggaattttcgctgtggtacagagagagtaagacccgagtaaaaaatcgggtaactgtagtaattaccaccgatatcactgtggactcaagtttcgttaaggcagggctggagacatctacagagacagaggccgggctggagtttatctcaacggtccagtttagtcagtatccattcctggtctgcatgcagatggataaagacgaggctcctttccggcagtttgaaaagaagtacgagcgactcagtaccggcaggggctatgtgtctcaaaaacgcaaagaatcagtccttgcagggtgcgagttccctctccaccaagagaacagcgaaatgtgtaaggtggtattcgctcctcagcccgactccacgtcttcaggctggttc

SEQ ID NO: 5530 - DNA, 2682 bp, Artificial Sequence
  derived and/or modified sequence
atgatcctgctggctgtgcttttcctgtgcttcatctcaagctactctgctagcgttaaagggcacacgactggcttgtccctgaataatgatcgcctctacaagcttacctatagcactgaggtcttactggaccgagggaaaggcaagctgcaggatagcgtcgggtacaggatttccagtaacgttgatgttgctctgctttggaggaatcccgatggtgacgatgatcagctgatccaaatcaccatgaaggacgtgaatgtggagaacgtgaaccagcagcgaggcgaaaagagtatcttcaaagggaaatctccctccaagattatgggaaaggagaacttggaggctctacaaaggccgacactgctgcaccttattcatgggaaagtcaaggaattttacagttaccagaatgaggccgtggcgattgaaaatatcaaaagaggcctggccagcctgttccagacccagcttagctccggcacaaccaacgaggttgatatttctggcaattgtaaagtcacataccaggcccaccaagacaaggtaatcaagattaaggctctggattcatgtaaaattgccagatcgggattcacaacccccaaccaggttttaggagtctcgtccaaagccacgtctgtgacgacctacaaaatagaggactctttcgtaattgccgtgttggccgaagaaacgcacaacttcggactgaatttcctgcagaccattaaaggcaaaatcgtgtcgaagcagaaactggagctcaagactaccgaggctgggccccgactgatgagcggtaagcaggcggccgccataataaaggccgtggacagcaagtacactgcgattccgatcgttggacaagtgttccagagccactgtaaggggtgccctagcctgagtgaactctggcggtcaactcggaagtaccttcaaccagacaatctgagtaaagcagaggccgtccgcaactttctggcctttattcagcatcttcggacagccaagaaggaagaaatcttacagattctaaagatggagaataaagaagtgctaccgcagttggtcgacgcagtgaccagcgcccaaacctctgattctctcgaggcaatcctcgatttcctggactttaaatccgattctagtataatactccaggagcgttttctttacgcctgcggcttcgcatcacaccctaacgaggaactgcttcgggcattaatctcaaaatttaaaggcagcattgggagttccgacattcgggagaccgtgatgattatcaccgggaccttagttcgcaagctatgccaaaacgaagggtgcaaacttaaagctgtagtggaagcgaagaagctaatcctaggcggcctcgaaaaggctgagaagaaagaagataccagaatgtatctgctggccctgaaaaacgctctgcttccagagggtattccatctttactgaaatatgccgaagctggagaagggcctataagccatttggcgacgaccgctctccagagatacgacctcccctttatcaccgatgaagtgaagaagacactgaatcgcatatatcaccaaaatcgcaaggtccacgagaagacggttagaaccgctgcggccgccatcatattgaacaacaaccctagctacatggacgtcaaaaatatccttctatctataggagagttgccacaggagatgaataaatatatgttagccattgtgcaggacatactacgattcgaaatgcctgcatcaaaaattgtgcgcagagtgctgaaggaaatggtagcccacaattatgataggttctccagatctggttccagctcagcctatactgggtatattgagagaagccccaggagtgcgagcacctacagccttgacatcttatacagtggatcaggtattcttagacgatccaacctgaatatcttccagtatatagggaaggccgggctgcacggctcccaagtagtcatcgaagcccaaggcctagaagcccttatagcagctactccagacgaaggggaagagaatctcgattcttatgctggaatgagcgctatactgtttgacgttcagctcagacctgttaccttctttaatggatatagcgatctcatgagtaagatgctttccgcatcgggggatccaatcagcgtagtcaagggccttatactcctaatcgatcactcccaggagctccagcttcaatcgggtctgaaggctaatatcgaggtgcagggaggtttggcgatagacatctcaggggccatggagttctccctctggtatcgggagtccaaaacaagggtgaagaacagggtgaccgtggttatcaccaccgatatcacagtggatagcagtttcgttaaggcgggcttggagacatcaaccgaaacagaagccggcttggagtttatttctacagtccaattttctcagtacccttttctggtttgcatgcagatggataaggacgaagctccctttcgccagtttgagaaaaaatatgagagactgtcgactggcagagggtacgtgtcgcagaagcggaaagagagcgttctggccggctgcgagttccctctgcatcaggagaattcagagatgtgcaaggttgtgtttgcgccacagcctgatagcacctcttcaggttggttc

SEQ ID NO: 5531 - DNA, 2682 bp, Artificial Sequence
  derived and/or modified sequence
atgattttactggcggtgctctttctgtgctttatctcttcctactcagcctcggtcaagggccataccaccggactctcgttgaacaacgataggttgtacaagctgacatactccacagaggtactcctggacagaggcaaaggaaaactgcaagactcggtggggtacagaattagctccaatgttgatgtggctctgctgtggcgaaacccagatggcgacgatgatcagttgatccagataaccatgaaagacgtcaacgttgagaacgtcaaccagcagaggggcgagaagagtatctttaagggaaagtcacctagcaaaatcatgggcaaggagaatctggaagctctgcaacgcccaaccctgttacatttgattcatggcaaggtaaaagaattctacagctaccagaacgaagcagtcgccattgaaaacattaaacgtggcctggctagcttgttccagacccaactgtcaagtggcactactaacgaggtggatatatcaggcaactgcaaggtgacctatcaggcgcaccaggacaaagtcattaagatcaaagcactggacagttgcaaaatcgccaggagtggttttactacccccaaccaagtccttggagtttcttctaaagcaacttcagttaccacgtataagattgaagactccttcgttatcgccgttcttgctgaagaaactcacaattttggactgaacttcctgcaaactatcaagggtaagattgtgtcgaagcagaaactggagctgaagacaaccgaagccggcccccggctgatgtctgggaagcaggcagcggcgatcatcaaggctgtggattctaagtacactgcaatccctatcgtgggccaggttttccaatctcattgcaaaggatgcccttccctgagcgaactgtggcgcagcacacgaaagtaccttcaacccgacaacctgtctaaagcagaagccgtccgcaacttcctcgcattcatacagcacctgaggaccgccaagaaggaggagattctccagattttgaagatggagaacaaagaggtcctccctcagctcgtcgatgctgtgactagcgcgcaaactagtgacagtttagaggccatcctggactttctcgattttaagtctgatagctcaatcatcctgcaagagaggtttctttacgcttgcgggttcgcaagccatcctaacgaggaactcctccgggctctgatctccaagttcaagggatcaattggatcgtctgatatccgagagacagtgatgattataacagggacactggtaaggaagctgtgccagaacgaagggtgcaaactgaaagcagtggtagaagcgaagaaactgattttgggcggactcgagaaagctgagaagaaagaggacacaagaatgtacctgcttgctttaaagaacgcacttctcccggagggcataccttcattactgaagtatgcggaggcaggagagggccccatcagccaccttgcaactaccgctctccagcggtatgatctgcctttcattaccgacgaggtgaagaaaaccctgaataggatctatcatcagaaccgcaaggtccatgaaaagacagtaagaaccgctgcagctgcaattatcctgaacaacaacccatcttacatggacgtgaaaaatatcctcctttctatcggggaactgcctcaggagatgaataaatatatgctggcgatcgtgcaagatattctccgtttcgagatgcctgcttcaaaaatcgtcaggagggtgcttaaagagatggtggcccataactacgacaggttctctcggtctggatctagttcagcctacaccgggtacatcgagagatcaccccggtctgcctctacatacagcctggacatcctttactctggtagcggaattctgcgcaggagcaacctcaacattttccagtacattgggaaggctggactgcacggctctcaagtcgtcatcgaggcacagggcttggaagctctgatcgctgccacccctgatgagggggaagaaaaccttgatagctacgccggaatgtctgcgattctgtttgatgtccagctccgccccgtgacgttctttaacggatattcagatctgatgtctaaaatgctgtccgccagcggagatccaattagcgtagtgaaaggcctgatcctgctgatcgatcactctcaggaactgcaacttcagtctggactgaaggccaatatagaagtccagggcggcctggccattgacattagtggagctatggagtttagcctgtggtatcgagagagtaaaacaagggttaagaacagggtcaccgtggtgataaccactgatattaccgttgattcatcgttcgtgaaagccggacttgagaccagtacagaaactgaagcgggactggaattcatctcaacagtgcagttctcacagtacccatttttggtatgcatgcagatggacaaagatgaggcccctttcagacagtttgaaaaaaaatacgaaagactgagcaccgggcgagggtacgtgagccaaaagcggaaagagtccgtcctcgcaggctgcgaattcccccttcatcaggaaaatagcgagatgtgcaaagtggtcttcgcacctcaacccgattctacatccagtggttggttc

SEQ ID NO: 5532 - DNA, 2682 bp, Artificial Sequence
  derived and/or modified sequence
atgatcctactggccgtgctgttcctatgcttcatctcatcatattcagctagcgtgaagggtcataccaccggcctttcactgaacaatgaccgtctttataagttgacttactccactgaggttctcctcgatcgcgggaagggcaaactgcaggattccgtgggctatagaatatcaagtaatgttgatgttgcactcctttggagaaacccagatggagatgacgatcagctgatccagattacaatgaaggacgttaacgtagagaatgtgaatcagcagcgcggagagaaaagcatttttaagggaaagtccccgtctaagataatgggcaaggagaacttggaagcgctgcagcgccctaccctgttacacctaattcacggtaaggtaaaggagttttatagctatcaaaacgaagcggtagccatcgagaatatcaaaagaggtctcgcttccctgttccagacccagctgtcctcagggactactaacgaagtcgacattagcggcaattgcaaagtgacttaccaggcccatcaggacaaagttattaagatcaaggctctcgatagttgcaagattgcgcggtcgggattcacgacacccaaccaggtgctaggagtctcttctaaagccacttctgtgacaacctacaaaatcgaggatagttttgtgatcgcagttctcgcagaggaaacacacaacttcggcctcaactttttgcagacgatcaagggaaagatcgtttcgaaacagaagctggagctgaagacaaccgaagccggtccccggctgatgtccggcaaacaggccgcagccatcataaaagctgttgactcaaagtataccgcgattccaatagtaggccaagtattccagagtcattgcaagggctgccccagcctttctgagttgtggcggtctactcgcaagtacctccagcccgacaatctgagcaaggccgaagccgtaagaaacttcctggccttcatccagcacctgcggactgccaagaaggaggagatactccagattttgaagatggaaaacaaagaggtgcttcctcagcttgtcgacgccgtgactagcgcccaaacatcagactccttggaggcaatactggacttcttagacttcaaatcagactcctcgattattttacaagagaggttcctctacgcgtgtggctttgcctcgcatcccaacgaggagttactccgtgctttgatctcgaaattcaaggggagtattggatcaagtgatattcgagagaccgtgatgattatcaccggtacactcgtaaggaaactgtgccagaatgaggggtgcaaacttaaagcggtggtggaggcaaagaaactgattctcggcggactggagaaagctgaaaagaaggaggacacacggatgtatcttctggccctcaaaaacgcactcctcccagaggggataccctctctcttaaagtacgcggaagctggcgagggcccaatctcacatctcgcaaccactgccctccagcggtacgacctgccttttataactgacgaagtgaaaaaaacattgaatcgcatctaccaccagaaccggaaggtgcatgagaagaccgttagaaccgcggcagctgccattattttgaacaacaacccctcttacatggacgtcaaaaacatcctcctatccattggagaacttcctcaggagatgaacaagtacatgttggctatcgtccaggacattctgcggtttgagatgcccgcttccaaaattgtgaggagagttctgaaggagatggtagctcacaattacgatcgattctcacgttcaggctcgagttctgcctacacgggctacatcgaacggagtccccgaagtgcctcaacctattctctggatattctgtattcagggtctggaattctgaggagaagcaacttgaacatctttcaatacattgggaaagcaggcctccatggttcacaggtggtaattgaggctcagggcctggaggcgcttattgcggcgactccagacgagggcgaggaaaatctggactcctatgctggtatgagcgctattctgtttgatgtgcagctacgccccgttacatttttcaatggatatagcgacctcatgtccaagatgctgtccgcctccggcgacccaattagtgtcgttaaggggctgattctcttgattgaccatagtcaagaattgcagctacaatctggcctgaaggcgaacatcgaagtacaaggcggactggcaatcgacatctcgggcgccatggagttttccctgtggtaccgcgaaagcaagacgcgagtgaagaatagagtgaccgtcgtgatcacaactgacattactgttgacagctcctttgtaaaggcgggtctggaaaccagtactgagaccgaggccggcctggaatttatttccacagtacagttctcgcagtacccattcctggtgtgcatgcagatggacaaagacgaggcgccattccgccaattcgagaagaagtatgagaggcttagcactggtcggggatatgtgtcacagaagcggaaggagagtgtactggctggctgcgaattcccactgcaccaggaaaactctgaaatgtgtaaggttgtattcgcaccccagcctgattccaccagcagtggctggttc

SEQ ID NO: 5533 - DNA, 2682 bp, Artificial Sequence
  derived and/or modified sequence
atgatactgttagcagtgttatttctttgcttcatatcatcatattccgcaagtgttaagggacacacgaccggattatctctcaacaacgaccggttgtacaagctgacatactcaacagaagtcctgctggacaggggcaaaggaaagctgcaagattcggtcggctaccgcatcagcagcaatgtagatgtggccctcctctggagaaaccccgatggggacgacgaccagctcatacagattactatgaaagatgtgaatgtagaaaacgtgaaccagcaacgcggggagaaaagtattttcaagggcaagagtccaagtaagataatgggcaaggagaacctggaggctctacagcgtcctaccctgctccacctcattcatggaaaggtaaaagagttttacagctaccagaatgaggcagtagccatagagaatatcaagagaggtcttgcttctctattccagacccagctcagtagcggcacgaccaatgaagtagatatttccggaaactgtaaagtgacctaccaggctcatcaggacaaagtaattaagatcaaggctctcgactcctgtaagatcgctaggtctggttttacgacacccaatcaagttctaggtgtcagcagtaaggctacatctgttaccacatacaagattgaggattccttcgtgatagccgtcctggcagaagaaacgcacaatttcggcttgaactttctgcagacaattaaggggaaaatcgtgtccaaacagaaactcgagctgaagaccacagaagctgggcctcgcttgatgtccggaaagcaggcggctgcaattataaaggcggtagactccaaatacaccgctataccgatagtgggccaggtgttccaaagccactgcaagggttgccccagcctgagtgagctctggaggagcacccgaaaatatctgcagccggacaacctctctaaagctgaggccgttaggaattttctcgccttcatccaacatctccgaacagcaaaaaaggaagaaattttgcagatccttaagatggaaaataaagaagtgctgccacaactcgtcgacgccgtaactagtgcacaaacctccgactcactggaggcaatcctggacttcctggacttcaagtctgactcctccatcatcctgcaggagcggttcctttatgcctgtggatttgccagccaccccaacgaagaactgctgcgagcgttaatcagcaaattcaaaggttccatcggcagctccgatattcgggaaaccgtgatgattatcactgggaccctcgtcagaaagctttgccagaacgaagggtgtaaattgaaggctgttgtcgaagcaaaaaagctgatccttgggggactcgagaaggcagagaagaaagaggatactcgaatgtaccttctcgctctcaaaaacgcccttcttccggaaggtatcccttcattgttgaagtatgccgaagcaggggagggcccaatttctcatctcgccactaccgcgctgcaacgatacgatctcccattcatcacagatgaggtgaagaagacactgaataggatctaccatcagaatcgtaaagtgcatgagaagactgtgcgcaccgcggccgccgccataatccttaacaataaccctagttacatggatgtgaagaacatcttgctctccatcggcgaactgccccaggaaatgaacaagtatatgctggccatcgtgcaggatattctaaggtttgagatgcctgcctcaaagatcgtgcgaagggtgttgaaggagatggtggcccataactatgaccgattctccaggagtggcagctcctccgcatacaccggttacatcgaacgcagtcctcgatctgctagtacgtactcccttgacattttatattccgggtcagggatcttgaggaggtccaacctgaacatcttccagtatatcggcaaggcaggactccacggatctcaggtggtgattgaggcccaaggccttgaggccctgatagcagccacaccagatgagggggaggagaacctggatagttacgccggcatgagcgccatcctattcgacgttcaactacgaccggtaaccttcttcaatgggtattctgatctgatgtcaaaaatgttgtccgcctctggcgatccgatcagtgttgtcaaaggtttgatacttctgattgatcattcccaggagctgcagttgcagtctgggctgaaagcgaatattgaggtacaggggggattggctattgatatatccggagctatggagttttccctctggtatcgggaaagtaagaccagagttaagaatcgcgtgaccgtcgtgattactaccgacataacagtagattcttcttttgtcaaggccgggttggaaactagtaccgaaacagaagcagggttagagttcattagcaccgttcagttttctcagtacccttttttggtgtgtatgcagatggataaggacgaggcgccttttagacagttcgagaaaaaatacgaacggcttagcactggcagaggttacgtgtcccaaaagagaaaggaaagtgtcctagccggctgtgagtttcccctgcaccaggagaacagtgaaatgtgcaaggtcgtcttcgcgccccagcccgactccacatccagtggctggttt

SEQ ID NO: 5534 - DNA, 2682 bp, Artificial Sequence
  derived and/or modified sequence
atgatcctcttagcagtgctgtttctgtgcttcatctcgtcctactcagcaagcgttaaggggcacaccaccggcttgagcctgaataatgacagactttacaaactcacatattctaccgaagtccttctcgacaggggaaaaggcaagttacaggatagcgttggctaccgtatatctagtaatgtggatgtggctctcctatggaggaaccccgacggagacgacgaccagctgatccaaataacgatgaaagacgtcaacgttgagaacgtaaaccaacagaggggagaaaaatccatttttaagggtaagagccccagtaagatcatgggaaaagaaaatctggaggcattgcaaagacctaccctgctacacctgatacacggtaaagtcaaagaattttacagctaccagaacgaggctgtggcaattgaaaatattaagcgtgggctcgcctccttgtttcagactcagctttcctctggaactacgaacgaagtagatatatcagggaactgcaaagttacatatcaggcccaccaggacaaggtcatcaaaatcaaggctttggactcttgtaagatagcgcgttcgggcttcacaacaccaaatcaggtgctaggtgtctcctccaaggccacatccgttaccacgtataagattgaggattcctttgtcatagccgtactggctgaagaaacccataacttcggcttaaattttctacaaacgatcaagggaaaaatcgtgtctaagcagaaacttgaactcaagactaccgaggcaggaccacgcctgatgagtggcaaacaagcggcagctataattaaagcagtcgattcgaagtatacagcaatccccatcgtaggccaggtgttccagtctcattgcaaaggctgtcccagcctgtctgaactgtggagatctacccggaaatatcttcagcctgacaacctatccaaggcggaggcagtaagaaacttcctggcttttatccaacacctgaggacagcaaagaaagaggagattctgcagatcctaaaaatggagaataaggaagtgctgccacagctggtggacgctgtgacaagtgctcagacctccgatagcttggaggcgattttggattttctggatttcaaaagcgattcttctataatactgcaggagcgctttctgtacgcctgtggcttcgccagccatcccaacgaagaactcctcagagcgctgatttccaaatttaagggatctattggctcatccgatatcagagagacagtaatgattataacgggtaccctggttcggaaactttgtcagaacgagggctgtaaactcaaagcggtcgtggaagctaagaaactgattctcggcggcctggaaaaggccgaaaagaaggaagacactcgcatgtatctgctggcactgaaaaatgcgctcctgccggaagggattccctctctcttgaaatacgcggaagcaggcgaaggcccaatcagccacctagccacgactgccttacagagatacgacttgccatttattacggacgaggtgaagaaaacgttaaatcgcatctatcaccagaacaggaaagttcacgaaaagaccgtgcgtaccgctgcagcggcgattatattgaataataacccgtcttatatggacgttaagaacatcctgttaagcatcggagagttgccccaggagatgaacaaatatatgttagcaatagtgcaggatatccttcggttcgaaatgccagcctctaagatcgtgagacgggtcctcaaggagatggtggcccataattacgaccgattctccagatctggtagttcttcggcatacaccggatatatcgaacgctcccctaggagcgcaagcacctactctttagatatcctctactcggggagcggaattctgcgccgcagcaacctcaatatctttcagtatataggcaaagctggtttacacgggtctcaggtcgtgatagaggcacaggggctggaagcgctgattgcagccacaccagacgagggcgaggaaaacctggatagttacgcgggcatgagcgccattctgttcgatgtgcagctgcgccctgtaacgttcttcaatgggtacagcgacctgatgagcaaaatgctgagcgcatccggcgacccaatctctgttgtcaaagggctgatcctactgattgatcacagccaggaactacagttgcagtctggcctcaaagctaacattgaggtccagggaggactcgctatcgacatttccggcgcaatggagttctcgctatggtatagggagtctaagacaagggtgaaaaatcgtgtcaccgtcgtgattactacagatatcacggttgactcctcttttgtgaaagctgggcttgaaaccagtaccgagaccgaagctggcctggagtttatctccactgtacaatttagccagtacccgttcttggtctgcatgcagatggataaggacgaggccccttttaggcaatttgagaaaaagtacgagagactctctacaggacgcgggtacgtgtcacagaagcgcaaggagtccgtgctggccggctgcgaatttccactgcatcaagagaattcggaaatgtgcaaggtggtcttcgccccacagccagactccacaagtagtggctggttc

SEQ ID NO: 5535 - DNA, 2682 bp, Artificial Sequence
  derived and/or modified sequence
atgatccttttggccgtgctctttctctgcttcatcagcagctactccgctagcgtgaaaggccacactactggtctgtccctgaacaacgaccggctgtataagctgacatattccaccgaagtgctgctggacaggggcaagggaaagctgcaggattccgtggggtatcgtatatctagcaatgtggatgtggccctgctgtggagaaaccctgacggcgatgatgaccagctcatacaaatcactatgaaagacgtgaatgtcgagaatgtgaaccagcagagaggggaaaagagtattttcaagggtaaaagcccatccaagattatgggcaaggagaatctggaggccctgcagcggcccactttactgcacctaattcacggcaaggtgaaggagttctacagttaccagaatgaagccgtggccatagagaatattaaacgcggactggccagcctttttcagactcagctgtctagcggaaccactaacgaagttgacatatctggcaattgtaaggttacataccaggcacaccaggacaaggtgatcaagattaaagcactggacagttgcaagattgcccgatcaggctttaccacccccaaccaggtattaggggtgtcctctaaggccacatccgtgaccacctacaaaatagaggatagcttcgtgatcgcagttctggctgaggaaactcacaactttggcctgaatttcctgcagacaataaaaggtaaaatcgtatcaaaacagaagctcgagctgaagaccactgaggctggtcctcgtttaatgagcgggaaacaggccgccgccattattaaggctgtggactctaaatacacagccatacccattgtgggacaggttttccagagtcactgtaagggctgtccaagtcttagcgagctgtggaggtctactaggaaatatctgcaacccgataacctatcaaaagccgaggcagtgcgtaacttcttagcattcatccaacatctaaggaccgccaaaaaagaggagatcctccagattctaaagatggaaaataaagaagtactgccccagctagtggatgccgtgacctctgctcagacctccgattccttggaagccattcttgactttctggactttaaatcagactcaagcataatactgcaagaacgatttttatatgcatgtggcttcgcatctcatcctaacgaagagcttttacgggctctcatttctaagttcaagggcagtataggaagtagcgacatcagagaaactgtcatgatcattaccggcaccctggtgcgtaagctgtgtcagaatgagggctgtaagctgaaagcagtcgtggaggcaaagaaactgatcctgggcgggcttgagaaggctgaaaaaaaggaggacacccggatgtacttattagccctgaaaaatgccctactgccagagggaatcccaagcctgctaaaatacgccgaggcaggggaaggtcctataagtcatcttgccacaactgcactgcagcgttatgacctgccattcatcaccgacgaagtgaagaagactctgaataggatataccaccagaatcggaaagtgcacgagaaaaccgttcgcaccgcagctgctgctatcatcctcaataataatccttcttacatggatgtgaaaaatatacttctgagcataggtgagctgccccaggagatgaacaagtatatgctcgccatcgtacaagatattctccggtttgagatgccagcttctaagatagtgagaagagttttgaaagaaatggtcgcccataattacgaccggttctctagatcagggtcttctagcgcctataccggctacatagagaggagcccacggtctgcttctacctactcactcgacatcctatactccggaagtggcattttacggcgcagcaacttaaacattttccagtatataggaaaggccggcctacatggcagccaggtcgtgattgaagctcagggcctcgaggccctcattgctgctaccccggacgaaggagaggagaacctggattcctatgcaggaatgagcgcaatcctgtttgacgtgcagctgcggccagtcacattcttcaatggatattccgatctgatgagtaagatgctgagtgcttctggagatcctatttccgtggtgaagggcctcatcctcctcattgatcacagtcaagagttacagctgcagagtggattaaaagctaacatcgaagtccagggcggccttgccatagatatctctggtgcaatggagttctctctatggtatcgcgaaagtaagacacgggtcaaaaatcgggtcaccgttgtgataaccactgatatcactgtggacagctcctttgttaaagcaggcttagaaacttccactgagaccgaagccgggctagaatttataagtactgttcagttctcccaatacccatttctggtctgcatgcagatggataaagatgaggcccccttccggcaattcgagaagaagtacgagcgtttgagcaccggccgcggctatgtctctcaaaaaaggaaggaatccgtgctcgctggttgtgaatttccactgcaccaggaaaatagcgagatgtgcaaggtggtgttcgcaccccagccagacagtactagttctggatggttt

SEQ ID NO: 5536 - DNA, 2682 bp, Artificial Sequence
  derived and/or modified sequence
atgatcctgctcgcagtcctcttcctctgtttcatcagttcctatagtgcctctgtaaagggacacactacaggactctccctcaataatgatcggttatacaaactgacatattcaactgaggttctcctcgatcgcgggaaagggaaattgcaggatagtgtggggtaccgaatttcttctaacgtagatgtggcattgctttggcggaatcctgacggggatgatgatcagcttatccagatcactatgaaagatgtcaatgttgagaatgtgaatcagcagcgaggagaaaaatctatatttaaagggaagagtccatcaaagatcatgggaaaagaaaaccttgaagctcttcagcggcctactttactgcatctgatacacggaaaagtgaaggaattctacagttatcagaacgaggccgtggccatcgaaaacattaaaaggggactagcctctctcttccagacacagttatcctctgggactactaacgaagtggatatatcagggaactgtaaagtgacttatcaagcccaccaggataaagttattaagatcaaagccttagattcgtgcaaaatcgcacgctctgggtttacaacaccaaatcaggtactgggggtaagttctaaagcaacatctgtgacaacgtataaaatcgaagattcttttgttatagctgtattagctgaagaaactcacaatttcgggctcaatttcctccagacaatcaaaggaaaaattgtttctaaacagaaactcgaactaaaaactacagaggccggaccccgattgatgagtgggaagcaagccgctgctattattaaagccgtggatagtaaatatacagctataccaatagtagggcaggttttccaatcccactgtaaagggtgtccatctctctctgagctttggaggtctactagaaaatatctgcagcccgataacctgtccaaagccgaagctgtgagaaattttctcgccttcatacagcacctgagaacagctaaaaaagaagaaatactccagatcctcaaaatggaaaacaaggaagtactcccacagctggtagatgccgttacatcagcccagactagtgattccctcgaagcgatactcgatttcctcgatttcaaatccgattcaagtatcatactgcaggagcggttcctctacgcatgcgggtttgcatcccaccccaacgaagaattgctacgagctctcatctcaaaattcaaagggtctatcggatccagtgatatacgcgaaactgtgatgatcataacagggactttagtgcggaaactctgtcaaaatgaaggatgtaaactgaaggccgtcgtggaagccaaaaagctaattctcggggggttggagaaagccgaaaaaaaagaagatactcggatgtatctacttgccctaaagaacgctctcctcccagaagggatcccaagtctgctgaaatacgccgaagcaggagaagggccaatcagtcatctggctactacagcattgcagaggtatgatctcccctttattactgatgaggtgaagaaaactcttaaccggatataccaccaaaaccgcaaagtgcacgaaaagacagtgagaacagcagccgccgctatcatcctcaataataatcccagttatatggatgtcaaaaatatacttttgagtatcggggaactgccccaggaaatgaacaaatacatgttagcgatcgtccaggatatccttcggttcgaaatgcccgcatcaaaaatagtgagaagagttctaaaagaaatggttgcacataactatgatcgattttcccggtctgggtcttcatctgcctatactgggtacattgaacgctcaccaagatcggccagtacttactctcttgacatcctctattctgggagtggaatactcaggaggtctaacctgaatatctttcagtatatagggaaggccggactgcacggatcccaggtggtcatcgaagctcaggggcttgaagccctcatagccgcaactccagacgaaggagaagaaaatctagactcatacgctgggatgagtgctatcctctttgatgttcagctccgccctgtaacttttttcaatggatattcggatctaatgtccaagatgctctcagcatcaggagatcccatcagtgtcgtgaaagggcttatcctgctgattgaccacagtcaggaactgcagctccagtctggacttaaagctaatattgaagttcaggggggattggcaattgacatatcaggggccatggaattcagtttgtggtaccgggagtctaaaactagggtaaaaaatcgggtgacagtcgtcatcacaacagatatcactgtggattcatctttcgtgaaagctggactcgaaacttccactgaaacagaagccggactcgaattcatatccactgtacagttttcacagtatcccttccttgtgtgtatgcagatggataaagatgaagcccctttccggcagtttgaaaagaaatacgaaaggttatctacagggcggggatacgttagtcagaaacgcaaagaatcagtactcgccgggtgtgagttccccctccaccaggaaaacagtgaaatgtgcaaggtagtctttgccccccagcccgattcgacaagttctgggtggttc

SEQ ID NO: 5537 - DNA, 2682 bp, Artificial Sequence
  derived and/or modified sequence
atgatactcctggcggttcttttcctgtgcttcatctcatcttactccgccagcgtcaaaggccacacgactggattaagtcttaataatgacagactctataagctcacctattcaactgaggtcctgctggacagaggtaagggcaaactgcaggattccgtgggctataggatcagctctaacgtcgatgtggctcttctgtggcgtaacccagatggcgatgacgaccagctaatccagatcaccatgaaagatgtcaatgtcgagaacgtcaatcagcagcgcggggaaaagagtatctttaagggaaaatcgcccagcaaaatcatggggaaagagaatcttgaggccctgcagagacctaccttgctgcatcttatccatggaaaagtgaaggagttttacagttatcagaacgaggccgtcgcaattgagaacataaaacgtgggctcgcatctctatttcagacgcaactaagtagcgggaccacgaacgaagtcgacataagcgggaactgcaaggtaacatatcaggcacaccaagataaagtcataaagatcaaagccttggattcatgcaaaattgcccgctccggctttactacccctaaccaggtgctgggggtgagctcaaaagcaacctctgtgactacatacaagattgaggactctttcgtgattgcagtcttggcagaggaaacacacaactttggactcaactttctccagactattaagggcaaaatcgtgagtaagcaaaagctggagctcaagactaccgaggccggcccgcgcctgatgagcggaaagcaggctgctgctatcatcaaagccgttgacagtaagtatactgcaatccctatagtggggcaggtgtttcagtcgcactgcaaaggctgcccgtcactgtcagaattatggcgatcaacacggaagtatctccagccggataatttgtcaaaggctgaagctgtgcgtaattttctcgcgttcatccagcacctgcgaaccgcaaagaaagaggagattctgcagatcttaaagatggagaacaaagaagtgttgcctcagctcgtcgacgccgtgactagtgcacagacttcagacagcctggaagcgatcctagatttcctcgattttaagagcgactcctctattattctacaggaacgatttctgtacgcttgcggctttgcctcccaccccaatgaagaactgctgcgcgctctcatatccaaattcaaaggatccattggctcatctgatattcgagagactgtgatgattatcacgggaaccctcgtgcgcaaattatgccagaacgaaggatgcaaactgaaggctgtcgtggaggccaaaaagttgattctcggcggactggagaaggccgaaaagaaagaggacaccagaatgtatctgctggctttaaaaaatgcactgttaccagaaggaattccgtcgctgctgaagtatgctgaagccggagaaggccccatcagtcacctggccacaactgctctccagcggtatgatctcccatttatcaccgacgaggtgaaaaagacattaaaccgtatctatcaccaaaacaggaaagtccacgagaaaaccgtgagaactgctgcagctgctatcattctgaacaacaacccttcttacatggacgtgaagaacattttgctcagcatcggggagctgccccaggaaatgaataagtatatgctggccatcgtacaggacatactaaggttcgaaatgccagctagcaagatcgtacgtagggtgctaaaggaaatggtagctcataattatgatcggttctccaggagtggttcgagctctgcatatactggttacatagaaaggagccctagaagcgccagcacctactcacttgatatcctgtatagtggttctggcatccttaggagatctaatttaaacattttccaatatattggtaaagctggcttgcatgggtctcaggtggtgatcgaagcacagggactcgaagctctcatagcagctacaccagacgagggagaggagaatctggattcgtacgcggggatgtcagctattttgttcgatgtccagctcaggccagtcacctttttcaacggttattccgaccttatgtcgaagatgttgagtgctagcggcgacccaatttctgttgtcaaaggactgatactgttaatagatcacagccaggagttgcaactccagtctgggctcaaggctaacatcgaagtccagggaggtctggccatcgatatatctggggccatggaattctcactgtggtatcgtgagagcaagacgcgggtgaaaaatcgggtcaccgtggtgatcactacagatataactgtcgactccagcttcgtgaaggctggactcgagacttccaccgagactgaggccgggctggaatttatctctactgttcagttctcccagtatccatttttggtatgtatgcagatggacaaggacgaggccccattccgccagttcgaaaagaagtacgaacgcctttctactggaagggggtatgtctcccagaaacgaaaggaaagcgtgctcgctgggtgtgaatttcctctgcaccaggagaattccgagatgtgtaaggtagtgtttgctcctcagcccgattcaacctcatcaggctggttc

SEQ ID NO: 5538 - DNA, 2682 bp, Artificial Sequence
  derived and/or modified sequence
atgatcctgcttgccgtgctattcctctgtttcatttcatcctatagtgccagcgtcaagggtcataccaccggactgtctctcaacaacgatcgattatacaaactcacatacagcactgaggtgttgttggacagaggcaagggcaagcttcaggatagtgtgggctatcgtatctctagcaatgtggatgtagccctcctatggcgtaaccccgatggcgatgacgatcagctgattcagatcacgatgaaagatgtaaacgtggagaatgtaaatcagcagcggggtgagaaatcaatatttaaaggcaaatccccatctaaaattatgggtaaggagaatctagaagcactgcagaggcctactctgttacacctgattcatggaaaagtgaaagaattctacagctatcagaacgaagctgtagctatagagaacatcaaaagggggctggcctctctgttccagacccagctaagctcaggcactacaaacgaggtcgacatcagtgggaactgcaaagtgacctaccaggcccaccaggacaaggtgattaaaatcaaggcacttgactcttgtaagatcgcaaggtctggcttcaccactcctaatcaggtcctgggcgtctctagtaaggccaccagcgtcacaacatacaaaatcgaggactcttttgtgatcgccgtgttggcagaggaaacacataactttggtctcaattttttgcagacaattaagggcaagattgtcagcaagcaaaaactggagctcaagaccaccgaggccggaccacggctgatgtctgggaagcaggcggctgctattatcaaagctgtggattccaagtacaccgccattccgatcgtgggccaggtcttccagtctcattgtaagggctgtcctagcctgtccgaactgtggcgttcgaccagaaagtacctgcaaccggataacttaagcaaggcagaagcagttagaaattttcttgcatttattcagcacctgagaacggccaaaaaagaggaaatcttgcagattcttaaaatggagaataaagaagtactcccccaactagtcgatgccgtgactagcgctcaaaccagtgacagtctggaagcaatcctcgactttctggacttcaaatctgacagtagcatcatcctccaggagcgcttcctttacgcttgtgggttcgcctcccatcccaatgaagaactcctgcgggcgcttatcagcaaattcaaggggtctatcggctcctccgacattcgggagactgtgatgattataaccggcactcttgtgcgaaaactgtgccagaacgaggggtgcaagcttaaggccgtcgtggaggcaaaaaagcttatcctcggcgggctagaaaaggcagagaaaaaagaagatacccgtatgtatctcctagctctcaaaaatgctctgctgccagagggcatacccagcctgcttaagtatgctgaagccggagaagggcccatcagccatctcgccacgacggcgctccaacggtatgacctgccattcatcaccgatgaagtcaagaagacactgaaccggatctatcaccagaatcgcaaggtgcatgagaagacagtgcgaacggccgctgccgcgattatcttaaacaataaccccagctatatggacgttaagaacatactgctgtctatcggggaacttccccaggagatgaataagtatatgctggccatcgttcaggatattctccgctttgagatgccagctagtaaaatcgtgaggcgggtgctgaaagagatggtggcacacaactacgatcgattctcccgtagcggctcttcttctgcgtataccggttacattgagcgctcaccacggtcagctagcacttactcgctcgacatcctgtattcaggtagtggaatactgcgacgctccaacctcaacatttttcagtacatcgggaaggcaggcctgcacgggtcccaagtggtgattgaagcacagggactcgaggcactgatcgccgcgactccagatgaaggtgaggaaaacctagactcctacgcaggcatgagtgcaattctcttcgatgtccaactgaggcctgtcacgttcttcaacggttattctgacctgatgtcgaaaatgttgtccgcgtccggcgacccaatttctgtggtcaagggcctcatccttctgatcgaccactctcaggagctgcagctgcagagcggcctgaaggcgaatatcgaggtgcaggggggactagccattgacatcagcggcgccatggagttttcactatggtaccgagaatcaaagacaagagtcaaaaatcgggttacggtggtgatcacaacggatattacagtggactcgtcttttgtaaaagccggcctggaaacaagtaccgagacagaagctggcctggagtttatcagcactgtgcagttctcacagtacccctttctggtttgtatgcagatggacaaggatgaagccccttttcgccagttcgagaaaaaatacgaaagattgtctaccggccgcggatatgtcagccagaaacgcaaggagtcagtactggcgggctgtgagtttcccctccatcaagagaacagtgagatgtgcaaggtcgttttcgcacctcagccggactccacatcttccggctggttc

SEQ ID NO: 5539 - DNA, 2682 bp, Artificial Sequence
  derived and/or modified sequence
atgatactcctggccgtcttgttcctctgcttcatcagttcttattctgcctcagttaagggtcacacaacaggcctctcacttaacaacgacagactgtacaagctgacttatagcaccgaggtgttgctcgacagaggcaaaggtaaactgcaggactctgtcggatacaggatcagtagtaacgtcgacgtggctctgctctggaggaaccctgatggtgacgacgaccagcttattcagatcactatgaaggatgtcaacgtcgagaacgtaaaccagcagcgcggtgagaaaagcatctttaagggaaaatctcctagtaaaataatgggtaaggagaatctggaggcactgcagagacctaccttgctccacttgatccatggtaaggtaaaagaattctactcctaccagaacgaagccgtagctattgaaaatatcaagaggggactcgcctccctgttccaaacccagctcagttctggaaccactaacgaggtagacatctcaggcaattgtaaggtgacataccaagctcaccaggataaggtgatcaaaatcaaggcactggatagctgtaaaattgctaggtccggcttcactactcctaatcaggtattgggagtttccagcaaggccacctcagtgactacttacaagattgaagactcttttgttatcgctgttcttgctgaggagacccataacttcggactgaacttccttcaaactatcaagggtaaaatcgtgtcaaagcaaaagctggagcttaagacaaccgaggctggacctcgcctcatgagtggtaagcaggctgcagcgatcatcaaggccgtggacagcaagtatacagctattccaatagtcggtcaagttttccagtcccattgtaagggttgcccaagcctgtctgagctgtggagatcaacaagaaagtacttgcagcccgacaacctttccaaggccgaagccgtgaggaatttccttgctttcatccagcacttgcgcaccgccaaaaaggaggaaatcctccaaatcttgaagatggagaacaaggaggtcctgccgcagttggtggatgcagtgacctctgcccagacgtctgattccttggaagctattcttgactttttggacttcaagagcgatagtagtattatcctgcaggagcgcttcctgtacgcctgcggtttcgcctcacatcctaacgaggaattgttgagagcccttatcagtaagttcaagggttcaattggctccagcgacatccgcgaaaccgtgatgatcatcacaggtacattggtgcgcaaactctgtcagaacgaaggatgcaagttgaaggcagtcgtcgaggcaaagaaactgatcttgggaggccttgaaaaggccgaaaaaaaggaagacaccaggatgtaccttttggccctgaaaaacgccctcctgcctgaaggaatccctagtctgcttaagtatgcggaagctggcgaaggccctatctctcatctggcaaccaccgctttgcagagatatgacctgccatttatcaccgatgaagtcaagaagacgctgaatcgcatataccaccaaaatagaaaagtgcacgaaaagacagtgcgcacagctgctgcggctattatcctcaacaataacccttcctacatggacgtaaagaacatcctgctcagcatcggcgagctgccacaagagatgaacaagtatatgcttgcaattgtgcaggacattctgaggttcgagatgccagcctccaagatcgtgagaagagtgctcaaggagatggtcgcgcacaactatgacaggttttcaaggtctggttcatcttcagcctacaccggttatatcgagaggtcccccagatcagcatcaacttacagcttggacattctgtactccggttctggtatcctgcgccgctcaaacctgaacatctttcagtacatcggcaaagcaggcctgcacggttcacaagtggtgattgaggcacagggcctggaggcgctgatcgcagctacccctgatgagggtgaagaaaacctcgatagctacgccggaatgtccgccatcctgtttgatgttcagctgcgcccggtgacattcttcaatggatacagcgacctgatgtctaagatgctctccgctagtggagaccctatcagcgtggtgaaaggactgatcctcttgattgatcactctcaggaactgcagctccaatcaggccttaaggcgaatatcgaggtccagggcggtttggcaatcgatatcagtggagctatggaattcagcctgtggtacagggagtccaagacccgcgtcaaaaacagggttaccgtcgtgattacgacagacatcacagtcgactccagcttcgtaaaagcaggcctcgaaactagtaccgaaacagaagctggcctggaatttatttcaacagttcagttcagccaatacccgtttctcgtatgtatgcagatggataaggacgaagcaccattccgccaatttgagaaaaaatacgagaggttgagtacgggacgcggttacgtctcccaaaaaagaaaagagtccgttctggccggatgtgagtttccattgcatcaggagaactcagaaatgtgcaaagtggtgtttgccccgcagcctgacagtaccagttctggctggttc

SEQ ID NO: 5540 - DNA, 2682 bp, Artificial Sequence
  derived and/or modified sequence
atgatcctgctggctgttctctttttgtgctttatatcatcgtactccgcttccgttaaggggcataccacaggtctgtccctgaataacgaccggctgtataagttgacttatagtacggaagtcctgttggatcgcggcaagggcaagctgcaagattccgttgggtacaggattagcagtaacgtcgacgtggctctcttgtggaggaacccagatggggacgatgaccaactgatccagattactatgaaagatgtcaatgtagagaacgtcaaccagcagcgaggggaaaaatcaattttcaaagggaaaagcccaagtaaaatcatgggcaaggagaatcttgaagctctgcagcggcccacattgctgcatctgatccatgggaaggtgaaagaattttacagctaccagaacgaggccgtggccatcgagaacattaaacgtggcttagcctcactcttccaaacgcagctgtcaagtggtacaacaaatgaagtcgacatctccggaaactgtaaggtgacttaccaagcccaccaggacaaggtaattaaaatcaaagcactcgattcttgtaagatcgcgcgtagcggattcaccacccccaatcaggttcttggagtgtcttccaaggcaacatctgtgaccacatacaaaatcgaagactcatttgtgattgccgttctggccgaagaaactcataacttcgggctcaactttctccagactatcaaaggcaaaattgtgagtaagcagaaattggagctgaaaaccaccgaagccggccccaggctgatgagcggtaaacaggctgctgccatcattaaagccgtggactccaagtataccgctattcccatagtaggtcaagtgttccagagccactgtaaaggctgcccaagcctcagcgagctgtggcgatctacccgcaagtatctccagccagacaacttaagcaaggctgaggcggtcagaaactttctggcctttatacaacacctgaggacagccaaaaaggaggaaattttgcagatcctgaagatggagaataaagaagtactccctcagctggttgacgctgtgacatccgctcagacctctgattccctcgaggctatactggattttctagatttcaaaagcgattcgtccattattttacaggagagattcctgtatgcctgcggctttgccagtcacccaaatgaggagctcctgcgggcgttgatttccaaatttaagggctccattgggtcctcggacatccgggagaccgtgatgattataaccggcactctggtccgcaagctgtgtcaaaatgagggttgtaaacttaaggcagtagtggaggctaaaaaactgatactcggtggcctggaaaaggcggaaaagaaggaagatactcggatgtacctgcttgccttgaagaatgccctcctgcctgagggcattccctcactgttgaaatacgctgaagcaggggagggcccaatcagtcatctagctaccaccgctttacagcgctacgacctgccattcattacagatgaggtgaaaaaaaccctcaatagaatctatcatcagaaccggaaagttcatgagaaaaccgttagaaccgcagccgccgctataattcttaacaataatccctcatatatggacgtcaaaaatattctcctctccataggtgagctgccacaggagatgaacaaatatatgctcgccatcgtccaagatatcctgaggtttgaaatgccagcatccaaaattgtccgcagagtacttaaggagatggtggcacataactatgacaggttcagcaggtcaggctcaagttcagcctacactggatacatagaaaggagcccccgcagcgcctctacttactcgctggatattctatacagtggaagtggcatcctcagaaggtctaacttgaacatttttcagtacattgggaaagccggactccacggatcgcaggtggttatcgaggcacaaggcctggaagcattaattgccgccactccagacgagggggaagagaacttagactcctatgccggtatgagtgcgatcctctttgacgtgcagttgaggcccgttaccttctttaatgggtacagcgacctcatgagcaaaatgttatctgcctctggggatcctatctctgtggttaagggtttgatcctcctgatcgaccatagccaggaactccagttgcagagtgggctgaaggctaatatcgaggtgcagggtgggttagccatcgatattagcggcgctatggagtttagcctctggtaccgtgaatcaaaaactagggtgaaaaaccgggtgaccgtagtcataactacagatattactgtggacagctctttcgtgaaagcaggcctggaaacctctacagagacagaagcaggactggaattcatctcaacagtgcagttctctcagtacccttttcttgtctgtatgcaaatggacaaggatgaggccccctttcgccagtttgaaaaaaaatacgagcggctgtccactggcagaggatatgtatcccagaaacggaaagaatccgtgctggccggctgcgagttccccctgcaccaagaaaacagcgagatgtgcaaagtagtgtttgcaccccagcccgattctacgtcgagtggctggttt

SEQ ID NO: 5541 - DNA, 2682 bp, Artificial Sequence
  derived and/or modified sequence
atgattctgctcgcggttctcttcctgtgttttatctcatcctacagcgctagcgtaaagggccacactacgggtttatctctgaataacgatcggttgtataagctgacgtactcaacagaggttctactagaccgaggcaaaggcaagctccaggatagtgtgggctataggatcagttccaatgtcgatgtggccttactgtggaggaatccggacggggacgacgatcagttgatccagatcaccatgaaggatgtcaacgttgaaaacgtaaaccagcagagaggcgagaagtccatctttaagggaaagtctccctctaagatcatgggaaaggaaaacctggaggcgttacagaggccaactttgctgcaccttatccatgggaaggttaaagagttttactcttaccaaaacgaggccgtagcaatcgagaacataaaaagaggcctcgccagcctgtttcagacccagctcagctcaggtacgactaacgaggtagacatttccgggaattgtaaagttacctatcaggctcatcaggataaggtgataaagatcaaggcactagactcatgtaagatcgcacggtcaggctttacaacccctaatcaagtcctgggagtgagttcaaaggcaactagtgtgacaacgtacaagatcgaggacagctttgtaatcgcggtcctggcggaggagacccataattttggattgaatttcttacagaccataaagggaaagatagtgagcaaacagaaattggagttaaaaactacggaggccgggcctcggttgatgtcgggaaagcaggccgccgcaatcattaaggccgttgacagtaaatatactgccatccctatagtgggccaggtattccagtcgcactgcaagggttgcccctctctcagtgagctctggcgctccacccgcaagtatctgcagcccgataacttgtcgaaggcagaagccgttaggaactttcttgcatttatccaacacttacgaactgcgaagaaggaagaaattcttcagatcctcaaaatggagaataaagaggtgttgccacagttggtggacgctgtaacatcagcacagaccagcgattccctcgaggcaatcctggacttccttgactttaaaagtgattcgagcattattctgcaggaacgttttttgtatgcatgtggttttgcttctcacccaaatgaggagcttcttcgggcactgataagcaaatttaaaggatcaattggatctagcgatatcagagagactgttatgatcatcaccgggaccctcgtacgaaaattgtgccagaacgaaggctgtaaactcaaggccgtagtggaagccaagaaactgatcctcggcggtcttgagaaagctgaaaaaaaggaagacaccaggatgtatctgcttgccctgaaaaacgcattgctgccagaaggaatccctagcctcctgaagtacgccgaggcaggggagggccctattagccatctcgctactactgccctgcagcgctacgatctaccatttataaccgatgaagttaagaaaaccctgaatcggatctaccaccaaaataggaaggtgcatgagaagacggtgcgaacagccgcagccgccatcattttgaataataatccttcttacatggacgtgaagaatatccttctctctatcggcgagctcccacaggagatgaataaatatatgctggcaatcgtgcaggacatacttcgttttgaaatgccagccagtaaaatcgtccgtagagtgttgaaggaaatggtcgcacacaattacgatagattctcacgttctgggtcctcgtccgcttacacgggctacattgaaagatctccacgctctgcttccacatattctctggatatcttgtactctgggagcggtatcctgcggagatcaaatcttaatatcttccaatatatcggcaaggccgggctgcacggctctcaggtggtcatcgaggctcaggggcttgaggccctaatcgctgccacacccgacgaaggcgaggaaaacctagattcctatgcggggatgagcgcaattctgttcgacgtgcagcttcggccagtgactttcttcaacggctactctgatctgatgagtaagatgctatctgctagcggtgaccccataagcgttgtaaaaggcctcatccttctgattgaccattcccaggagctgcaattgcagagcgggttgaaggccaacattgaggttcagggcggcctggctatcgatatctcaggtgccatggagttctcactatggtaccgggagtctaaaacccgggtgaaaaacagggtgacggtggtaatcacaaccgacatcaccgtggacagtagtttcgtcaaggccgggttggagacttctaccgaaaccgaggcaggacttgaattcatctcaaccgtgcagtttagccagtaccctttcctcgtctgtatgcagatggacaaggacgaggctcctttccgacagttcgagaaaaagtatgaaaggctgagcaccggcagggggtacgtctcccagaagcgcaaggaatcagtccttgctggctgtgagttcccccttcaccaggagaacagtgagatgtgtaaggtggtgttcgccccccagccagacagcacctcatctggctggttt

SEQ ID NO: 5542 - DNA, 2682 bp, Artificial Sequence
  derived and/or modified sequence
atgattctgttggctgtcctgtttctttgtttcatcagttcctattccgcctcagttaagggccacaccaccggccttagcctgaacaacgatcggctttacaagctgacatactctactgaagtcttgcttgataggggcaaaggaaagttgcaggattccgtagggtatcggatctcttccaatgtagacgttgccctgttgtggcggaaccccgacggcgacgacgatcagctcattcagatcactatgaaggatgtcaatgttgaaaacgtcaatcagcaaaggggagagaaaagtatctttaagggcaagtcaccttccaagatcatggggaaggagaatctcgaagcgctccagaggccaacgctgctgcatctgatccacggaaaggtgaaagagttttacagctaccagaacgaagcagtcgccattgagaacatcaaacggggactggccagtttgttccagactcagctctcttccggtacaaccaatgaggttgacatttctggcaactgcaaggtgacttatcaggcccaccaggataaagttatcaagatcaaggccctggactcctgcaaaatcgctcgctcagggttcacgacacccaaccaggtgctcggggtgagctccaaggcaacctcagtaaccacctacaagatagaagactcctttgttatcgctgtcctggccgaggagactcacaatttcggtcttaatttcctgcagaccatcaagggcaagatagtgagcaaacagaaactggaactgaagactaccgaggcaggtcctcgccttatgagcgggaagcaggcggccgctatcattaaggccgttgactctaagtacaccgccatccccatagtgggccaggtcttccagtcccattgtaaggggtgcccctctcttagcgagctctggagatccacgcggaaatatttgcagccagataacttgagtaaagccgaggctgtgagaaactttttggcgtttatccagcatctcaggacagccaagaaggaagaaatactccagatccttaaaatggagaataaggaggtgcttccccagctcgtcgacgctgtcaccagcgctcagacatccgattcccttgaggcaatactggatttccttgacttcaagtcagatagcagcattatcctgcaggaacgcttcctgtatgcatgcgggtttgcttcccacccaaacgaggagctgctgagagccctgatctctaaattcaagggaagtatcggctcttctgacatcagggagacagtgatgattatcactggaaccctggtgcggaagctgtgtcagaacgagggttgtaagctgaaagctgttgtcgaggccaagaagctgatactcggtgggttggagaaggccgagaagaaagaggatactcggatgtaccttctcgccctcaaaaacgcactcctgcctgagggcatcccctcactcctcaaatacgctgaggccggcgaggggccgatcagtcatctcgccaccacggctttgcagcggtacgatctcccctttatcactgacgaggttaaaaaaaccctcaatagaatctatcaccagaaccggaaagtgcatgaaaagaccgtgagaactgctgccgcggctataatcctcaacaacaatcctagttacatggatgtcaaaaacattctgctgtctattggagaactgccacaggagatgaataagtatatgctggctatcgtgcaagatattctcaggtttgagatgccagcttccaaaattgtgagaagggtactgaaggagatggtcgcacataactacgaccggttctctagatccggaagttccagtgcttatacagggtatattgaacgatctccacgctccgctagtacatattctctggacatcctgtattccggatctggaattctccggcggtccaacctgaatatattccagtacatcggaaaagcaggtctccatggctcccaggtcgtgatagaggcccagggtctggaggcactgattgcagctaccccagatgagggcgaggagaacttggacagttatgccggtatgtcagccattctcttcgacgtgcagcttcggccggtgacattcttcaacggctacagcgacttgatgagcaaaatgctctcagcgtccggcgatcctatatccgtcgtgaaaggcttgattctcctgatcgatcatagtcaggaactgcagctgcagtcaggccttaaagctaacattgaggtacagggcggtctggcaatcgatatttctggagctatggaattcagtctgtggtaccgggaaagtaagactagagtgaagaacagggtgaccgtggttataacaactgatatcactgtcgacagctctttcgtgaaagctggcctggaaacgagcaccgagacagaggcaggtctcgagtttatcagcaccgtgcagttctctcagtacccgtttttggtctgtatgcagatggataaagacgaagcccccttccgccagttcgaaaagaagtacgagcggctcagcaccggacgggggtatgtctctcagaagagaaaggagtctgtccttgcaggctgtgaattcccgctgcatcaggagaattcagaaatgtgtaaagttgtgttcgcgcctcagcctgactctacctccagtggctggttc

SEQ ID NO: 5543 - DNA, 2682 bp, Artificial Sequence
  derived and/or modified sequence
atgattctactcgcggttctgttcctgtgctttatctccagttatagcgcgtcggtgaagggacatacaactggtctgagcctcaacaatgatcggctgtacaaactgacctatagcactgaagtccttcttgatcgcggcaaaggtaaattgcaagattccgtcggctaccgaatcagctctaacgtggatgtcgccctgctgtggcggaaccctgacggagacgacgaccagttgattcagatcaccatgaaggacgtgaacgtggagaacgtgaatcaacaacgcggggaaaaaagcatcttcaaggggaaaagccctagcaaaataatgggcaaggaaaacctggaggccctgcagagacctactctgctgcatttgattcacggaaaagtgaaggaattctactcttatcaaaatgaggccgtcgcaatcgaaaacataaagcgaggtctggcgagccttttccagacccagctgagttctggcactaccaacgaagttgacattagcggtaattgcaaggtcacgtatcaagcacaccaggataaagttatcaagatcaaagctctggacagctgtaagatcgctaggagcggattcaccaccccgaaccaggtcctgggcgtttctagcaaggcaacctctgtgacgacctataagattgaagacagcttcgtgattgcggtgctggcggaggaaactcataacttcggtctgaacttcctgcaaactattaagggcaagatcgtgagcaaacagaagctggaattaaaaactaccgaggcgggtccacgcttgatgagcggaaagcaagccgcagctatcatcaaggcggtggactcaaagtataccgctattcccatcgttggccaggttttccagagccactgcaagggctgtccaagcctgagtgagctgtggcgatcaactcgaaagtacctgcagccagacaatttgagtaaggccgaagcggtgcgcaattttctggctttcattcagcacctgcgcacagcaaaaaaggaggagatcctacaaatcctgaagatggagaataaggaggtcctgcctcaactcgtcgatgcggttacctctgcgcaaacgagcgacagcttggaggcaatcctggattttctggatttcaagagcgattcctcgattattctccaggagagatttctgtacgcctgcggttttgcttctcatccgaatgaggaattgctgcgcgcactgattagcaaatttaagggtagtataggctccagcgatattcgagaaacggttatgattatcactggcaccctggttcggaaattgtgtcagaatgaaggctgcaagctgaaagccgtggtggaggcgaagaaactcattcttggtggtctggaaaaggccgaaaagaaagaagacaccagaatgtacctgttggcccttaagaatgcgctgctccctgaaggcatcccgagcctgctgaaatacgcagaagcgggagaaggcccgattagccacttggccacgacggcactacagcgctacgatctgccattcattactgatgaggtaaagaaaactctgaatcgcatttaccatcagaaccgcaaggtgcacgaaaagacggtgcgcaccgcagctgcagccattatcttgaataacaatccttcttacatggacgtcaaaaacatcctcctgtctattggcgagctgccacaggaaatgaataaatacatgcttgcgatcgtgcaggacattctgcgcttcgaaatgccggccagcaagattgtgcgccgtgtgctgaaagaaatggttgcgcacaattatgatcggttttctcgatccggaagcagcagcgcttacacaggctacatcgaacgctctccacgcagcgcaagcacctattccctcgacattctctattctggtagcggcatcctgcgtcgctccaatctgaatattttccagtatatcggaaaggccggcctgcatggcagccaggtcgttatcgaggctcagggcctggaggcattgatcgccgctaccccagatgaaggagaggaaaatctggatagctacgcgggtatgtctgccatactgtttgacgtccagctacgcccggtgacttttttcaatggctattctgacctgatgagcaagatgctgtccgctagcggcgacccaattagcgtggttaagggccttatactgctgatcgaccactctcaagagctacagcttcagagcggacttaaagccaatattgaggtccaagggggactcgcgatcgacatcagcggtgctatggaattcagcctctggtaccgcgaaagcaagactcgcgtgaagaaccgcgtgacagtggtaattaccacggacattaccgtggactcctcctttgtcaaagcgggactggaaacctccaccgagaccgaagctggcttggagttcattagcacagtacagttttcacagtatccgttcctggtttgtatgcaaatggataaagatgaggccccttttcgccagttcgaaaagaagtacgaacgtctttccacgggtcgaggttatgtgagccagaaacgcaaagaatcagttttggcaggttgcgaattcccactgcaccaagagaactcagaaatgtgtaaggtggtcttcgctccacaaccagacagtaccagttctggatggttc

SEQ ID NO: 5544 - DNA, 2682 bp, Artificial Sequence
  derived and/or modified sequence
atgattcttctggcggtactctttttgtgcttcatcagctcctactctgcaagcgtgaaagggcacacaaccgggctaagcctcaacaacgatagattgtacaaacttacatactcaacagaagtgttattagaccgaggaaagggcaaactgcaggattcagtgggataccgcatctcatcaaacgtggatgtcgccctcctgtggcggaatcccgacggagatgatgatcagctaattcaaataaccatgaaggatgtcaacgtagaaaatgtgaaccagcaaagaggcgagaaatctatcttcaaaggcaaatctccaagtaagataatgggaaaggaaaacctggaggcattgcagcgaccgaccctgctccacctgatacatggcaaagtcaaagagttctactcttaccagaacgaagcagtggctatagagaacattaagagaggcctcgccagtctctttcagacccagctgagctccggcaccaccaacgaagtagacatttctggcaactgcaaggtgacataccaggcccatcaggacaaggtgattaaaatcaaggccctggactcttgtaagatagcacgatcagggttcactaccccgaaccaagtgctaggtgtttccagtaaggccacctccgtgaccacatataagattgaagactcttttgtgatagctgtactggcggaggagacacacaattttggactaaattttttgcagaccatcaaaggcaagattgtttccaagcaaaaactggagctcaaaacaaccgaggccggcccgcggttgatgagtggaaaacaagccgccgccattattaaagcggtggactcaaaatacactgcaattccaatcgtgggccaggtttttcagagccactgcaaagggtgcccgagtctcagtgaactgtggcgcagcacacggaagtaccttcagcccgataacctgagtaaagccgaagcagtgcggaactttctggcgttcattcaacacctaagaacagccaagaaggaggagattctccagatactgaaaatggagaacaaggaagtactgccacagctggttgacgctgtcacgtcagctcaaacatccgacagcttggaggcgattttagattttctggatttcaaaagtgactcttccattattcttcaggaaagatttttatatgcatgcggctttgcctctcatccaaacgaagaactgctaagggcgctgatcagtaagttcaaggggagcattggcagctcggatatcagagaaaccgtaatgattattaccggaaccttggtgaggaagctgtgtcaaaacgaaggatgcaagttaaaggcagtagtggaagccaagaaacttatccttgggggcctagagaaggcggaaaaaaaggaggacacacgcatgtatctgctcgcgctcaagaacgccctgctgccggaggggatcccgtctttgttgaagtacgcggaggctggcgagggacccatttcccacctggcaactaccgctttgcagcggtacgacctcccctttattactgacgaggtaaagaaaacgttgaataggatctaccatcaaaaccgtaaggttcacgaaaagactgtgaggactgctgccgccgctataatactcaataataatcctagctatatggatgtgaaaaacatcctgctaagtataggcgagctgcctcaggaaatgaacaaatacatgctcgctatcgtgcaggatatactaaggtttgaaatgcctgcctctaagatcgtgaggcgggttcttaaggaaatggtggcacacaattacgatagattttctcgaagtggatcgagctccgcttacaccgggtatattgagagatcgccacgctcagcttctacctacagtcttgatattctctatagcgggagcgggatacttcgtaggtcaaatctgaatatctttcagtatatcgggaaagccgggttgcacggttcccaagtggttatcgaagcccaaggattggaagcccttattgcagcaactcccgacgagggcgaggagaatttagattcatatgctggcatgtcggcaattctttttgacgtgcagctccgcccagttacatttttcaacggttactccgacctgatgtccaaaatgttaagcgccagcggagaccccatcagtgtggtgaaggggctgatcctgttgatcgatcattcccaggaactacagttgcagtccggacttaaggccaatatcgaggtgcaggggggcttagctattgacatctccggagccatggaattttctttgtggtatagagagagtaaaactagagtcaaaaatagagtcactgtggtgataaccaccgacataaccgtggactcgagtttcgtcaaggcaggactagagacgtcgaccgaaactgaagctgggttagagtttatcagcacagtacagttcagccagtacccatttctggtgtgcatgcaaatggataaggacgaggcgcctttcaggcagttcgagaagaaatacgaacggcttagcaccggacgcggttatgtgagccagaaacggaaagaaagcgttttagccgggtgtgagttccccctccaccaggaaaactcagagatgtgcaaggtggtgtttgctccccagccagactcgaccagtagcgggtggttt

SEQ ID NO: 5545 - DNA, 2682 bp, Artificial Sequence
  derived and/or modified sequence
atgattcttcttgcggtactgtttctgtgcttcattagctcctatagcgcttctgtcaagggccatactacaggtctaagcctcaacaacgatcggctgtataaactcacttattctacagaggttctgctcgaccggggaaaggggaaacttcaggactcagtgggttacaggatttcatctaatgtcgatgtcgcccttctctggcgaaacccagatggggacgacgaccagctcattcagattaccatgaaggatgtgaacgttgagaatgttaaccagcagcgaggggagaagagcattttcaaaggcaagagtccgagtaagatcatggggaaggaaaatctggaggccctgcagcggcccactctcctgcacctaatccacggcaaggtgaaggaattttattcttaccaaaatgaagctgttgccatcgaaaatattaagagaggactcgcttctctgtttcagacccaactctcatctggtaccactaatgaggttgacatatcaggaaattgtaaggtcacttaccaggcccatcaagataaagtaataaagattaaggcgttggacagttgtaagatcgctcggagtggcttcaccactcctaaccaggtgctcggcgtcagctcaaaagctacgagcgtaactacctacaagatcgaggatagtttcgtcattgccgtactggcagaggaaacccataattttggccttaatttcttgcaaacaattaagggaaaaatcgtgtcaaaacaaaagctcgaactgaagactacggaggcaggtccccgattgatgagcggcaagcaggccgctgctatcataaaagccgtcgacagcaaatacacagccatacccatcgtgggccaagtctttcagtcacactgtaaaggctgcccttctttgagcgaactctggcgttccacccgaaagtatctacagcccgataacctgagtaaggccgaagcggtgaggaacttcctggcatttatccaacaccttcgcacggcaaagaaagaagagatccttcaaattttgaagatggagaataaagaggtgctccctcagttagtggacgctgtgacaagtgcacaaacgtccgattcccttgaggccattttggatttcctggactttaaatccgatagctccataatcctccaggaacggttcctgtacgcttgcggtttcgctagtcaccctaatgaagagctcctaagggcattaatcagtaaattcaaagggagcatcggctccagcgacatcagggagacggtcatgataatcactgggaccttagttcgaaaattgtgtcaaaacgaagggtgcaagttgaaggccgtggtggaggccaagaagctgatcctgggaggactagagaaggctgagaagaaagaggataccaggatgtatctgttggccctcaaaaatgccctgctgccggaaggcataccttccctactcaagtatgccgaggctggagagggccctataagccacttggcgaccactgccctacaacgatacgatctccccttcataaccgatgaagtcaagaagactctcaatcgtatttatcatcaaaaccggaaagtgcacgagaaaacggttagaacggcagccgctgcaatcatactcaacaacaacccttcctatatggacgtcaaaaacatattgctgtctatcggggagctccctcaagagatgaataagtacatgttagccattgtgcaagacattctgagattcgaaatgcctgcaagtaaaatagtgaggcgcgttctgaaggagatggtggcccacaactacgaccgctttagtagatccggttcatcttcggcatacaccggctatattgagcgcagcccccgaagtgcttcgacatatagtctggacatcctgtacagcggctctggcattttgaggagatcaaatctgaatatttttcagtatatcggaaaggcaggccttcatggatcccaggtggtgattgaggcgcaaggactagaggccctaatcgccgcaactcctgatgaaggggaagaaaacctggacagctacgctggcatgtctgcaattctgttcgatgttcagctacgcccagtaacctttttcaacggctactcagacctaatgagtaagatgttgagtgcctctggcgaccccatcagcgttgtgaaagggctcatcctgctgatagaccatagccaagagctccagctccagtcaggattgaaggccaatatagaggttcagggggggctagctattgacattagtggcgcaatggaattctccctttggtaccgcgaatctaagactagagtgaagaacagagtaaccgtggtgataaccactgatatcaccgtggattcatcattcgttaaggcgggactggagaccagcacagagacggaggccggactggagttcatttccactgtgcagttcagccagtatccattccttgtctgcatgcagatggataaagacgaggcgccattcagacagtttgaaaagaagtacgagagacttagcacagggaggggttacgtaagccaaaaaagaaaggaatctgtgctggccggctgcgaatttcccctccaccaagaaaatagtgagatgtgcaaagtggtgtttgctcctcagcctgactctacttcaagcggctggttc

SEQ ID NO: 5546 - DNA, 2682 bp, Artificial Sequence
  derived and/or modified sequence
atgattctcctggctgtgttattcctgtgctttatttcatcttatagtgctagtgtgaagggacatactactgggctttccctcaacaacgatcggctctacaaactcacatactcaactgaggtgcttctagaccggggaaaagggaaactacaggacagtgtcgggtatcgcatctcatctaatgtggatgttgcactgctttggaggaacccagatggagatgacgatcagctcatccagataacaatgaaagatgtgaatgtggaaaacgttaaccagcagcggggggaaaaatcaatattcaaagggaaatctcctagtaagataatggggaaagaaaatctggaagccctacagaggcccactttgctacatctcatacacgggaaagtgaaagagttctattcttatcagaacgaagctgtggccatcgaaaatataaaacggggactcgcctctctgttccagacacagctttcttctgggacaactaatgaagtcgatatctcaggaaactgtaaagtgacatatcaggctcatcaggataaagttatcaaaataaaagccctcgattcttgcaaaatagcaagatccgggttcacgacacctaatcaagtgctaggggtatcttcaaaagctacttccgttacaacttataaaattgaggattcctttgtcatcgcggtcctcgctgaggaaacacataatttcggactcaactttttacagactatcaaagggaaaatcgtgtctaaacagaagttagaacttaaaacaacagaggcagggccaaggctcatgagtggaaaacaggcagctgctattatcaaagctgtggatagtaagtatactgctatcccaatcgtggggcaggtgtttcaatctcattgtaaggggtgtcccagtctcagtgaactgtggcggagtactagaaagtatcttcagccagataacctgtccaaagccgaagccgttagaaattttcttgcttttatccagcatttacgcacagccaaaaaggaagaaatcctgcaaatacttaaaatggaaaacaaagaagtgctccctcagttagtcgatgctgtcacatccgctcagacttccgattctctcgaggctatactcgattttctggattttaaatctgatagttccatcatcctgcaagaacgtttcctctatgcttgcgggtttgcttcacatcctaatgaggaactccttcgcgccctaataagtaaatttaagggatccatcgggtcttcggatatccgggaaacagttatgataattacagggactctcgtgcgaaagctttgccagaatgaaggatgtaaactcaaagcagtggttgaggctaaaaaactgattctgggggggctagaaaaggcagagaaaaaagaagacacacgcatgtatctcctcgctcttaaaaacgcacttctgcctgaaggaattccctcgctcttgaagtacgcagaggctggagaagggcctatatcgcaccttgctactacagctttacagcggtacgacctcccttttatcactgatgaagtaaaaaaaacactgaaccggatttaccaccagaacagaaaagtgcatgagaaaacagtgagaacagctgccgctgccataatactaaacaataatcccagttacatggatgtaaaaaacatcctgttaagtatcggggaactgccccaggaaatgaataagtatatgctagccattgtgcaggatatactcaggttcgaaatgccagctagtaaaattgtgaggcgagtgctaaaagagatggtggcacataattatgataggttttctcgctcaggatcctcttccgcatatacaggatacattgagcgttctcccagatcggcttcgacttacagtttggacatcctgtattccgggtccggaatccttaggcggagtaatctcaacatcttccagtacataggaaaggccggactacacgggtctcaggtggtgatagaagcccaaggactagaagcacttatagccgctacacctgatgaaggggaagaaaacctggattcctatgcaggaatgagtgccatactgtttgatgtacagttaagacctgttacatttttcaatgggtactcagacctcatgtccaaaatgctgagtgcctcaggagatcccataagtgtcgtgaaaggacttatactcctgatagatcatagtcaggaattacagctccagagtggactcaaagccaatattgaagtccagggagggcttgccattgatatctctggggcaatggaattctcactctggtatcgggaatctaagactcgtgtaaaaaacagggtgactgtggttattacaactgatatcacagtggatagttcttttgtgaaagccgggctcgaaacttccactgagactgaagccggactagaatttatctctacggtgcagttttcccagtacccctttctggtctgcatgcagatggataaggatgaagccccttttagacagtttgaaaagaaatacgagcggttgtcaactggacggggatacgtatctcagaaacggaaagaatccgttctcgcaggatgcgaattcccacttcaccaggagaattctgaaatgtgtaaagtggtttttgctccacaacctgattctacttcctccgggtggttt

SEQ ID NO: 5547 - DNA, 2682 bp, Artificial Sequence
  derived and/or modified sequence
atgattcttctggcagttctgtttttatgctttatcagcagttatagcgcatccgtgaaaggacacacaaccggcctgtccctcaacaacgacagattgtataaacttacctattcaaccgaagtgcttcttgacaggggcaagggcaaattgcaggactccgtgggctacaggatttctagcaacgtggacgtggctcttctatggaggaatcctgatggagacgatgaccagctgattcagatcaccatgaaagacgtgaacgtcgaaaacgtcaaccagcaaaggggggagaagagtatcttcaaaggcaaaagcccttctaagatcatgggaaaggaaaacttggaagcgttgcaaaggcctaccctgctgcacctgatccatggaaaagtcaaagagttctacagctatcaaaacgaggccgtggcgattgagaatataaagcgcgggctggcctcgctcttccagacccagctgtcttcagggacaacaaacgaagtggatattagcggaaactgtaaggtcacctatcaagctcaccaggacaaggtgatcaagatcaaagctctggattcgtgcaaaatcgcaagatctggattcaccacccctaatcaggtgctgggcgttagtagcaaagccacaagcgttacgacctacaaaatcgaagacagctttgtgatcgctgtccttgctgaggaaactcacaattttggcttgaacttccttcagacaatcaaaggaaagatcgttagcaaacaaaagctcgaattaaagaccaccgaggccggacctaggctgatgagtggcaaacaggccgcggctataataaaggctgtggatagtaaatacacagctatccctattgtcggccaggtttttcagtcacactgcaagggatgtccttctctgtctgaactgtggagatcaacaagaaagtatctgcagcctgataacttgtccaaggctgaagctgtccgcaatttcctggcattcatccaacacctaagaactgccaagaaagaagagatactccagatcctcaagatggaaaacaaggaggtgctaccgcaacttgtggatgctgtgacaagcgcacaaacgtcagacagccttgaagcaatcctggatttcctcgacttcaaatctgatagctccataatcctgcaagaaagatttttatatgcctgtggcttcgcttcccatcctaacgaagaactcctgagagccctcatatctaagttcaaggggtctatcggaagctcagacatcagagaaaccgttatgatcatcactggaacactggtcagaaaattatgccaaaacgagggatgcaagctgaaagccgtggttgaggccaaaaaactgatcctcggcggcctcgaaaaggctgagaagaaagaagataccaggatgtacttgttggctttgaaaaatgctcttctgcctgaaggcatcccttccctgcttaagtacgccgaggctggcgagggacctatctcccacttggctaccactgcgttgcagcgctatgacctgccttttatcaccgacgaggtcaagaagacactcaatcgcatttatcatcaaaataggaaggtgcacgagaagacagtgcgtacggctgcagctgctatcatactgaataataacccgagctacatggacgtcaagaacattctgctcagtatcggcgagctgccacaggagatgaacaagtacatgcttgccatcgtccaggacatcctgagattcgaaatgcccgctagcaaaattgtcaggcgtgtgctcaaggaaatggtggctcacaattacgataggttctcccgcagtggcagctcatctgcttacactggatacattgaaagatctcctagatctgcatccacatacagtctcgacatcttgtacagtggcagcgggatacttcggagatcaaatctgaacatctttcaatacattgggaaggccggactgcacggcagccaggttgtgatcgaggcccaaggactggaagcacttattgcggccacacccgacgagggggaagagaacctcgattcttacgctggcatgtctgctatcctgttcgatgtccaactccgaccagtcacatttttcaacgggtatagtgatcttatgagcaaaatgctcagtgccagcggggatcctataagcgtggtaaaaggcctgatccttctgattgatcacagccaagaacttcaattgcagtccgggttaaaagctaatatcgaggtccagggcggcttggcaatcgatataagcggggccatggagttcagcctctggtaccgcgagtctaaaaccagggtgaagaatagagtcactgttgttatcaccaccgatattactgtagacagcagcttcgtgaaggcagggcttgaaacgagcactgagaccgaggctggattggaattcataagcacagttcagttctcacaatatcccttccttgtttgcatgcaaatggacaaagatgaggctccttttcgccaatttgagaaaaaatacgaacggcttagtaccggccgcggatacgtgagccaaaaacgcaaagaaagtgttctggccggatgtgagtttccactccaccaggaaaactctgagatgtgtaaagtcgtattcgctccacagccagatagcactagcagtggctggttt

SEQ ID NO: 5548 - DNA, 2682 bp, Artificial Sequence
  derived and/or modified sequence
atgattctgctcgcggttctcttcttgtgctttatatcaagctatagcgcttcggtgaagggacacaccacgggtctgagcctgaataatgaccgactatacaaactgacgtattcaacagaggttctgctggatcgcgggaagggcaaactacaagatagcgttggctatcgcattagcagcaacgtggatgttgcattactgtggaggaaccccgatggggacgacgaccagctcattcaaattaccatgaaagacgttaatgtagaaaatgtaaatcaacaacgcggtgaaaagtccatctttaagggtaaatcgccatctaagataatggggaaagaaaatttggaggccctacagcggccaactctgctgcatttaatacacggaaaggtgaaagaattttatagctaccaaaacgaagctgtggctattgagaacatcaagcgcgggttggcttccctgtttcagacccagttgtcgagtggaactactaatgaggttgacatttctgggaattgcaaggtcacctatcaggcgcaccaggacaaagttatcaagattaaagctctcgatagttgtaagattgcccgatccggattcaccacgccgaatcaggtcctgggtgtgtctagcaaagctacaagtgtcacaacttacaaaatagaggattcctttgtgatcgcagttctggcagaggagacccacaactttggcctaaacttcctgcagacaattaaaggcaaaatcgtgtctaagcagaagctggagctgaagactaccgaggctggcccacggttgatgagcggcaagcaagccgctgccatcataaaagcagtggattcgaaatacacggccattccgatcgtgggacaggtgttccagtcccattgtaaaggttgtcccagcctatcagaactctggcggtctacacgtaaatacctccagcctgataatttgtccaaggctgaggcagtccgaaacttccttgctttcatccaacacttgaggactgccaagaaagaggaaattctgcagatcctgaaaatggaaaacaaggaagtccttccacaactcgttgacgcggtgacgtctgcccagacatcagatagccttgaggccatactggactttttggacttcaagagcgactcaagtatcatcctgcaggaaagattcctgtatgcttgcggttttgctagccatcccaatgaggagctcctacgggctctgatctctaagttcaagggctctattgggagctctgatataagggagaccgtaatgatcattactggtacactggttagaaagctgtgtcagaatgagggctgtaagctaaaagccgtggtcgaggcaaaaaagctgatactcggcggcctggagaaggccgaaaaaaaagaggacaccaggatgtacctgctggccctgaaaaacgctttgctgcccgagggaatacccagccttttaaaatacgcagaggcgggagagggcccaatctcccacttggctactaccgcgttgcagaggtacgacctgccatttatcaccgacgaggtcaaaaagacccttaaccgcatataccaccagaatcgaaaagtgcatgaaaaaactgtgcggacagccgctgctgcaatcatcctcaacaataacccgagctatatggatgtgaagaacatcctcctatctatcggcgaactgccgcaggaaatgaataagtatatgcttgccattgtgcaggacatcctgcgatttgagatgccagcctccaaaattgtgaggcgagtgctgaaagagatggttgctcacaactatgatcgcttttctagaagtggatcatcctcagcatacacagggtatattgagcggtcaccccgctcagcatccacctatagcctcgacatactctacagtggctctggcatcttgaggcgtagcaacctcaatattttccaatatattggaaaagcgggactgcacggcagtcaggtagtcatcgaagcacaggggctggaggcacttattgccgcaacccctgacgaaggagaggaaaatctggactcttacgcaggcatgtcggcgattctcttcgatgttcagctccgtccagttactttcttcaatggttatagcgatcttatgagtaaaatgctctccgcatcgggagaccctattagtgtagtgaaaggactcatcctactcatcgaccactcccaggagctgcaactgcagtcagggctgaaagctaacattgaggtccaggggggactggctatagatattagtggcgctatggagttcagcctctggtaccgcgagagtaagactagagtcaaaaatcgggtcacagtagtgatcacaactgatattaccgtcgacagttccttcgtgaaggcgggcctggagacatctacagaaactgaagccggcttagaattcatcagcacagttcagttcagccagtacccctttttggtttgtatgcaaatggacaaggacgaggccccatttcgccaatttgaaaaaaaatatgagagactctcaactggaagaggctatgtgagccagaagaggaaggaatccgtcctggccggttgcgaatttccattacaccaagaaaattctgagatgtgcaaggtcgtcttcgctcctcagcctgacagcacttcaagcgggtggttc

SEQ ID NO: 5549 - DNA, 2682 bp, Artificial Sequence
  derived and/or modified sequence
atgatcctgctggctgtattgttcctttgtttcatttcttcatactcagcatctgtaaaaggtcacacaaccggcctgtccctcaacaacgaccgtttgtacaagctgacatactctactgaagtactccttgaccgcggcaagggtaagctccaagattcagtgggctatagaatatcctctaacgtcgacgtcgccctcctctggaggaacccagacggtgatgacgatcagttgattcaaatcaccatgaaggacgtcaatgttgagaacgtaaaccaacaaaggggtgaaaaatccatcttcaaaggcaaaagtccttcaaaaatcatgggcaaagagaacctcgaggccctgcaaaggcccaccctgctgcatctgatccatggaaaggtgaaggaattctacagttaccagaacgaggccgttgccattgagaatattaagagaggactcgcaagcctctttcaaactcaacttagtagcggcactaccaacgaagtggatatttctggaaactgcaaggtgacctaccaagcacatcaagataaggtcatcaagatcaaagctctggattcttgcaaaatcgccaggagcggattcaccacccccaatcaagtcttgggtgtaagctccaaggctacaagcgtcacaacatataagattgaggactctttcgtgatcgccgtgctcgccgaggagacacacaacttcggactgaatttcctgcagacaatcaagggtaagattgtctctaagcaaaagctcgagctgaagaccaccgaggctggcccacgcctcatgtctggcaagcaggcagcagctatcattaaggctgtggactctaagtatactgccatcccaatcgtgggccaagtttttcaatcccactgtaaaggatgcccctcactctccgaattgtggcgctccactcgtaaatacctccaaccagataacctttccaaggctgaagctgtccgcaactttttggccttcattcagcacttgaggactgccaagaaggaggagatcctccaaatattgaagatggaaaacaaggaggtcctgccacagcttgtcgacgctgttacctccgctcaaacttctgactctttggaagcaatacttgacttcttggattttaaatccgacagttccattatactgcaagagagattcctgtatgcctgcggtttcgcttcccacccaaacgaggagctgctgcgtgccctgatttctaagttcaaaggtagtataggatctagcgacatcagagaaaccgtgatgataatcacaggaacacttgtaaggaagctttgccagaacgaaggttgcaagctgaaggctgtggtagaggctaagaagctgattctgggtggtcttgagaaggctgagaagaaagaggatactcgcatgtacttgctggcattgaagaacgctcttctgcctgagggaattccctcattgctgaaatatgctgaagctggagagggtcccattagccatttggccactactgcccttcagagatacgacctcccatttataacagatgaagtaaaaaagacattgaacaggatctaccaccagaaccgcaaggtacacgaaaagacagtgcgcacagccgctgcagctatcatactcaacaacaacccctcatacatggatgtcaagaacattttgctctctattggagagctgccccaggagatgaacaaatatatgctggctatcgtgcaagacatcctccgctttgaaatgcctgctagtaagatcgtacgcagggttcttaaagagatggttgcccataactacgaccgtttctcccgttctggcagctcaagtgcctacactggctacattgagcgcagccctaggtccgccagcacttactccctggacatattgtactccggcagtggaatccttcgccgtagtaatctcaacatatttcaatacataggcaaggccggcctgcacggctcccaagtcgtcatcgaggcccagggacttgaggctcttatagcagccacaccagacgagggtgaagagaacctggactcatatgccggtatgtctgctattctcttcgacgttcagctgagaccagtcaccttctttaatggctattccgatcttatgagcaaaatgttgtcagctagtggtgacccaatatccgtggttaagggcttgatcctccttattgatcactcccaggagcttcagctgcaatcaggcctgaaggcaaatatagaagtccagggcggcttggcaatcgatatcagtggtgccatggagttttccctctggtatcgcgagtctaagaccagagtaaaaaaccgcgtgaccgtggttataactactgatatcaccgttgactcttctttcgtgaaagcaggcttggaaacatctacagaaaccgaggctggcctcgagttcatttccactgttcagtttagtcaatacccctttctcgtatgcatgcagatggacaaggacgaggctccttttcgtcaattcgagaagaagtatgaaagattgtccacaggacgtggctacgtctctcagaagaggaaggagtcagtcctggcaggttgcgaattccctttgcaccaggagaattccgaaatgtgtaaagtagtgttcgctccacagcctgattctactagctcaggatggttc

SEQ ID NO: 5550 - DNA, 2682 bp, Artificial Sequence
  derived and/or modified sequence
atgatactgctcgctgtgctgttcctctgctttattagtagttattcagccagcgtgaagggtcacacgaccggtctgagcctgaacaatgatcggctttacaagctcacctactctacagaagtacttctggaccgaggtaaggggaagcttcaagattcggtggggtaccgaatttcgtcaaacgtagacgtggctctcttgtggcggaacccggatggagacgacgaccaactgatccaaataactatgaaagatgtgaacgtcgagaatgtaaaccagcaaaggggcgagaaatcaattttcaaaggcaagtctcccagcaagattatgggaaaggagaatcttgaagctctccaacggcccactttgctgcacctaatccatgggaaagtgaaggaattctactcttaccagaatgaagccgttgcaatcgaaaatattaaacggggcctagcttccctgtttcaaacccagctcagttcaggcaccacaaatgaagtagatatttccgggaattgcaaggtgacctatcaggcacaccaggataaagtcatcaaaataaaggctttggactcctgtaagatcgcacgctcaggcttcacgactcccaaccaggtgcttggtgtcagcagcaaagcgaccagtgtgactacctataagattgaagactccttcgtcatcgcagtgttggccgaggaaacacataacttcgggttgaactttcttcagaccataaagggaaaaatcgtcagcaaacaaaaattagagctcaaaaccaccgaagctggcccaaggctcatgagcggtaaacaagcggcagctatcataaaagccgtggattcaaaatacacagctatccccatcgtggggcaggtgttccagagtcactgcaaaggatgtccctctctgagcgaactgtggaggtctacgcggaagtacctccagccagacaatctctccaaggctgaagccgtccgtaactttttggcctttatacagcacctacgaacggccaaaaaggaggaaattttgcagatcctgaaaatggagaataaagaggtgctgccgcagctagtggacgccgttacgtcagcccagactagtgattctctggaggctatcttggactttctcgacttcaaatccgatagcagcataatccttcaggagcgtttcctttatgcatgcggcttcgcatctcaccctaatgaagaactgttacgcgccctcatcagtaagttcaaaggttcaattggctcctctgacataagggagaccgtgatgatcataactggaacactcgtgcggaagttgtgccaaaacgagggctgcaagctgaaggccgtagtggaagctaagaagctgattttaggcggcctcgaaaaggccgaaaagaaagaagatactcgaatgtatttactggcactgaaaaacgctctgttgcccgagggcattccatctctgcttaaatacgcagaagccggagagggacctatctctcatctcgccactacagctctccagaggtacgatctcccatttattaccgacgaggtgaaaaagaccttaaacagaatctatcaccagaatcgcaaagttcacgaaaagacagtgagaaccgccgctgccgcgattatcctgaataataacccctcttacatggacgttaagaacattctgcttagcattggtgagctgccacaggagatgaacaagtacatgctggccatcgtgcaggacatcctcaggttcgagatgccggcgtcgaagatagtgagacgtgtgctgaaggagatggtggcgcacaactacgaccggttctcacgctcaggctctagctccgcatacaccggatatatcgagagatcacccaggagcgccagtacatactcactggatatattgtactctggaagcggtatccttcggcgcagcaatctcaacatctttcaatacattggcaaggccggactgcacggctctcaggtagtaatagaggcgcagggcttggaagcgctgattgctgcaacccccgatgagggggaggagaatctggattcctacgctggcatgtctgccattctgtttgatgtgcagctcagaccagtgacatttttcaatggctactccgatcttatgtctaagatgctgagcgcatctggtgatcctatcagcgtggtgaagggactgatactcctgatcgaccactctcaggagcttcagttgcagtcaggcctcaaggcaaacatcgaagtacagggcgggcttgcaatcgacatcagcggtgccatggagttctccctctggtaccgtgaatctaagacacgcgttaagaatcgcgtgacagtggttattacaacagacattaccgttgacagctcctttgtgaaggcaggcttggagacatccaccgaaacagaggcggggctggagtttatatctactgtccagttctcccagtatccgttccttgtatgtatgcaaatggataaagacgaggccccctttcggcagtttgagaagaagtacgaaaggctttctactggtagagggtacgtatcccaaaagagaaaggagagtgtgctggctgggtgcgagttccctttacaccaggagaacagcgagatgtgtaaggtggtgtttgccccacagccagattccactagttctggatggttt

SEQ ID NO: 5551 - DNA, 2682 bp, Artificial Sequence
  derived and/or modified sequence
atgatcctgctggcggtgctgtttctgtgctttatctcatcatactccgcgtcggtcaagggtcatactacgggattgtcgctgaacaatgaccgactctacaagctgacctattcgacggaagttttgctggatcgcgggaagggaaaactgcaagactccgtgggataccgcatttcctccaatgtcgacgtggccctcttgtggcggaatcctgatggagatgacgaccagctcatccagatcaccatgaaggacgtgaacgtggaaaacgtgaatcaacagcggggcgagaagtcgatcttcaaggggaagtcccctagcaaaatcatggggaaggagaacctggaggccctgcaacggccgacgcttctgcatctgatccacggaaaggtaaaagagttttactcgtatcagaatgaggccgtcgcgattgagaatatcaagcgcggacttgcatcactgttccagacccagctgtcgtccggtactaccaacgaggtcgacatctcaggcaattgcaaggtgacctaccaagcccaccaggacaaagttatcaagatcaaggccctcgactcctgcaaaatcgcgaggtctggattcaccacccctaaccaagtgttgggggtgtcgtccaaggcgactagcgtgactacttacaaaatcgaggactcctttgtgattgccgtgctggcggaagaaactcataactttggtttgaacttcctgcaaaccatcaagggaaagattgtctccaagcagaagctggaactcaaaactaccgaagctggaccgcgccttatgtcaggtaagcaggcagccgccattatcaaagctgtggactcgaagtacactgccatcccgatcgtcggtcaggtgttccagtcgcactgcaagggctgcccatccctgtccgaactctggaggtcgacccggaagtacctccagcctgataatctctcgaaggccgaagcggtgagaaacttccttgcgtttatccagcacctgagaaccgcaaagaaagaagagatcctgcagatcctgaagatggagaataaagaagtcctgccacagcttgtcgacgccgtgaccagcgctcagactagcgacagtctcgaagctatattggacttcctggatttcaaatcagatagcagcatcatccttcaggaaaggttcctgtacgcctgtggcttcgcctcacacccaaacgaagaactgcttcgcgccctgatctccaagttcaagggaagcatcggaagctcagacattcgggagactgtgatgataattactggcaccctggttcgcaagctgtgccaaaacgaagggtgtaagctgaaggcagtggtggaagccaagaagctgatcctgggcggcctcgagaaagccgaaaagaaggaagatactcgcatgtacctcctggctctgaagaacgccctgctcccggaaggaatcccgtcattgcttaaatacgccgaagcaggagaaggaccgatctcgcacctcgctaccaccgctctgcaaaggtacgacttgccctttatcactgatgaggtcaaaaagaccctcaaccggatctatcatcagaacagaaaagtccacgaaaagactgtgcgcactgctgcggccgcgatcatcctgaataacaacccgagctacatggacgtgaagaacatcctgctgtcaatcggagagcttccacaagaaatgaacaagtacatgctggcaatcgtccaggacattctcaggtttgagatgccggccagcaagatcgtgcggcgggtgctgaaggagatggtggcccacaactacgaccgattttcaagaagcggatcgtcgtcggcgtacacggggtacatcgagagatcgccgcgctctgcgagcacgtactccctggatatcctctactcgggtagcggcatcctcagaagatccaacctcaacatctttcaatacatcggaaaggcaggcttgcatggatcgcaagtggtcattgaggcgcaagggctcgaggcactcatcgcagcgaccccagatgaaggagaggagaatctcgactcttacgcaggcatgagcgcaatcctgttcgatgtccaactccggcccgtcactttcttcaatggatactccgatctcatgtcgaagatgttgtctgccagcggagatcccatcagcgtggtgaaaggactgattctgctgatcgaccattcacaggaactccagctgcagtcaggcctcaaggctaacattgaagtgcagggaggactggccatcgacatcagcggtgcaatggagttctccctttggtaccgtgaaagcaaaacccgcgtcaagaaccgcgtgaccgtggttattaccaccgatatcactgtcgactcgtcattcgtcaaggcggggctggaaacttcaactgaaaccgaggctggattggaattcatctccaccgtgcagttctcccaataccctttcctggtgtgcatgcagatggacaaagatgaggctccattcagacagttcgaaaagaaatacgaacggctgtcgactggccggggctacgtgtcccagaaacgcaaagagagtgtcctcgccggctgtgaattcccgctccaccaagagaattccgagatgtgcaaggtggtgttcgcaccacaaccggattcaacgtcgagcggatggttc

SEQ ID NO: 5552 - DNA, 2682 bp, Artificial Sequence
  derived and/or modified sequence
atgatactcctggctgtgctctttctctgcttcataagcagttatagcgcgagcgtgaagggccacacaaccggcctctccctgaataacgaccgcctctacaagctgacgtattctactgaagtcctcctggaccggggtaaaggcaagttgcaggacagcgtaggataccgaataagtagcaacgtggacgttgctctcctctggaggaatccagatggcgacgacgatcagttgattcagatcaccatgaaagatgtaaatgtggaaaatgtgaaccagcagcgaggagaaaaatctatttttaagggcaagtccccttctaagattatgggtaaagaaaatctggaggcactgcaaaggccaacactgctacacttaattcatggcaaggtaaaggagttttactcttatcagaatgaagccgttgcgatagagaacatcaagaggggcctggcgtccctgtttcaaacacagttgtcttctggcactacaaatgaggtggatatatcaggaaattgcaaggttacatatcaggcccaccaggataaggttattaagattaaggcattagatagctgcaagatagcaaggtctgggttcacaacaccaaaccaggttcttggggtctcttcaaaagctaccagtgttaccacatataagatagaagattcatttgtgatcgcagttttggccgaggagacccacaacttcggcctgaattttctacagactatcaaaggtaagattgttagcaagcaaaaacttgagctcaaaacaaccgaggctgggcctagactaatgtccgggaaacaggcagctgctatcataaaggccgtggatagcaagtacactgcaatccctattgtagggcaggtatttcagagtcattgcaagggatgccctagcctgtccgagctctggcgatctacccggaaatatttgcagcccgacaacctgagcaaagcagaggctgttcgaaactttcttgcttttatacaacacctgcggactgcgaagaaggaggagattctgcagatccttaagatggaaaacaaggaggtgcttccccagctggtggacgcagtgacatcagcccaaaccagtgactcactcgaggcaatactggacttcctggattttaaatccgacagctctataatcttacaggagaggtttctgtatgcttgcggctttgcaagccaccccaatgaggaactgttacgcgccttaatttctaagtttaagggatcaatcggatcgtcggatataagggagactgttatgattattaccggcaccctggttaggaagctgtgtcagaatgaaggatgcaagctgaaggcggtggttgaggcgaaaaagctaatcctgggggggctggagaaagccgagaagaaagaggatacacgaatgtatcttcttgctctgaagaacgcgctgctgccagaaggcattccaagcctactgaagtatgcggaggctggagagggcccgatctctcacctagccacaacagccctgcagagatacgacctgccttttattacagatgaggtgaagaagaccctcaatcgtatataccaccagaatcgcaaggttcacgaaaaaaccgtgagaaccgctgccgcagctatcatcttgaataacaacccatcttatatggatgtcaagaatattctgctttccatcggagagctgccccaggaaatgaacaagtatatgctcgcaatcgttcaggacatccttcgcttcgaaatgcctgcatcaaaaattgttcgcagggtgctgaaggagatggttgctcacaactatgatcgctttagcagatcaggtagctcatcagcctacactggctatatagagcggtcccctcggtccgctagtacttacagcctagacattctctattccggttccggtatccttcggcggtcaaacttgaacatctttcagtatatcggcaaggccgggctgcatgggagtcaggtggtgattgaggcacagggcctggaagcattgattgccgccactcctgatgaaggcgaagagaacctcgacagctatgctggcatgtctgctattcttttcgacgtccaactgcggccagtaacatttttcaatggctacagtgacttgatgtctaagatgctatccgcgagtggcgaccctattagtgtcgtgaagggactaatcctgctgattgatcatagccaggaactgcagctccagtccggactgaaggctaatatcgaagtgcagggtggtctggcaatagatatttcgggagctatggagttcagcctttggtaccgggagtctaagacacgcgtcaagaaccgcgtgactgtggtgatcacaactgatatcacagtcgacagctcttttgtgaaagctgggctcgaaacatccacagagactgaggcagggttggaatttatttccacagtccaattttcccagtacccatttcttgtgtgtatgcagatggataaagatgaggctcccttccgtcagtttgaaaagaagtacgaacgactcagcaccgggcgcggttacgtgagccagaaacgcaaggaatcagtcctggctgggtgcgagtttccactgcaccaggaaaactctgagatgtgcaaggttgtgtttgccccacaacccgattccacaagtagcgggtggttt

SEQ ID NO: 5553 - DNA, 2682 bp, Artificial Sequence
  derived and/or modified sequence
atgattttgcttgccgttctgttcctgtgttttatcagctcttactctgcgagtgtcaagggccacacgactggtttgtctctgaacaacgatcgcctgtacaagttgacttattccacggaggtgcttctcgaccgcggtaaaggtaaactgcaggatagcgtgggctatcgcatttcttccaacgtcgatgttgctctcctctggcgcaaccctgatggagacgacgaccaactcatccaaattactatgaaggatgttaatgtggagaacgtgaatcagcagagaggtgagaagtccatttttaaagggaagagccccagcaaaatcatgggtaaggaaaatctcgaagctcttcaaaggcccacattgctgcaccttattcacggtaaggtgaaagaattctattcttaccaaaatgaggcagttgctatcgagaacatcaagagaggactggcatcactcttccagacacaactgagctctggtacgacaaatgaagttgatatttcaggcaactgtaaggttacctaccaggcccatcaggacaaagttatcaagatcaaagcacttgacagctgcaagatcgcccgctccgggtttactacacctaaccaggtcctcggtgtctcatccaaagcaaccagcgtgacaacctataaaatcgaggattcattcgtgatcgctgtgctggccgaagagacgcacaattttggactgaactttctccagacaattaaaggaaaaatcgtgagcaagcaaaagttggaattgaagacaaccgaagcaggaccgcggctcatgtcaggtaagcaggccgccgccataattaaagcagtggatagtaaatacacagccatccccatcgttggacaggtctttcagtcacactgcaaaggctgtcccagtctttccgaactgtggcgctccacccgaaagtatctgcagcctgacaacctctcaaaagcggaagcagtgcggaatttcctggccttcattcagcacctccgcacggccaagaaggaggagatcctccagattctcaagatggagaacaaagaggtgttgccccaactggtcgacgctgtcacttctgcacaaacatctgattctctggaggcaatattggactttctggatttcaaaagtgacagttcaataattctgcaagagcgattcctctatgcctgcggttttgccagtcatcctaatgaagagcttcttcgggcactgataagcaagtttaagggtagcatcggctccagtgacatccgagaaactgtcatgatcattacgggtactctggtaaggaaattgtgccagaatgaagggtgcaaactgaaagccgttgtggaagccaaaaaactgatcttgggcggtctcgagaaggcagagaagaaagaagacaccagaatgtatctgttggcgctcaaaaacgcactgcttcctgaagggattcccagcctcctgaaatatgctgaggccggcgaggggccaatctcccaccttgctacaaccgccctccaaaggtacgacctgccatttatcactgatgaagtgaagaaaactctcaatcgaatctatcatcagaacagaaaggtccatgagaaaaccgttaggacagcggcggccgcaatcattttgaacaataatcctagttacatggatgtcaaaaacatactgctttcaatcggcgagctcccccaggagatgaacaagtacatgttggccattgtgcaggatatcctccgcttcgagatgcccgcctctaagatcgttcggagggtgttgaaagagatggtggcacataactatgatcgctttagccgaagtggttcatctagtgcatacactggctatattgagcgatctccgcggagtgcctctacctactccctggatatcctgtatagcggcagcggtattctccggcggtcaaatttgaacattttccagtatataggcaaggccggtttgcacggttcccaggtcgtgattgaagcacagggccttgaagccttgattgcagcgacccctgacgaaggcgaagagaacctggactcatacgccggaatgagtgccatcctcttcgatgtgcaactccgcccggtgactttcttcaatggctatagcgatctgatgtctaagatgctgtctgccagcggagaccccatatctgttgtgaaagggctgatcctgctgatcgatcatagccaggaacttcagctccaaagcggtctgaaggccaatattgaggtgcaggggggcctcgccatagatatatccggtgcgatggaattctccctgtggtacagagagtcaaaaacaagggtaaaaaaccgagtgaccgttgttattaccaccgacatcaccgtcgactccagcttcgtgaaggccgggctggagacatccactgagactgaagctggacttgagtttatttctactgtgcaattttcccaatacccatttctcgtgtgcatgcagatggataaggatgaggccccattcaggcagttcgaaaagaagtacgagcgactgtcaacaggtcgcggttatgtgtcccagaagaggaaagagagtgtcctcgcgggctgcgaattccccctccatcaggagaacagtgaaatgtgcaaagtggtatttgccccacagccagacagcacatcctctgggtggttc

SEQ ID NO: 5554 - DNA, 2682 bp, Artificial Sequence
  derived and/or modified sequence
atgattcttttagccgtcctattcctctgttttatttcgtcctattccgcatcggtcaagggacatactactggtctctcactgaataatgatcgtctgtacaaactgacctattcgacagaagtgttgctagatcggggaaaaggaaaacttcaagattctgttggctaccgtataagttcaaatgtggatgttgctctcctttggagaaatcccgacggtgacgacgatcaactgattcaaattactatgaaagatgttaacgttgagaatgttaatcagcagagaggtgaaaagagtatatttaaaggaaaatcgccaagcaagattatgggaaaagaaaacttagaagcgctgcaaaggcctacgctactccatctaatccatggaaaggttaaagagttctatagctaccaaaacgaagcggtcgcgattgaaaacataaaaagaggattggcatctctctttcagacacagctctcgtccggaacaactaatgaagttgacatcagtggaaactgcaaagtcacatatcaagctcaccaggataaggtaattaaaatcaaagctcttgatagttgcaaaatcgcccgctctggtttcaccacacccaatcaggttctaggagtttcctcgaaagccacgtctgtaacaacatacaagattgaagattcattcgtaattgcagttctagcggaagaaacacataacttcggattgaattttttgcaaacaataaaaggaaaaattgtcagcaaacaaaaattggagctcaaaacaaccgaagcgggtccaaggctgatgagcggcaaacaggcagcggctataattaaagcagttgattcaaaatacaccgctattccaattgttggacaagtttttcagtctcactgtaaaggatgtccttccctatccgaattgtggcgatctacacggaagtatctccagccagataacttgtccaaagcagaggcagttagaaattttctggcattcatccaacacttacgcacagcaaagaaagaggagattttgcaaattctaaagatggagaataaggaagttcttccacagttggtcgatgctgttacatcggcgcaaacctcagattccctcgaagctattttagattttcttgactttaagtcggatagttctataatactccaagagcgtttcctttacgcatgtggttttgctagtcacccgaatgaagaactgcttagagcacttatttcaaagtttaagggatctataggatcgagtgacatccgtgagaccgtcatgatcattacaggaacgctcgttagaaaattgtgtcagaatgagggatgtaagctcaaggccgttgtggaagctaaaaaactaattttaggaggacttgaaaaggcagagaaaaaggaggacacaagaatgtatctgctggcattgaagaatgcgctgttgccagaagggattccaagcttactaaagtacgcggaagcaggtgaagggccaatttcacatcttgccactactgcgcttcagcgctatgacttaccgttcataaccgatgaggtcaaaaaaacacttaatcggatttatcaccaaaatcgcaaggtgcatgaaaaaactgtccggacggctgctgccgccattatattgaataacaatccaagctatatggacgttaaaaacatcttgttgtctattggagagctacctcaggaaatgaataaatacatgctagccattgttcaagatattcttcgttttgagatgcctgcgagtaaaattgttagaagagtcttaaaagaaatggtcgcacataattacgatagattctcgcgatcgggatcttcttcagcgtatactgggtatattgaacgttcaccgcgttcggcttccacttattccttggacattctgtattctggatcaggaatccttcgcagatcaaaccttaacatatttcaatatattggaaaggctggattgcatgggtcccaggtggtcatagaggctcagggactagaagcacttattgctgctaccccagatgaaggagaggaaaatctcgattcatatgctggaatgtcagcaatcctgtttgacgtgcagctcagaccggttactttcttcaatggatacagtgaccttatgtctaaaatgctctcagcctcaggggatccaattagtgttgttaagggattgattcttctgatcgaccactctcaagaacttcagctccaatcgggattgaaggctaatattgaggttcaaggagggctggcgatcgatatcagtggagcaatggaattttcgctgtggtatcgtgagagtaagacaagagtaaagaatcgggttaccgttgttattactaccgacattacagttgattcgagtttcgtcaaggcgggattggaaactagtaccgaaactgaggcaggacttgaattcattagcactgttcagttttctcagtacccatttctcgtatgcatgcagatggataaggatgaagcaccattccgccaattcgagaagaaatacgagaggcttagtacaggacgaggatacgtgtcacagaaacgaaaggagtcggtcttggctggatgcgaatttccactacaccaggaaaactccgaaatgtgtaaagtagtctttgctccacaaccagactcaacatcatcgggatggttc

SEQ ID NO: 5555 - DNA, 2682 bp, Artificial Sequence
  derived and/or modified sequence
atgattttacttgcagttttatttttatgttttattagttcatattccgcctctgtaaaaggtcatactactggattatcattaaataatgatcgactttataaattgacttattctacagaagttttattagatcgtggtaaaggaaaacttcaagattctgtagggtatagaatttcaagtaacgtagatgttgctttactctggagaaatccagatggagatgatgaccaacttatacaaattacaatgaaagacgttaatgttgaaaatgtaaatcaacaaaggggtgaaaaatcaatatttaaaggtaaatctccaagtaaaattatgggaaaggaaaacttagaagctttgcaaaggcctactctattacacttaattcacggaaaggttaaagaattttattcataccaaaacgaagcagttgctatcgagaatattaaaagaggattagcttctctttttcagactcaactttcttctggtactactaatgaggttgatatctcaggaaattgtaaggtaacataccaagcacatcaagataaagtaattaaaattaaagctttagactcatgtaaaatagccagaagtggttttactacaccaaatcaagtattaggagtctcttcaaaagcaacaagtgttacaacttataaaattgaagattcatttgtaatagctgttttagctgaagaaacacataattttggactaaattttttacagactattaaaggaaaaattgtttccaaacaaaaattagaattaaaaacaactgaagcaggaccaagacttatgagtggtaagcaagctgctgcaattattaaagccgtagattcaaaatatacagcaataccaattgttggacaagtatttcaatctcattgtaaaggatgtccttcattatctgaactttggagatctacaagaaagtatttacagccagataatcttagtaaggcagaagcagtaagaaattttcttgcttttattcaacatcttcgtactgcaaaaaaagaagaaattttacaaattcttaaaatggaaaataaagaggtattaccacaattagttgatgctgtaacctcagctcaaacatcagacagtttagaagctattttagatttcttagactttaaaagtgattcatctataattttacaagaacgatttctttatgcttgtggatttgcatcacatccaaatgaagaattactccgtgctttaatttcaaagtttaagggtagtattggtagttctgatattagagaaactgttatgataattactggaacattagtaagaaagttatgtcaaaatgaaggttgtaagttaaaagcagttgttgaagcaaaaaaattaattttaggaggattagaaaaagctgaaaaaaaagaagacactaggatgtatttgcttgcacttaaaaatgctcttcttcctgaagggattccaagcttacttaaatatgcagaagctggagaaggaccaatatcacatttagcaactacagcacttcagagatatgatttaccatttattacagatgaagtgaaaaagactttgaatagaatttatcatcaaaataggaaagttcatgaaaaaacagttagaactgcagcagcagcaattattttaaataataatccaagttatatggatgttaaaaatattttattatctattggagaattaccacaagaaatgaataagtatatgcttgctattgttcaagatattcttagattcgaaatgcctgcatcaaaaattgtaagacgagtcttaaaagaaatggttgctcataattatgatagattttcaagatcaggttcttcctcagcatatacgggatatattgaaagaagtccacgttctgcatcaacttattctttagatatactttattctggaagtggaattttaagacgtagtaatcttaatatatttcaatatattggaaaagcaggacttcatggttcacaagttgttattgaagctcaaggtttagaggctcttattgctgcaacaccagatgaaggagaagaaaatcttgattcatatgctggtatgtcagcaattttatttgatgtacaattaagaccagttactttttttaatggatatagtgatttaatgtcaaaaatgttatcggcatcaggtgatccaattagtgtagttaagggattaattttattaattgatcactcacaagaacttcaacttcaatctggactcaaagctaatattgaggttcaaggaggtctagcaatagatatttcaggtgctatggaattttcattatggtatagagaaagtaaaacaagagttaagaatagagttacagttgttataactacagacattactgttgactcatcatttgttaaagcaggtcttgaaacatcaacagaaacagaagcaggattagaattcatatcaactgttcaatttagtcaatatccattccttgtttgtatgcaaatggacaaagatgaagctccatttagacaatttgaaaagaagtatgaaagattatccactggaagaggttatgtttcacaaaaaagaaaagaatccgttttggcaggatgtgaattcccacttcatcaagaaaattccgaaatgtgtaaagtggtttttgcaccacaaccagattcaactagttctggatggttt

SEQ ID NO: 5556 - DNA, 2682 bp, Artificial Sequence
  derived and/or modified sequence
atgattttactagcggtgcttttcctgtgttttattagttcctatagcgcctctgtcaagggccacactacaggtttaagcctgaataatgatcggctctacaagctgacttactccacggaagttttgctcgatcgagggaaggggaaactccaggactccgtgggttatcgtattagctcaaacgtggacgtagctctgttatggcgcaaccctgacggcgatgatgaccagttgatacagattactatgaaagacgtgaatgtggagaatgtcaaccagcagcgtggagagaaatccattttcaaggggaagagtccgagcaaaattatgggaaaggaaaacctggaggcgcttcagagacctacgctgcttcatttgattcatggaaaggtgaaggaattctacagttatcagaacgaggctgtggccatagaaaatattaagcggggactcgctagcttgtttcagacccaactcagttctgggaccacgaacgaggtggacatttccggaaactgcaaggtaacttaccaggcccaccaagacaaggtaattaaaataaaggcattagactcctgtaaaattgctcggagtggattcaccacaccaaatcaggtcttaggcgtctctagcaaagccaccagcgtaactacttacaagatagaggactcattcgtgattgcagtgctggccgaagagacccacaacttcgggttgaattttctgcaaactatcaagggcaagatagtgagtaagcagaagctagaactgaagaccaccgaggccggaccccgcttaatgtcagggaaacaggccgcagccataatcaaggccgtggactcaaagtacaccgcaatccccatcgtcggacaagtgtttcaatcccattgcaaaggctgtccgtcactgagtgagctctggcggtctaccagaaagtacttgcagccagataacctttccaaagctgaagcagttcgaaacttcctggctttcatccagcacctcaggactgcgaagaaggaggaaatcctacaaatcctgaaaatggagaacaaggaggtattaccccaactggtggatgctgttacatcagcccagacctccgactcgctggaggctatccttgatttcctcgacttcaagtccgattcaagtataatcctccaggagcggttcctctacgcctgtggtttcgccagccatcctaacgaagagctgctcagggcgttgatctctaaatttaaggggagtatcgggtcttcagatattcgcgagacagtcatgattattacagggacacttgttagaaaactctgtcaaaacgagggatgcaaactgaaagctgttgtagaagccaagaaactgatcctcggcggattggagaaagctgaaaagaaagaagatacccggatgtacctgttggccttgaagaatgcactgcttcccgaggggatcccctctttattgaaatatgcagaagccggagaggggcctatctcccacttggctaccactgcactacaacgctacgacctgcccttcattacggacgaggtgaagaaaacactgaataggatttaccatcagaaccgtaaggtgcacgagaagactgttaggaccgccgctgcagctattattttgaacaataacccatcttacatggacgtgaaaaacattctgctgagtatcggcgagttacctcaagagatgaacaaatatatgctcgcaattgtccaggatatattacggtttgaaatgcccgcgagtaaaatcgtgaggcgggtgctgaaagaaatggtcgcgcacaactacgaccgatttagccggtcaggatcttccagcgcatatacaggctatatcgagagatcaccccgatctgcttccacttacagcctcgacatcttgtattctggcagtgggattctacggagaagcaacctcaatatatttcagtacatcgggaaagccggcttacacggatcccaggttgtcatcgaagcccagggcttggaggccctaatcgcagccacgccggacgaaggcgaagagaacttggatagttacgcgggcatgagtgcaatcctgttcgacgtccaactgagacccgttaccttctttaacgggtattccgacctcatgagtaagatgctgtcagcatcaggcgacccaatatcggtggtaaagggcctcattttgttgattgaccacagccaggagctgcaacttcaatccggcttaaaagctaatatagaagttcagggaggactggcgatcgacatttcgggcgccatggaattttcattatggtatcgggagagcaagacgcgtgtgaagaacagagtgaccgtcgtgattactaccgacattaccgtggacagctctttcgtcaaggcaggccttgaaacaagtacagagacagaggctggattggagttcattagcacagtccagttcagccagtacccgtttctggtttgtatgcagatggacaaggacgaagcgcccttccgacagttcgaaaagaaatacgagcgccttagcacgggtcgcggatacgtatcccagaaacgtaaagagtctgtgttggccgggtgtgaatttcccttgcaccaagagaattctgagatgtgtaaagtggttttcgccccacagcccgatagcacaagcagcggatggttt

SEQ ID NO: 5557 - DNA, 2682 bp, Artificial Sequence
  derived and/or modified sequence
atgatcctgttggcagtcctatttctttgcttcatctctagttattcggcatccgttaaaggacatactaccggcctgagtctgaataatgacagactgtacaaattaacatatagtacggaggtgctgctggaccgtgggaagggaaagctgcaggactccgtgggatacagaattagttcaaacgtggacgtggctcttttatggaggaatcctgacggggacgatgatcaattgatccaaattacaatgaaggacgttaatgtcgagaacgtaaatcagcagcgcggagaaaagtccatcttcaaggggaagtcaccgtccaaaataatggggaaggagaacctggaggcattgcagcgccctactcttctgcacctaatacatggaaaggtcaaagaattttacagctaccagaacgaggctgtagccattgaaaatataaaacggggcctggcatcattattccagacccagctgtcttctggcaccaccaatgaggtggatatctcaggtaattgcaaggtgacttaccaagctcatcaggacaaagtcattaagattaaagctctcgacagttgcaagatcgcgcgctccggattcactacccctaatcaggtcttaggggtctcctcaaaggctacatcagtaaccacatacaagattgaagactcttttgtcatcgcagttctcgcagaggaaacacataactttggcctaaatttcttacagaccataaaaggtaagatagtctcaaagcagaagcttgagctaaaaacgacagaggcgggcccgcggctgatgtctggaaagcaggccgccgcgattattaaggctgtcgacagcaaatatacggcaatccctatagtcggccaagtgttccaatcccactgtaaaggatgtccgtccctgtccgaactttggcggtcgactaggaaatacctgcagcccgataatctgtccaaagctgaggctgtgagaaactttcttgcgtttatacaacacctccgcaccgccaagaaggaagagatcctccagatacttaagatggaaaacaaggaggttctcccccagctcgtggatgctgtaacatccgctcagacgtcagatagcctcgaagcaatactcgattttctcgacttcaagagtgattctagcataatcttgcaggagcggtttttgtatgcctgtggtttcgccagccatcctaacgaggagctgctgagggcccttatatcaaaattcaaggggtctataggcagtagtgatattagagaaacggtgatgatcattacagggaccctcgttagaaagctgtgccagaacgaagggtgtaaactcaaagccgtcgtggaggcgaaaaagctcattctcggcggtttggaaaaggcggaaaaaaaagaagacacacgtatgtacctgctggctttgaaaaacgctcttcttcctgaagggatccccagcctgctgaagtatgcggaagccggcgaaggcccaattagccacctagctactactgctcttcagagatacgatcttccatttataactgacgaagtgaaaaaaacgctgaacaggatatatcatcagaataggaaggtgcatgagaagacagtgcgtaccgcggccgccgccattattctgaataataatccttcttacatggacgtgaaaaatattctgctttcaatcggagagctgcctcaggaaatgaataagtatatgctggcaattgtgcaggatatactgaggtttgaaatgcctgcatcaaagatagttcgtcgggtgctcaaggaaatggtggctcacaattacgaccgcttctcccgctcaggatctagcagtgcatatacgggctacattgagcgatccccccgctcagcctccacatattccctagacattctatatagtggatcgggcatactgcgacggagcaacttgaatatctttcagtacatcggaaaggcagggttgcacggctcacaggtggtaattgaggcccaggggctggaagccctcattgctgctaccccagacgaaggggaggagaatttagactcctatgctgggatgagtgctattttgtttgatgttcaactgcggccagttaccttttttaacgggtactctgacctgatgtcaaagatgctgtccgcatccggcgatcctatcagtgttgtgaagggcttgattctactgatcgatcatagccaggagctccagctccagagcggtctaaaagcgaacattgaagtgcaggggggactagccattgatatttctggggccatggagttctcattgtggtacagggaatctaagacccgtgtgaagaaccgcgtgacggtcgtcatcacaaccgatatcactgtggattcgagctttgtcaaggccggcctcgaaaccagcaccgaaacagaagcaggactggaatttatctccacagtgcaattttcacagtaccccttcctcgtgtgcatgcagatggataaggacgaggcgcccttcaggcagttcgagaaaaaatatgaaagactctcaacagggagagggtacgtgtcacagaagcggaaggagagcgtgttagccgggtgcgagtttccattgcaccaggagaatagcgagatgtgcaaagtcgtgttcgcaccgcagcctgactcgacctcctctgggtggttc

SEQ ID NO: 5558 - DNA, 2682 bp, Artificial Sequence
  derived and/or modified sequence
atgattctgctagcagtccttttcttgtgttttatctcttcatacagcgccagtgtgaaaggacataccactggcctctcactgaacaacgaccggctttataaactcacatattcaactgaggtgctgctcgaccgaggcaagggcaagttacaggacagcgttggataccggatttcaagcaatgtagatgtggctctgttgtggaggaaccccgacggggacgacgatcagctgattcagattaccatgaaggacgtgaacgtcgaaaatgttaatcagcagcggggcgagaaaagtattttcaaaggcaaatcaccatcaaagataatgggcaaggaaaatctggaggctctgcagaggccaactctgttgcacctcatccacggaaaggtcaaggaattttattcctatcagaatgaggccgttgcaattgagaatattaaaaggggactggcttctctgttccagacacagttgtcatccgggaccaccaatgaggttgacatctccgggaattgtaaggtcacctatcaggcacaccaggacaaagtgattaagatcaaggcgcttgactcttgtaaaatcgccaggtccggtttcactacaccaaatcaggttcttggcgtatcaagtaaagcgacctcggtgactacttacaagatcgaggattcattcgtgattgcagtacttgctgaagagactcataactttggactcaacttcttgcagactattaaaggcaagattgtgtctaagcagaaactggagctgaagactaccgaggccgggccgaggctcatgtctgggaagcaggctgctgctattattaaggctgtggactccaaatataccgccatccccatcgtggggcaggtgtttcaatctcactgcaaggggtgcccttctctgtctgaactttggagatcgacaaggaaatacctgcaaccagataatctttctaaggcagaagctgtgcgcaatttcttagccttcatccagcatctgcggacggctaaaaaagaggagatactccagatactcaagatggagaacaaggaagttctaccacagcttgtagacgctgtaacctccgctcaaacttccgatagcctagaggccattctggactttctggacttcaaatctgattcctcaataatattacaggaacgctttctctatgcatgcggatttgcttcccaccccaacgaggagctgctgcgtgctctcatttctaaattcaaaggatcgattgggagctctgatattcgggagactgtaatgatcataaccggtacccttgtcaggaagctctgccagaatgagggttgcaagctgaaggccgtcgtggaggctaaaaagttgatactaggagggcttgagaaggccgaaaaaaaagaggacacccggatgtatctgctcgcactgaaaaacgccttacttcccgagggaattccatctctactcaaatacgctgaggcaggggagggcccaatcagccatctggcaaccacggcactgcaaagatacgatctccctttcattaccgatgaagttaaaaagactcttaacagaatctatcatcagaatcggaaggtacacgaaaagactgtgagaacagccgcggcagccattatcttgaacaacaacccaagctacatggacgttaaaaacatactgcttagcatcggtgagttgccccaggagatgaacaagtacatgcttgctattgtccaggatattttgcggtttgaaatgcccgctagcaaaattgtgcgcagagtcttgaaggagatggttgcacacaattacgatagattcagcagatctgggagctcctcagcctacaccggttatatcgaaaggtcccctagatctgcttctacttactctctagatatcctgtattccggctctgggattctccgacggtccaacctaaatattttccagtacattggcaaagcggggctgcacggttctcaggttgtgatcgaagcgcaaggcctcgaagccctgattgcagccactcccgacgagggagaagaaaatctggactcatatgcagggatgtcggcaatcctcttcgacgttcagctgcggcccgtgacattttttaacggttactccgacttgatgtccaagatgctgtctgcctcgggagaccccatttccgtggtgaaggggttgattctgctaattgatcatagccaagaacttcagttgcagtcaggactgaaagccaacattgaggtgcagggcggccttgccatcgacatctcaggcgccatggagttttcgttgtggtaccgtgaatccaaaacccgagtgaagaatcgggtaacggtagtaataactacggatattaccgttgatagctcttttgttaaagccggcctggaaacatcaaccgagaccgaggccggcttggagttcatttctaccgtccagttttcgcagtacccatttctggtctgtatgcagatggacaaagatgaggcgccattccgtcagttcgaaaaaaagtatgagcggcttagtactggcaggggctacgtgtctcaaaaaagaaaggagtctgttctggctggatgtgagtttcccctgcatcaggagaatagcgagatgtgcaaggtcgtctttgctccgcaaccagactcaactagctctgggtggttc

SEQ ID NO: 5559 - DNA, 2682 bp, Artificial Sequence
  derived and/or modified sequence
atgatcctcctggcagtcctttttctgtgcttcatttcgtcctatagtgccagtgtcaaggggcataccacaggcctctcactgaacaacgacagactgtataagttgacctacagcactgaggtgctcctagatagagggaaaggcaagcttcaggacagcgtgggatatcgaatttcctctaatgtagatgtggcccttttgtggaggaacccagacggcgatgatgatcagctcattcaaattacgatgaaagacgtcaacgtggagaatgtcaaccagcaacgtggggagaagagcattttcaaaggtaagtctccctcgaaaatcatgggaaaagaaaatttggaggcgctgcagagacctacgctgttacacctgatccacgggaaagtaaaggaattttatagttaccagaatgaagctgttgccatcgagaacataaagcggggcctcgcttcgctattccaaactcagctgtcttcaggtaccaccaacgaggtcgacatatcaggaaactgtaaggtaacttatcaagcccatcaggacaaagtgattaagatcaaagcactcgacagttgcaaaattgctcggtcagggttcaccacccctaatcaggtgctgggcgtcagttccaaagccacatccgtgaccacttacaaaatcgaagactccttcgtcatcgccgtgttagctgaggagacccacaactttgggctcaatttcctgcagaccattaaaggaaagattgtgtcaaagcagaagttggagctcaagacaacagaggccggccctaggcttatgtccgggaaacaggccgccgcaatcattaaggccgttgactcaaaatacacggccattcccattgttgggcaggtattccagtctcactgcaaggggtgtccgagccttagcgagctgtggagaagcacccggaagtatctgcagccagataatctctcaaaggcggaggctgtccggaactttttggcatttatacagcatctgaggacggccaaaaaagaggagatcctgcagatcctgaaaatggagaacaaggaggtgttacctcagctggtcgacgccgtaaccagcgctcagacctccgattccctagaggccatcctggattttctcgatttcaaaagcgacagcagcataattttgcaggaacgctttctatacgcctgcgggttcgccagccaccctaatgaggaactgctgagagctctgatatccaaattcaagggatcaatcggctcctccgatatccgggagactgtgatgatcatcacaggaacgttggtcagaaagttgtgccaaaacgagggctgtaagctgaaggcagtggtggaagcgaaaaaactgatcctgggcggcctggagaaggcagaaaaaaaggaagatacacgcatgtatctgctcgccctcaaaaatgctttgttgcccgaaggcatcccctcactcttgaaatatgccgaggcgggagagggccccatctcgcacttggccaccaccgccctgcagaggtatgacctgccttttatcaccgatgaggtcaaaaaaactcttaacaggatttatcatcagaaccgcaaggttcatgagaagacggtccgcactgcagccgctgcaatcattctgaataacaatccgagttatatggatgttaagaatattctcctgtcgatcggggagttaccgcaagagatgaacaaatatatgctggctattgtacaagatatcctgcggttcgagatgcccgcatcaaaaatcgttcgtcgagttctgaaggagatggtcgctcacaattacgataggttctcacggagcggcagcagcagcgcttacaccggctatatagagcgatccccacggagcgctagcacatattccctggatatcctgtattctgggtctgggatcctgagaaggagtaatcttaatatcttccagtacatcggaaaagccggcctgcacggctcccaggttgttattgaagcacagggactggaggcactgattgccgctaccccggatgagggcgaagagaatttggactcatacgccggcatgtctgctattctcttcgacgtccagctgcggccagttacattcttcaatgggtactcagatctaatgagcaagatgttgagtgcttccggagacccgatctctgttgtaaaggggttgatcctcctgattgaccattcgcaggagttgcaacttcagtcaggcctgaaggctaatatcgaggtgcagggaggcctagctattgatatctcaggagcgatggaattcagcctatggtaccgggagagtaagacgagagtcaagaacagggtgactgtggttattacaacagatataacggtggatagttcttttgtaaaggccggactggaaacctctactgagacagaggccgggcttgagtttatttccaccgtgcagttctctcaataccctttccttgtttgcatgcagatggataaagacgaagccccttttcggcaattcgagaaaaaatacgagcggctgtcgactgggcggggttacgtgagtcagaagcggaaggagagcgtgctggctgggtgtgaatttccactgcaccaagaaaacagcgagatgtgtaaagtggttttcgccccccaacctgatagcacctcaagtggctggttt

SEQ ID NO: 5560 - DNA, 2682 bp, Artificial Sequence
  derived and/or modified sequence
atgatcttactggctgtcttatttctttgttttataagctcgtattctgcatctgtgaagggccatactaccggcttgtctctgaacaatgataggctatacaagttgacttactcaacggaagtgcttctggatcggggcaagggcaaactgcaggattctgtggggtatagaatttcttctaatgtggatgtggctctgctgtggcgaaaccccgatggcgacgacgaccaattaattcaaatcactatgaaagacgtaaacgtcgaaaacgtcaaccaacagaggggagagaaatctattttcaaagggaagtccccaagcaagattatgggaaaagaaaatctcgaggcactccagaggccgacccttctccacctcatccacggcaaagtaaaggaattttattcttatcagaacgaagccgtggccattgaaaacattaaaaggggtctggcaagtctcttccagacacagctgagctccggcacgaccaatgaggtcgatatttccggaaactgtaaagtgacatatcaggcgcaccaggataaggtcattaagatcaaagccttggactcttgtaaaatagccaggtccggctttaccacacccaatcaggtgctgggcgtgagcagtaaggcgacctccgtaaccacctacaagatcgaggactccttcgtaattgcagtgctggcggaggagactcacaattttggtttaaactttctgcaaacgattaaaggaaagatcgtttctaaacagaagctggagctgaaaactactgaggctgggcctagattaatgagcggcaaacaggccgctgctatcatcaaggccgttgattctaagtataccgctatacccatcgtgggccaggtttttcagtcacactgcaagggctgcccttccctgtcggagctgtggcggagtactcgtaaatatctgcagcctgacaatctgtcaaaagctgaggcggtacgcaattttcttgcctttattcagcatctccgtacggccaagaaagaggagatactccagatcctgaaaatggaaaataaggaggtcctgcctcagttagtcgatgctgttacatcagcacaaacatcagactcgctcgaagcaatcttagatttccttgattttaaaagcgacagctccattattctccaggaaagatttctctatgcgtgtggtttcgcatcacaccccaatgaggaattacttcgggccctgatctcaaagtttaagggctccatcggatcgtccgatatccgggaaacggtgatgatcatcacaggcaccctggttcgtaaactgtgtcagaacgaaggatgtaaactgaaggcagtggtcgaggccaaaaagctgatcctcggggggctggagaaagccgagaagaaagaggacaccagaatgtaccttttggccctcaaaaacgcactactgcccgagggaatcccttccctgctcaagtacgcggaagccggtgagggccctatctcacatctggcaacaacggccctccagaggtacgacctgcctttcattacggatgaggtcaagaagacacttaaccgtatctaccatcaaaaccgcaaagttcatgagaagactgtacgaactgccgccgctgcaattatccttaacaacaacccgtcctatatggatgttaagaatatcctcttgtctatcggtgaactgccgcaagagatgaacaagtacatgctcgctatcgtgcaggacatcctgcggtttgaaatgcccgcctccaaaatcgttcgcagagtgcttaaggaaatggtggcgcacaattacgataggttctctcggagcggcagcagcagcgcttataccggatacatcgaacgttctccacgcagtgcgtcaacatattctttagacattctgtattccgggagtggcatcctccgccgaagcaatctgaacatctttcagtatattgggaaggcaggactgcatggctctcaggttgtcatcgaagcgcaagggttggaggcgctaatcgccgcaacgcccgacgagggtgaagaaaacctcgattcatacgccgggatgtccgccattctttttgacgtgcaactgagacctgtcacattctttaatggctactctgacctaatgtctaaaatgctgagcgccagcggggaccctatatctgtagtcaaggggctgatcctgttaattgaccactcccaggaattacagttacaatctggactaaaagccaatattgaggttcagggcggactcgctatcgacattagtggggccatggaattcagcctatggtatcgcgagagcaaaacacgcgtcaaaaaccgcgtgaccgtcgtgatcactaccgacatcaccgtcgattcaagcttcgtcaaggcgggtctggagacctcaacagagacagaagccggactcgagttcatctccacagtgcagttcagccagtatccctttttggtgtgtatgcaaatggacaaagatgaggcaccattcaggcagttcgaaaaaaaatatgagaggctttctaccgggagaggctacgtttcacagaaacgaaaggagtccgtcttggcagggtgtgagtttccgttgcatcaggagaacagtgaaatgtgcaaggtggtcttcgctccacaacccgatagcactagtagtgggtggttt

SEQ ID NO: 5561 - DNA, 2682 bp, Artificial Sequence
  derived and/or modified sequence
atgattctattggcagttttgtttttatgctttatctcgagctattccgctagtgtcaagggtcacacaacgggtctttcgttaaataacgatcgcctctataagctgacttattcgactgaggttctgctagatagaggtaagggcaaactgcaggattcagtgggataccgcatatctagtaatgtcgatgttgcgttgctgtggagaaatccggacggagatgacgaccaattgatccaaatcactatgaaggatgttaatgttgaaaatgttaatcagcagagaggcgaaaaatcaatttttaaaggaaaaagcccctcgaagataatgggtaaagagaatctagaagccctccaacgtccaacgttgttacatcttatacacggaaaggtaaaggaattttatagctaccagaacgaggctgtggcaatcgagaacataaaacggggcttagcttcactgtttcaaacccaattatcaagtggtactacaaatgaagtggatatctctggcaactgcaaggtcacgtaccaagctcatcaggataaagttatcaaaattaaggcacttgattcatgtaagattgccagatcagggttcactactcctaatcaggttcttggagtgtcctccaaggcaacaagcgttacaacatataagatagaagatagttttgtgatcgcagtgctggctgaggagactcataattttggactaaatttcttgcagacgattaaagggaagattgtttccaaacagaaacttgaactcaaaactacggaagccggtccaaggctcatgagcggtaagcaagctgctgcaatcataaaagccgtcgatagtaagtacacagccatcccgatcgtaggtcaagtttttcagagccactgtaaaggatgcccttcactctctgagctttggaggtctaccagaaagtacctccagcctgacaacctttctaaggccgaggctgttcgtaacttcttggcgttcatccagcacttgaggactgctaagaaagaagaaattttgcaaatattgaagatggaaaataaggaagtgttgcctcagctggtagatgcggtcacgtccgcgcagacatcagactcacttgaggcaattcttgatttcttggattttaaatctgacagctccattattcttcaggagcgtttcttatacgcttgtggttttgctagccacccgaatgaggaactgcttagggccctgatctcaaagttcaagggttctataggctcctctgatataagagaaactgtaatgattataaccgggaccttggttagaaaattgtgtcaaaatgaaggttgcaaattgaaggctgttgttgaggctaagaagctcattctcggcggacttgaaaaagcagagaagaaggaggatacccgaatgtatcttctcgcactcaaaaacgcattacttccagagggaataccttcgttgctcaaatatgcagaagctggtgaggggccaatatcacatcttgctactaccgctctgcaaaggtacgatctgcccttcatcaccgacgaggttaaaaaaactcttaaccgtatttatcatcagaatcggaaggttcatgaaaagacagtgaggactgctgccgctgctatcattttgaataataatccatcatatatggatgtgaagaacatcttgttgtccattggtgagctgcctcaagaaatgaataagtacatgcttgcaattgttcaagatattcttcgtttcgagatgccagctagcaagatagtcagaagggtgctaaaagaaatggttgctcacaactatgacaggtttagccggtcaggatcttcctcggcttatacgggatatatcgaacgaagccctaggtcagcctctacatactctcttgatatcctgtactccgggtctggcattttgcggaggagtaacttgaacatcttccaatatattggtaaagccggactgcatgggtctcaggtggttattgaagctcaaggcctcgaggccttgatagcagccactcccgacgagggcgaggaaaaccttgacagttatgccggtatgtcagccattttgttcgatgtacagctaagaccagttacattctttaatggatattccgacttaatgtctaaaatgttaagcgccagtggagatcctattagcgtagttaagggtttaattcttcttattgatcactcacaggaacttcaattgcaaagcggtctgaaggctaacattgaagtgcagggagggttggcgattgacatttcaggtgcaatggaattctctttgtggtaccgcgagagtaagacaagggttaagaatcgggttaccgtggttataaccacagacattaccgttgactcttcttttgtcaaggctggactcgagactagtaccgagaccgaagctggcttagaatttatcagtaccgtccaattcagccaatatccattcttagtctgtatgcagatggataaggatgaagccccattccgtcaatttgaaaagaagtatgagcgtctctccacaggtcgagggtacgtgtctcagaaacggaaagaaagcgtgctcgctggatgcgaattcccgctccatcaagagaattccgaaatgtgtaaggttgtttttgcgccccagccggattcgacttcgtccggttggttt

SEQ ID NO: 5562 - DNA, 2682 bp, Artificial Sequence
  derived and/or modified sequence
atgattctgcttgcagtgctgtttctgtgcttcattagctcatattccgcctcagtgaaagggcacactacaggacttagcctgaataacgatcgcttgtataagctgacctattctacagaagttctcctcgacagggggaagggcaagttgcaggatagtgttgggtataggatttcatcaaacgtggacgttgcactgctctggcggaacccagacggcgatgacgaccagctcattcagataaccatgaaggacgtcaacgtcgagaatgtgaaccagcaacggggcgaaaagtcaattttcaagggaaagtctcccagcaagattatgggtaaggagaatcttgaggccctgcagcgccccaccttattacacctgattcacggtaaagtgaaagaattctattcgtatcagaacgaagccgttgccattgaaaatataaaacgcggcctggccagcctcttccagacccagctttcttccggcacaactaatgaggtggatatctcaggtaattgcaaggtgacgtatcaagctcaccaggataaggtgattaaaatcaaggcactcgatagctgcaaaattgccaggtcgggctttacaacccccaatcaggtgctaggagtaagctccaaggcaacctctgtgactacatataagatagaagattcatttgttattgcggttcttgccgaagaaacacacaatttcggcctaaattttctgcagaccatcaagggcaagattgtgagcaagcagaagctcgaactgaagactacggaagctggcccacgtctgatgtctggcaagcaagcagcagcaatcatcaaagctgtggacagcaagtacaccgcgatacctatagttggccaggtctttcagtctcactgtaagggttgtccctccctatccgagttatggcggtctacacggaagtacctacaacctgataatctgtctaaagccgaagcggttcgcaactttctcgcctttattcagcatttaaggactgcaaagaaggaggagatactgcagatccttaagatggaaaataaagaagtgctgccacagctcgtggacgccgtcaccagcgctcagacgtctgactcgctcgaggccatcctggattttctggattttaagagcgactccagtatcatcctgcaggagcgctttttatatgcttgcggattcgcctcccatccaaatgaagaactgctcagagcgctgatctcaaaattcaagggcagtatcggctcgtccgatatacgagaaaccgtgatgatcatcacaggaactctcgtgcgcaagctttgtcaaaacgagggttgtaaattgaaggcagtcgtggaggctaagaagttgattctggggggactagaaaaggcggagaagaaggaggatacccgcatgtacctccttgctctgaagaatgccctcctgcctgaggggattccttctttgctcaagtacgcagaggccggcgaggggccaatctctcacctggctactacagccctgcaacgctacgatctccccttcatcactgacgaagtaaagaagactctgaaccggatctatcatcagaacagaaaggtgcatgaaaagacggttcggactgctgctgcggcaattattttgaacaacaatcccagctatatggatgtgaagaacatccttctcagtatcggcgaactccctcaggaaatgaacaagtacatgcttgccatcgtccaagatatccttagatttgaaatgcccgcttctaagatcgtacggcgcgtgctgaaggaaatggtcgcgcacaattacgatagattctcacgctctggcagtagttctgcctacactggatatatagagcgctcacctcgctccgcttctacatacagtctcgacattctatacagcggaagcgggattcttcggaggtctaacctcaacatattccagtatatcggtaaggctggtctgcatggctctcaggtagtgattgaagctcagggcctcgaagccttgatcgctgcaacacccgacgagggagaagagaatctggacagttatgcaggcatgtccgctatcttgttcgacgtgcagctgcgtcccgttacgttctttaatggctattctgatctgatgtctaagatgctcagcgccagcggcgacccgatctcggtagtgaagggtttaatattgctgattgatcacagccaggagctccagctgcaaagcggactgaaggccaatattgaggttcaggggggattggccatagacatcagcggggcaatggagttcagcctgtggtatagggaatcaaagacgagagtgaaaaaccgagtgacggttgtcataaccacggacattaccgttgattcaagctttgtcaaagccggtcttgagacatcaacagagacggaggcaggactggaattcatctctaccgtacaatttagtcagtatcctttcctggtgtgcatgcagatggataaggacgaggcaccctttcggcaattcgaaaaaaaatacgagcggctaagcactggccgtgggtacgtttcccagaagaggaaggagtcggtacttgcaggatgcgagtttccccttcaccaggagaattctgaaatgtgcaaagtggttttcgcacctcagcctgattctacgagcagcggctggttt

SEQ ID NO: 5563 - DNA, 2682 bp, Artificial Sequence
  derived and/or modified sequence
atgatattactagcggtactatttttatgttttatatcgtcgtattcggcgtcggtaaaaggtcatacgacgggtttatcgttaaataatgatcgactatataaattaacgtattcgacggaagtattattagatcgaggtaaaggtaaactacaagattcggttggttatcgtatatcgtcgaatgttgatgttgcgttattatggcgaaatccggatggtgatgatgatcaattaatacaaataacgatgaaagatgttaatgtagaaaatgttaatcaacaacgtggtgaaaaatcgatatttaaaggtaaatcgccgtcgaaaataatgggtaaagaaaatttagaagcgttacaacgtccgacgttactacatctaatacatggtaaagtaaaagaattttattcgtatcaaaatgaagcggtagcgatagaaaatataaaacgaggtctagcgtcgctatttcaaacgcaattatcgtcgggtacgacgaatgaagttgatatatcgggtaattgtaaagttacgtatcaagcgcatcaagataaagtaataaaaataaaagcgttagattcgtgtaaaatagcgcgttcgggttttacgacgccgaatcaagttctaggtgtatcgtcgaaagcgacgtcggtaacgacgtataaaatagaagattcgtttgtaatagcggttctagcggaagaaacgcataattttggtctaaattttctacaaacgataaaaggtaaaatagtatcgaaacaaaaattagaattaaaaacgacggaagcgggtccgcgattaatgtcgggtaaacaagcggcggcgataataaaagcggtagattcgaaatatacggcgataccgatagtaggtcaagtttttcaatcgcattgtaaaggttgtccgtcgctatcggaactatggcgatcgacgcgaaaatatctacaaccggataatctatcgaaagcggaagcggttcgaaattttttagcgtttatacaacatctacgtacggcgaaaaaagaagaaatattacaaatactaaaaatggaaaataaagaagttctaccgcaactagttgatgcggttacgtcggcgcaaacgtcggattcgttagaagcgatactagattttctagattttaaatcggattcgtcgataatattacaagaacgttttttatatgcgtgtggttttgcgtcgcatccgaatgaagaattactacgtgcgttaatatcgaaatttaaaggttcgataggttcgtcggatatacgtgaaacggtaatgataataacgggtacgctagtacgaaaactatgtcaaaatgaaggttgtaaactaaaagcggttgttgaagcgaaaaaattaatattaggtggtctagaaaaagcggaaaaaaaagaagatacgcgaatgtatctactagcgctaaaaaatgcgctactaccggaaggtataccgtcgctattaaaatatgcggaagcgggtgaaggtccgatatcgcatctagcgacgacggcgctacaacgatatgatttaccgtttataacggatgaagtaaaaaaaacgttaaatcgaatatatcatcaaaatcgtaaagttcatgaaaaaacggttcgtacggcggcggcggcgataatattaaataataatccgtcgtatatggatgttaaaaatatactattatcgataggtgaactaccgcaagaaatgaataaatatatgttagcgatagtacaagatatactacgatttgaaatgccggcgtcgaaaatagtacgacgagtattaaaagaaatggtagcgcataattatgatcgattttcgcgttcgggttcgtcgtcggcgtatacgggttatatagaacgatcgccgcgttcggcgtcgacgtattcgctagatatactatattcgggttcgggtatattacgtcgttcgaatttaaatatatttcaatatataggtaaagcgggtttacatggttcgcaagtagttatagaagcgcaaggtttagaagcgctaatagcggcgacgccggatgaaggtgaagaaaatttagattcgtatgcgggtatgtcggcgatactatttgatgtacaattacgaccggttacgttttttaatggttattcggatttaatgtcgaaaatgctatcggcgtcgggtgatccgatatcggtagttaaaggtctaatattactaatagatcattcgcaagaattacaattacaatcgggtttaaaagcgaatatagaagtacaaggtggtctagcgatagatatatcgggtgcgatggaattttcgctatggtatcgtgaatcgaaaacgcgtgtaaaaaatcgtgtaacggttgtaataacgacggatataacggtagattcgtcgtttgttaaagcgggtctagaaacgtcgacggaaacggaagcgggtctagaatttatatcgacggtacaattttcgcaatatccgtttttagtatgtatgcaaatggataaagatgaagcgccgtttcgtcaatttgaaaaaaaatatgaacgtctatcgacgggtcgtggttatgtatcgcaaaaacgaaaagaatcggttttagcgggttgtgaatttccgttacatcaagaaaattcggaaatgtgtaaagtagtatttgcgccgcaaccggattcgacgtcgtcgggttggttt

SEQ ID NO: 5564 - DNA, 2682 bp, Artificial Sequence
  derived and/or modified sequence
atgatcttacttgcagttctttttttgtgcttcattagctcatactcagcatccgtgaagggacacacgaccggattgagcttaaacaatgacagactgtacaagttaacatattcaaccgaggtactgctggatcgcggcaagggaaaactccaagattcagtcggataccgcataagttctaatgtggacgttgcactcctatggaggaatcctgatggcgacgatgatcaacttatccagataaccatgaaagacgtcaatgtggaaaacgtaaatcagcaacgcggcgaaaagagcatctttaagggtaagtctcctagcaaaatcatgggcaaagaaaatttagaagcgcttcagcgcccgacgttgttgcatctgattcatggaaaagtaaaggaattttattcgtaccaaaacgaagctgtagccattgagaacattaaacggggattagcgtcacttttccaaacacaattatcatccgggactactaacgaagttgatatctccggtaactgcaaggttacgtaccaggcccaccaagataaagtgattaagattaaagctctcgacagctgtaagattgcaagatctggctttacgacgccaaaccaggtattaggcgtttcatcgaaagcgacttctgttactacgtacaaaatagaggatagttttgtgatagccgtgttagcggaagaaacacataatttcggattaaactttcttcagactattaagggcaaaatcgtaagcaaacaaaagcttgagcttaaaacgacagaagcaggtcctcggctcatgtcaggcaaacaggcggctgcgattattaaagctgttgacagcaaatatacagccattcctattgttgggcaagtctttcagtctcattgtaaaggttgcccgagtctgtctgaattgtggcgctctacgcgcaagtatctgcagcctgataatctctccaaagctgaggcggtccggaactttcttgcttttatccagcatttacgaacggcaaaaaaagaagagatccttcaaattttaaagatggagaacaaagaagtcttaccgcaacttgttgacgctgttacgtccgcgcaaacttctgactcgcttgaagcgatactggattttcttgacttcaaatcagacagctccataatccttcaagaacgttttctgtacgcgtgtgggttcgctagtcatccaaatgaagaactcttacgtgctctgatttcaaaatttaaagggtcaatcggaagttctgacatccgggaaaccgtaatgattattacaggcacattggttcgtaaattgtgtcagaatgagggttgcaaattaaaggcagttgtcgaagcaaaaaagctgatattgggaggcctggaaaaggccgaaaaaaaagaagatacaagaatgtacttactagcattgaaaaatgcgcttcttccggaaggcattcctagcctcttaaagtatgcagaggcaggagaaggtcctatctcccatttggctactactgcgttacaacgctacgatttaccattcattaccgatgaggtgaaaaaaaccttaaatcggatttatcaccaaaatcgaaaagtacatgaaaaaacagttagaacagcggcggcggccataatccttaataacaacccatcatatatggatgttaaaaatatcctgttatctattggagagttaccgcaggaaatgaataaatatatgttggcaatcgtgcaggacattctcagattcgaaatgccggcatcaaaaattgtgagacgtgttctgaaagagatggtggcgcataattacgataggtttagccgttcgggctcaagttcagcatatactggttatattgaacgttccccaaggtctgcgagcacatattccctcgacattctgtacagcggatcaggtatcctacgaagatctaatttaaatatctttcagtatattggcaaagcaggactgcatggctcacaggttgtcatcgaggcccaaggcttagaggcgttgatcgctgctacaccggacgagggagaagagaatcttgattcgtacgctggaatgtctgcgatactgtttgacgtgcaactccggccggtaaccttctttaatggttattccgatttaatgtctaagatgctttcggcctccggggacccgatctccgtggtaaagggcctgattcttcttatcgaccatagccaggaacttcaattacagtctggacttaaagctaatatagaagtacaggggggcttggccattgacatctccggagcaatggaatttagtttatggtacagagaatcgaaaacacgggttaaaaacagggttacagtggttattacgactgacattacagttgattcctcctttgtaaaagcgggcctggaaacatcaacggaaactgaagcgggattagaatttatctcgacggttcagtttagtcagtatccatttttggtgtgcatgcagatggataaggacgaggccccgtttagacagtttgaaaaaaaatacgaacgattaagcaccgggaggggttacgtgtcacagaagcggaaagagtcagtccttgcaggctgtgagtttccgttacatcaggaaaactccgagatgtgtaaagtagtctttgcgcctcaacctgactcgacgagctcgggatggttc

SEQ ID NO: 5565 - DNA, 2682 bp, Artificial Sequence
  derived and/or modified sequence
atgattcttctggcagtgctttttctgtgttttatttccagctacagcgcctctgttaaggggcatacaaccgggctgtctcttaataacgaccgattgtataagctcacctactcaacggaggtcctactggacaggggcaagggcaaactgcaagactctgtggggtatcgcatctcaagcaacgtggacgtcgccctgctgtggagaaaccccgatggtgatgatgatcagttaatccagatcacgatgaaggacgtgaacgtggagaacgtgaatcagcagcgtggagagaaatccatcttcaagggaaagagcccgtcaaagatcatgggcaaggaaaatttagaagccttgcagaggcccacccttctgcacctgatccacggcaaggttaaggagttttattcttaccaaaatgaggcagtggcaatcgaaaatatcaagcggggactggcctcactctttcagactcaactgtctagtggcaccactaacgaggtcgacatcagtggaaactgcaaagtgacttaccaggcccaccaggataaagtcatcaagattaaggccctagacagctgcaagatagctcggtctgggtttacaacgccaaaccaggtcctcggcgtgtcctcaaaagccaccagtgtgactacctataagatagaggattcctttgtgatcgccgtactggcggaggagacacacaattttgggcttaactttctgcagactattaagggcaaaatagtgagtaagcagaagctggagctgaagaccaccgaggccggtccccggctcatgtccggtaagcaggcagctgccatcattaaagcggtggatagcaagtatacagcaatccccatcgtcgggcaggtgttccagtcacactgtaagggctgtccgtccttgagcgaactttggcgcagcactaggaagtacctccagccggacaatctgagtaaagccgaggcggtgcggaatttcctggctttcatacagcatctgaggaccgctaaaaaagaggagatccttcaaatcctcaagatggagaataaagaggtactgccccaactcgtggatgccgtgacgtccgcgcagaccagcgacagcctggaggcaatactggacttcttagattttaaatctgacagctccatcattttgcaggaacgcttcctgtacgcttgcgggtttgcctctcatcccaacgaggaactactgcgcgccctgatctcgaagtttaagggatccattgggtccagcgatattcgagagacggtcatgatcatcactggcaccctcgtccggaaactgtgtcagaatgaaggatgtaaattaaaggcagtggtggaggctaaaaagctgatccttggcggcctggagaaggcagaaaagaaggaggacacacgtatgtatctattggcactcaaaaacgcactgctgccagaggggattcctagcctcctgaaatatgccgaagccggggaggggcctatttctcatctggccactaccgccctccagaggtatgatttaccatttatcaccgacgaagttaagaagacgctgaaccggatttaccaccagaataggaaagtccatgaaaaaacggttaggacagccgccgcggccatcatcctgaacaataacccttcgtacatggacgtcaagaatatcctgctttccatcggcgagctgcctcaggagatgaacaaatatatgctggcaattgtccaagacattctccggtttgagatgccagcatcaaagattgtccggcgcgtgctgaaggagatggtcgcccataattacgatcgtttctctagatctggatcttcaagcgcatataccggatatatcgagcggtctccacgatctgcgtcgacctactcgctggacatcctgtacagcgggtcgggaattttgaggagatcaaatctgaacattttccaatacatcggaaaggcaggcttgcatggaagccaggtagtgatcgaagcacagggattggaagccttaatcgccgctacgccagatgaaggagaagagaatctggactcttatgctggtatgtctgcaatactattcgacgtacagctgcgacctgtaactttttttaacggatacagtgacttaatgtcgaaaatgctctctgcttcaggtgatccaataagtgttgttaagggcctcattctcctgattgaccactctcaggagctgcaactccagagcggcctgaaggcaaacattgaagtgcagggaggtctcgctatagatatctccggggcgatggaattttctctgtggtatcgagagtctaaaacgagagtcaagaatcgcgtgacagtcgtgataaccaccgacatcactgtcgacagttcatttgtaaaggccggcctggagaccagcacagaaacagaagccggacttgagtttattagcaccgtccagttctcacagtacccgtttctagtatgtatgcagatggacaaggacgaagccccatttcgacagttcgaaaaaaaatacgagaggctctctaccggccgtggttatgtaagtcagaagcggaaagagagtgtgctggccggttgtgaattccctctgcatcaggagaacagtgaaatgtgcaaggttgtgtttgcgcctcagccagactctacgtcttccggctggttc

SEQ ID NO: 5566 - DNA, 2685 bp, Artificial Sequence
  derived and/or modified sequence
atgatcctgctggccgtgctgttcctgtgcttcatcagcagctacagcgccagcgtgaagggccacaccaccggcctgagcctgaacaacgacagactgtacaagctgacctacagcaccgaggtgctgctggacagaggcaagggcaagctgcaggacagcgtgggctacagaatcagcagcaacgtggacgtggccctgctgtggagaaaccccgacggcgacgacgaccagctgatccagatcaccatgaaggacgtgaacgtggagaacgtgaaccagcagagaggcgagaagagcatcttcaagggcaagagccccagcaagatcatgggcaaggagaacctggaggccctgcagagacccaccctgctgcacctgatccacggcaaggtgaaggagttctacagctaccagaacgaggccgtggccatcgagaacatcaagagaggcctggccagcctgttccagacccagctgagcagcggcaccaccaacgaggtggacatcagcggcaactgcaaggtgacctaccaggcccaccaggacaaggtgatcaagatcaaggccctggacagctgcaagatcgccagaagcggcttcaccacccccaaccaggtgctgggcgtgagcagcaaggccaccagcgtgaccacctacaagatcgaggacagcttcgtgatcgccgtgctggccgaggagacccacaacttcggcctgaacttcctgcagaccatcaagggcaagatcgtgagcaagcagaagctggagctgaagaccaccgaggccggccccagactgatgagcggcaagcaggccgccgccatcatcaaggccgtggacagcaagtacaccgccatccccatcgtgggccaggtgttccagagccactgcaagggctgccccagcctgagcgagctgtggagaagcaccagaaagtacctgcagcccgacaacctgagcaaggccgaggccgtgagaaacttcctggccttcatccagcacctgagaaccgccaagaaggaggagatcctgcagatcctgaagatggagaacaaggaggtgctgccccagctggtggacgccgtgaccagcgcccagaccagcgacagcctggaggccatcctggacttcctggacttcaagagcgacagcagcatcatcctgcaggagagattcctgtacgcctgcggcttcgccagccaccccaacgaggagctgctgagagccctgatcagcaagttcaagggcagcatcggcagcagcgacatcagagagaccgtgatgatcatcaccggcaccctggtgagaaagctgtgccagaacgagggctgcaagctgaaggccgtggtggaggccaagaagctgatcctgggcggcctggagaaggccgagaagaaggaggacaccagaatgtacctgctggccctgaagaacgccctgctgcccgagggcatccccagcctgctgaagtacgccgaggccggcgagggccccatcagccacctggccaccaccgccctgcagagatacgacctgcccttcatcaccgacgaggtgaagaagaccctgaacagaatctaccaccagaacagaaaggtgcacgagaagaccgtgagaaccgccgccgccgccatcatcctgaacaacaaccccagctacatggacgtgaagaacatcctgctgagcatcggcgagctgccccaggagatgaacaagtacatgctggccatcgtgcaggacatcctgagattcgagatgcccgccagcaagatcgtgagaagagtgctgaaggagatggtggcccacaactacgacagattcagcagaagcggcagcagcagcgcctacaccggctacatcgagagaagccccagaagcgccagcacctacagcctggacatcctgtacagcggcagcggcatcctgagaagaagcaacctgaacatcttccagtacatcggcaaggccggcctgcacggcagccaggtggtgatcgaggcccagggcctggaggccctgatcgccgccacccccgacgagggcgaggagaacctggacagctacgccggcatgagcgccatcctgttcgacgtgcagctgagacccgtgaccttcttcaacggctacagcgacctgatgagcaagatgctgagcgccagcggcgaccccatcagcgtggtgaagggcctgatcctgctgatcgaccacagccaggagctgcagctgcagagcggcctgaaggccaacatcgaggtgcagggcggcctggccatcgacatcagcggcgccatggagttcagcctgtggtacagagagagcaagaccagagtgaagaacagagtgaccgtggtgatcaccaccgacatcaccgtggacagcagcttcgtgaaggccggcctggagaccagcaccgagaccgaggccggcctggagttcatcagcaccgtgcagttcagccagtaccccttcctggtgtgcatgcagatggacaaggacgaggcccccttcagacagttcgagaagaagtacgagagactgagcaccggcagaggctacgtgagccagaagagaaaggagagcgtgctggccggctgcgagttccccctgcaccaggagaacagcgagatgtgcaaggtggtgttcgccccccagcccgacagcaccagcagcggctggttctag

SEQ ID NO: 5567 - DNA, 537 bp, Artificial Sequence
  derived and/or modified sequence
atggccagagcccccctgagacccgagaacaccatcgtgagaggcagcgccaaccagtgccaggacacctacagagccgaggagctgaccggccacaccaccggcctgagcctgaacaacgacagactgtacaagctgacctacagcaccgaggtgctgctggacagaggcaagggcaagctgcaggacagcgtgggctacagaatcagcagcaacgtggacgtggccctgctgtggagaaaccccgacggcgacgacgaccagctgatccagatcaccatgaaggacgtgaacgtggagaacgtgaaccagcagagaggcgagaagagcatcttcaagggcaagagccccagcaagatcatgggcaaggagaacctggaggccctgcagagacccaccctgctgcacctgatccacggcaaggtgaaggagttctacagctaccagaacgaggccgtggccatcgagaacatcaagagaggcctggccagcctgttccagacccagctgagcagcggcaccaccaacgaggtgtag

SEQ ID NO: 5568 - DNA, 1551 bp, Artificial Sequence
  derived and/or modified sequence
atgatcctgctggccgtgctgttcctgtgcttcatcagcagctacagcgccagcgtgaagggccacaccaccggcctgagcctgaacaacgacagactgtacaagctgacctacagcaccgaggtgctgctggacagaggcaagggcaagctgcaggacagcgtgggctacagaatcagcagcaacgtggacgtggccctgctgtggagaaaccccgacggcgacgacgaccagctgatccagatcaccatgaaggacgtgaacgtggagaacgtgaaccagcagagaggcgagaagagcatcttcaagggcaagagccccagcaagatcatgggcaaggagaacctggaggccctgcagagacccaccctgctgcacctgatccacggcaaggtgaaggagttctacagctaccagaacgaggccgtggccatcgagaacatcaagagaggcctggccagcctgttccagacccagctgagcagcggcaccaccaacgaggtggacatcagcggcaactgcaaggtgacctaccaggcccaccaggacaaggtgatcaagatcaaggccctggacagctgcaagatcgccagaagcggcttcaccacccccaaccaggtgctgggcgtgagcagcaaggccaccagcgtgaccacctacaagatcgaggacagcttcgtgatcgccgtgctggccgaggagacccacaacttcggcctgaacttcctgcagaccatcaagggcaagatcgtgagcaagcagaagctggagctgaagaccaccgaggccggccccagactgatgagcggcaagcaggccgccgccatcatcaaggccgtggacagcaagtacaccgccatccccatcgtgggccaggtgttccagagccactgcaagggctgccccagcctgagcgagctgtggagaagcaccagaaagtacctgcagcccgacaacctgagcaaggccgaggccgtgagaaacttcctggccttcatccagcacctgagaaccgccaagaaggaggagatcctgcagatcctgaagatggagaacaaggaggtgctgccccagctggtggacgccgtgaccagcgcccagaccagcgacagcctggaggccatcctggacttcctggacttcaagagcgacagcagcatcatcctgcaggagagattcctgtacgcctgcggcttcgccagccaccccaacgaggagctgctgagagccctgatcagcaagttcaagggcagcatcggcagcagcgacatcagagagaccgtgatgatcatcaccggcaccctggtgagaaagctgtgccagaacgagggctgcaagctgaaggccgtggtggaggccaagaagctgatcctgggcggcctggagaaggccgagaagaaggaggacaccagaatgtacctgctggccctgaagaacgccctgctgcccgagggcatccccagcctgctgaagtacgccgaggccggcgagggccccatcagccacctggccaccaccgccctgcagagatacgacctgttccacaactag

SEQ ID NO: 5569 - DNA, 2685 bp, Artificial Sequence
  derived and/or modified sequence
atgatcctcctcgctgtcttgtttctttgctttatctcctcctacagtgccagcgtcaaaggacataccactggactcagcctgaataatgaccgcctttacaagctaacttacagcaccgaggtcctccttgaccgcggtaagggaaagctccaggattcagtgggatataggatctcatcgaacgtcgatgttgctttgttatggagaaacccagacggagacgatgatcagctgatacagatcactatgaaggatgtgaacgtggaaaatgttaatcagcagagaggggaaaagagcattttcaaaggaaaaagtccctctaaaattatgggtaaagaaaacctggaagcattgcaaagaccaaccctcctgcacttgatccacggtaaggtcaaagaattttattcttatcaaaacgaggctgtcgctattgagaatataaaacgcggacttgccagccttttccagacacaactgagctctgggaccaccaacgaagtggacattagcgggaactgtaaagtaacctaccaggcccaccaggataaggtgataaaaattaaggctctggacagttgtaagatcgccagatccggctttacgacaccgaaccaggtcttaggggtgagtagcaaagccacgtcagtcactacgtacaagatagaagattcttttgtcatcgccgtgcttgcagaagaaactcataattttgggttgaatttcctgcagaccataaaaggtaagattgtttcaaagcagaagctggaactgaaaactaccgaggccgggcccaggctcatgagcggcaaacaggcagctgctatcatcaaggcagtggattccaagtacactgcaattcccattgtcgggcaggtctttcagtctcattgtaagggctgcccatccctcagcgagctttggcgtagcactaggaagtatcttcagccagacaatttgagcaaggctgaagctgtgcgcaacttcctggctttcatccagcatctacgcactgcaaagaaggaagagatcttgcaaatccttaaaatggaaaataaggaagtgttgccacagttggtggatgcagtcactagcgctcagacctctgattcactcgaggccatcctggactttctggacttcaaaagcgactccagtatcatcctgcaagagaggttcttgtacgcttgcgggttcgcttcccaccccaacgaagaattgcttcgcgccctgatctccaaattcaaaggcagtatcggctccagcgacataagggagaccgtgatgataatcaccggcactctggttagaaaactatgtcaaaatgaggggtgtaaactgaaggctgtggtggaggccaaaaaactgatccttgggggcctggagaaggcagagaaaaaggaggatacaagaatgtacctgctggccctgaaaaatgcactgctgccagaaggaatccccagcctgttgaaatacgctgaggccggcgaaggacctatcagccacttagcaaccacagcgttacagagatacgacctgccgtttatcaccgatgaagtcaaaaaaacactgaacagaatataccaccagaatcgcaaagtgcatgagaagactgtgaggacagccgctgctgcgatcattttaaacaacaacccctcctatatggatgtaaagaatattctcctaagtattggtgagctgccccaggagatgaataagtacatgttagccatcgtgcaggacatcctgagattcgagatgccagccagtaagattgttcgaagagtgctgaaggagatggttgctcataattacgacaggttctcacgcagtggctcatcttccgcctacacgggctacatcgagaggtcaccccggtctgcctccacctattccttagatatactttacagcggaagcggaatcctcaggcgttctaatctgaatatctttcaatatatcggcaaagcgggcttgcacggttcccaagtcgtgattgaagctcagggcctggaggccctcattgcagccaccccagacgaaggggaagagaatctggactcatacgccgggatgagcgccatcctattcgatgtgcaacttcgacccgtgactttttttaacggctacagtgaccttatgtcaaaaatgctgagtgcttcgggagatcccatctccgtggtgaaaggactgatcctgctcattgaccacagtcaggaattacaactgcagtctgggctgaaggccaacatcgaagttcagggagggctagctattgatatatctggcgccatggagttttctttgtggtatcgcgagagcaaaacccgcgtgaagaaccgggttaccgtagtgattacgaccgatattactgttgattctagttttgtcaaggcagggttggagactagtactgaaacagaagccggtctggagttcatttccacggtgcaattctcccagtaccctttcctcgtttgcatgcagatggacaaggacgaagcaccttttcgccagttcgaaaaaaaatacgagagactctctaccggtagagggtacgtttctcagaagcgaaaggagagcgtgttagccgggtgtgagttcccactacatcaagagaacagtgagatgtgcaaagttgtgttcgcaccacagcctgacagcactagctccggctggttttag

SEQ ID NO: 5570 - DNA, 2685 bp, Artificial Sequence
  derived and/or modified sequence
atgatcttgctggccgtgctttttttgtgctttatttcaagctatagcgcaagtgtgaaaggacacactactgggctgtcgctcaataacgaccgactctacaagctgacatactccactgaagtccttctggacagggggaaggggaaactgcaggactcagtaggctacagaatatcttctaatgtggacgtcgcccttttatggagaaacccagatggggacgacgaccagctgattcagatcactatgaaagatgtgaacgtggaaaacgtcaaccagcagcggggcgaaaagagtatctttaaaggcaaatcccccagtaagattatggggaaagagaatctcgaggctctgcagcgcccaaccctactgcatcttatccatgggaaagtgaaggagttttattcataccagaatgaagctgtagccatcgagaacatcaagagggggttggcaagcctgttccagacgcagttaagctccggaacaactaatgaagtggacatttctggaaactgcaaggtgacttatcaggcacatcaggacaaggtgatcaaaatcaaagccttagattcttgcaagatagcgagatctggattcaccaccccaaaccaggttctaggagtttccagcaaggctacatccgtgacaacttacaaaatcgaggactccttcgtcattgccgtgctggcagaagaaactcacaattttggactgaattttctgcagaccatcaaaggaaagattgtttccaagcaaaagctggaactcaaaacgactgaggctggcccacgcctgatgtccggcaagcaggcagccgctatcataaaggctgtggatagcaaatacaccgccatccctattgttgggcaggtgtttcaatcgcactgcaagggatgtccatctttgtccgaattgtggcggtcgaccagaaagtatctccagccagataacctgtcaaaggccgaagcagtgcgcaattttttggctttcattcagcacctgcgcactgctaagaaagaagagatactgcaaattctgaaaatggaaaataaagaggtattgccacagctggtggacgccgtcacatcagcccagacatccgactcactggaggccattcttgattttctggacttcaaatcggattcttcaataatcctccaggagagatttctgtatgcttgtggatttgcttcacaccccaacgaggaactcctgagagccctaattagcaaattcaaggggtcaataggaagttccgatatccgggagaccgtcatgatcatcacaggtaccctggtacggaaactctgtcagaatgaagggtgtaaactgaaagctgttgtcgaagctaagaagttaatcttaggtggactggagaaggctgaaaagaaggaagacacccgcatgtatttgctagctctgaagaatgctctgcttcccgagggcattcctagcctgctcaaatatgcggaggcgggtgaagggcccatctctcatcttgcaaccacagcgcttcaaaggtacgacctgccatttatcactgatgaggtcaaaaagaccttaaataggatctatcaccagaatcgtaaagtgcacgagaagacagtccgaaccgctgccgccgctattattctgaacaataacccctcttacatggacgtgaagaatattctactgtcaatcggcgagttgcctcaggagatgaataagtatatgctggctatcgttcaagatattcttagatttgaaatgcctgcttctaagatagtacgaagagtgctgaaggaaatggtggcccataactacgacagattctccaggagtggctcaagtagtgcctataccggttacatcgagaggagtcccagatcagcttccacttattccttggatatcctgtactcaggctctgggatcctgaggcggagtaaccttaacattttccagtatatcggcaaggcagggctacacggctctcaggtagttatcgaagcccagggactcgaggcgttgatcgcagccactccggatgaaggagaggaaaacctggacagttatgcagggatgtctgccatcctgttcgatgtgcagttaagaccggtgacctttttcaacgggtacagtgatttaatgtccaagatgctgagcgcctctggagaccccatcagcgtggtgaaagggcttatactcctgatcgatcatagtcaggagctccaattgcagagcgggcttaaggcaaatatcgaagtacagggaggcttagctatcgatatctcgggcgccatggaattctcactgtggtaccgtgagagcaaaacaagggtgaaaaatcgagtcaccgttgtaattaccaccgatatcacagtcgactctagctttgtgaaggccggactcgagacatctacagaaaccgaggccggcctcgagtttatttcaaccgtgcagttctctcagtatccatttttggtgtgtatgcagatggacaaagacgaggcccccttcagacagttcgaaaagaaatatgagcggttaagtactgggcgaggctacgtgagccagaagagaaaagaatccgtgttggcagggtgtgaattcccgctgcaccaggagaattctgagatgtgcaaggttgttttcgcccctcagcccgatagcacatccagcggctggttctag

SEQ ID NO: 5571 - DNA, 537 bp, Artificial Sequence
  derived and/or modified sequence
atggccagagccccgctgcggcccgaaaatactattgtgcgcggcagcgcaaatcagtgtcaggatacctacagggcagaagagcttaccggacacaccaccgggctaagtctgaataacgacagactgtataaattaacctattccacagaggtactgctggacagaggcaaggggaaactgcaggatagcgtgggctatagaataagctcgaatgttgacgtcgccctgctgtggaggaacccagatggtgatgatgatcagctcatacagatcacgatgaaagacgtgaacgtggaaaatgtgaatcagcagcgtggggagaaaagcatcttcaaagggaaatctccgagcaaaatcatgggcaaggaaaaccttgaagcattacaacgcccaacccttttgcatctcattcacggcaaggtgaaggagttctactcatatcagaacgaggccgtagcgatagaaaacataaagcggggcctggcaagcctttttcagacacagttatccagtggtactacgaatgaggtttag

SEQ ID NO: 5572 - DNA, 1551 bp, Artificial Sequence
  derived and/or modified sequence
atgattcttcttgccgttctctttttatgttttatttcatcttatagcgcatctgtcaagggacatacaacgggactctctcttaataatgatcgactgtacaagctgacctactccaccgaggtccttctggaccgcggcaaaggcaaactacaggattcggtggggtacagaattagcagcaacgtcgatgtggccctactttggcggaatccagatggcgatgatgaccagctgatccagatcaccatgaaagacgtaaatgtcgagaacgttaaccagcaacggggcgagaaatctatcttcaagggcaagtccccctcaaagatcatgggaaaggagaatttggaggctttacagcgaccaacactgctacaccttatccacggaaaagtgaaggaattctacagttaccaaaacgaggccgtagccatcgagaacattaaacgcgggctcgcaagtctgtttcagactcagctcagtagtggaaccaccaatgaggtggacatttctggcaactgcaaggtgacctatcaggcccaccaggacaaggttatcaaaatcaaggctctggatagttgtaagattgcacggagcggttttacaacgcccaaccaggtgcttggagttagttcaaaagcaaccagcgtcaccacctacaagatcgaagactcattcgtgatcgccgtactggctgaagaaacacataactttggtcttaatttcttacagaccattaaaggaaaaattgtctctaagcagaaactggagctcaaaactaccgaagctggacccaggctaatgtctggaaagcaggcagctgcaatcattaaggcggtggatagcaaatacaccgcaatccccattgttggccaggtgttccagagtcattgcaagggttgcccatctctgtccgaactgtggcggagtacccggaagtatttacagccagataacctgagtaaggccgaagccgtccgcaacttcctcgcctttatccagcacttgcgaactgcaaaaaaggaagagattctgcagatcttgaagatggagaacaaagaggtgttgcctcaactcgttgatgccgtcacaagcgcccagacttctgattccctggaagccatactcgactttctagattttaagagtgacagcagtatcatcctccaggagcgctttttgtacgcctgtgggttcgcttctcaccccaatgaggagttgctgagagcgctcatatccaagtttaaaggcagtattggctccagtgacatccgggagactgtcatgatcataaccggcactctggtacggaaattgtgccagaacgaggggtgtaagctgaaagctgtcgtcgaagccaagaagttgatcttaggaggcctagaaaaggctgagaagaaggaggacacccggatgtatctcctggctctgaagaacgctctactgccagaaggcattccttccctccttaagtatgctgaggctggtgagggtccaatcagtcatctggctactaccgcattgcagcgctacgatctgtttcacaactag

SEQ ID NO: 5573 - DNA, 2685 bp, Artificial Sequence
  derived and/or modified sequence
atgatcctgctggccgtgctcttcctgtgcttcatcagcagctacagcgcctctgtgaagggccacaccaccggcctgagcctgaacaatgaccggctgtacaagctgacctacagcacagaggtgctgctggaccggggcaagggcaagctgcaggacagcgtgggctaccgcatcagcagcaatgtggatgtggccctgctgtggaggaacccagatggagatgatgaccagctgatccagatcaccatgaaggatgtgaatgtggagaatgtgaaccagcagagaggagagaagagcatcttcaagggcaagagccccagcaagatcatgggcaaggagaacctggaggccctgcagaggcccaccctgctgcacctgattcatggcaaggtgaaggagttctacagctaccagaatgaggccgtggccatcgagaacatcaagaggggcctggccagcctcttccagacccagctgagcagcggcaccaccaatgaggtggacatcagcggcaactgcaaggtgacctaccaggcccaccaggacaaggtgatcaagatcaaggccctggacagctgcaagatcgcccggagcggcttcaccacccccaaccaggtgctgggcgtgagcagcaaggccacctctgtgaccacctacaagattgaagattcttttgtgattgctgtgctggccgaggagacccacaactttggcctgaacttcctgcagaccatcaagggcaagatcgtgtccaagcagaagctggagctgaagaccacagaagctggcccccggctgatgtctgggaagcaggccgccgccatcatcaaggctgtggacagcaagtacacagccatccccatcgtgggccaggtgttccagagccactgcaagggctgccccagcctgtctgagctgtggaggagcaccaggaagtacctgcagcctgacaacctgagcaaggccgaggccgtgaggaacttcctggccttcatccagcacctgaggacagccaagaaggaggagatcctgcagatcctgaagatggagaacaaggaggtgctgccccagctggtggatgctgtgaccagcgcccagaccagtgacagcctggaggccatcctggacttcctggacttcaagagtgacagcagcatcatcctgcaggagcgcttcctgtatgcctgtggctttgccagccaccccaatgaggagctgctgcgggccctgatcagcaagttcaagggcagcatcggcagcagtgacatccgggagaccgtgatgatcatcaccggcaccctggtgaggaagctgtgccagaatgaaggctgcaagctgaaggctgtggtggaggccaagaagctgatcctgggcggcctggagaaggccgagaagaaggaggacaccaggatgtacctgctggccctgaagaatgccctgctgcctgagggcatccccagcctgctgaagtatgcagaggccggggagggccccatcagccacctggccaccacagccctgcagagatatgacctgcccttcatcacagatgaggtgaagaagaccctgaaccgcatctaccaccagaacaggaaggtgcatgagaagacagtgaggacagctgctgctgccatcatcctgaacaacaaccccagctacatggatgtgaagaacatcctgctgagcatcggggagctgccccaggagatgaacaagtacatgctggccatcgtgcaggacatcctgcgctttgagatgcctgccagcaagatcgtgcggcgggtgctgaaggagatggtggcccacaactatgaccgcttcagccgcagcggcagcagcagcgcctacacaggctacatcgagaggagccccaggtctgccagcacctacagcctggacatcctgtacagcggcagcggcatcctgcggcgcagcaacctgaacatcttccagtacatcggcaaggccggcctgcacggcagccaggtggtgattgaggcccagggcctggaggccctgattgctgccaccccagatgaaggagaggagaacctggacagctatgccggcatgtctgccatcctgtttgatgtgcagctgcggcctgtgaccttcttcaacggctacagcgacctgatgagcaagatgctgagcgccagcggggaccccatctctgtggtgaagggcctcatcctgctgattgaccacagccaggagctgcagctgcagagcggcctgaaggccaacatcgaggtgcagggcggcctggccatcgacatcagcggggccatggagttcagcctgtggtaccgggagagcaagaccagggtgaagaacagagtgacagtggtgatcaccacagacatcaccgtggacagcagctttgtgaaggccggcctggagaccagcacagaaacagaagctggcctggagttcatcagcacagtgcagttcagccagtaccccttcctggtgtgcatgcagatggacaaggatgaggcccccttccggcagtttgagaagaagtatgaaaggctgagcacaggccggggctacgtgtcccagaagaggaaggagagcgtgctggccggctgtgagttccccctgcaccaggagaacagcgagatgtgcaaggtggtgtttgccccccagcctgacagcaccagcagcggctggttctag

SEQ ID NO: 5574 - DNA, 537 bp, Artificial Sequence
  derived and/or modified sequence
atggcccgggcccccctgcggcctgagaacaccatcgtgcggggcagcgccaaccagtgccaggacacctacagagctgaggagctgaccggccacaccaccggcctgagcctgaacaatgaccggctgtacaagctgacctacagcacagaggtgctgctggaccggggcaagggcaagctgcaggacagcgtgggctaccgcatcagcagcaatgtggatgtggccctgctgtggaggaacccagatggagatgatgaccagctgatccagatcaccatgaaggatgtgaatgtggagaatgtgaaccagcagagaggagagaagagcatcttcaagggcaagagccccagcaagatcatgggcaaggagaacctggaggccctgcagaggcccaccctgctgcacctgattcatggcaaggtgaaggagttctacagctaccagaatgaggccgtggccatcgagaacatcaagaggggcctggccagcctcttccagacccagctgagcagcggcaccaccaatgaggtgtag

SEQ ID NO: 5575 - DNA, 1551 bp, Artificial Sequence
  derived and/or modified sequence
atgatcctgctggccgtgctcttcctgtgcttcatcagcagctacagcgcctctgtgaagggccacaccaccggcctgagcctgaacaatgaccggctgtacaagctgacctacagcacagaggtgctgctggaccggggcaagggcaagctgcaggacagcgtgggctaccgcatcagcagcaatgtggatgtggccctgctgtggaggaacccagatggagatgatgaccagctgatccagatcaccatgaaggatgtgaatgtggagaatgtgaaccagcagagaggagagaagagcatcttcaagggcaagagccccagcaagatcatgggcaaggagaacctggaggccctgcagaggcccaccctgctgcacctgattcatggcaaggtgaaggagttctacagctaccagaatgaggccgtggccatcgagaacatcaagaggggcctggccagcctcttccagacccagctgagcagcggcaccaccaatgaggtggacatcagcggcaactgcaaggtgacctaccaggcccaccaggacaaggtgatcaagatcaaggccctggacagctgcaagatcgcccggagcggcttcaccacccccaaccaggtgctgggcgtgagcagcaaggccacctctgtgaccacctacaagattgaagattcttttgtgattgctgtgctggccgaggagacccacaactttggcctgaacttcctgcagaccatcaagggcaagatcgtgtccaagcagaagctggagctgaagaccacagaagctggcccccggctgatgtctgggaagcaggccgccgccatcatcaaggctgtggacagcaagtacacagccatccccatcgtgggccaggtgttccagagccactgcaagggctgccccagcctgtctgagctgtggaggagcaccaggaagtacctgcagcctgacaacctgagcaaggccgaggccgtgaggaacttcctggccttcatccagcacctgaggacagccaagaaggaggagatcctgcagatcctgaagatggagaacaaggaggtgctgccccagctggtggatgctgtgaccagcgcccagaccagtgacagcctggaggccatcctggacttcctggacttcaagagtgacagcagcatcatcctgcaggagcgcttcctgtatgcctgtggctttgccagccaccccaatgaggagctgctgcgggccctgatcagcaagttcaagggcagcatcggcagcagtgacatccgggagaccgtgatgatcatcaccggcaccctggtgaggaagctgtgccagaatgaaggctgcaagctgaaggctgtggtggaggccaagaagctgatcctgggcggcctggagaaggccgagaagaaggaggacaccaggatgtacctgctggccctgaagaatgccctgctgcctgagggcatccccagcctgctgaagtatgcagaggccggggagggccccatcagccacctggccaccacagccctgcagagatatgacctcttccacaactag

SEQ ID NO: 5576 - DNA, 2685 bp, Artificial Sequence
  derived and/or modified sequence
atgatcctgctggccgtgctgttcctgtgcttcatcagcagctactcggcctcagtgaaaggacataccactgggctgtccctaaataatgatcggctctacaaattgacctactccacagaggtgctgttggatagaggaaagggcaagctgcaggattctgtcgggtatagaattagtagtaacgtggatgttgccctcctgtggagaaatcctgacggagacgatgaccagcttatacagatcaccatgaaagatgtgaacgtggagaatgtaaaccagcagagaggggaaaaaagcatattcaagggcaagtccccttctaaaattatgggtaaagagaatcttgaagcactccagaggccaaccctcctgcatcttattcatggcaaggtgaaggaattctatagttaccagaacgaggccgtcgccattgagaatattaagcgaggacttgcctccctcttccagacccagctgagttcaggcaccacaaacgaggtggacatctcgggcaactgtaaagttacttaccaggcccaccaggataaggtgattaaaatcaaggcacttgacagctgcaagatcgcacgcagcgggtttacaacacccaatcaggtgctcggcgtcagttcaaaggcaacaagcgtgacaacctacaagattgaggattccttcgtgattgccgtcctggctgaggaaacccacaattttggtctaaacttcttacaaaccatcaaaggaaagattgtttctaaacagaaactcgagctgaagactaccgaggcaggaccgagactgatgagcggtaagcaggccgctgccatcattaaagctgtagattccaaatacactgccatccccatagtgggccaagtttttcagtcacattgcaaggggtgcccgagcctgagcgagctatggcgctccacccgcaaatatctgcagcccgacaaccttagcaaagccgaagcagttagaaatttcttggcatttatccagcacttgcggaccgctaagaaggaagagatccttcagattttgaaaatggagaacaaggaagtattacctcaattggtggacgcagtcacgtcggctcagacatcagacagcctggaggctatccttgatttcttggatttcaaatctgacagcagcattattctgcaggagcgctttctttatgcctgcggcttcgccagtcatcctaacgaggagttgctccgcgcgcttatttccaagttcaagggatctatcggaagcagcgacatcagggaaaccgtgatgattattactgggacgcttgtcaggaagctatgccagaacgagggctgtaaattgaaagcagtagttgaggccaagaagctcatcctgggagggctcgaaaaagctgaaaaaaaggaagatactaggatgtatctgctcgccctgaagaatgctctcctacccgagggcatcccgagtttactgaaatacgccgaggctggtgaggggcctatctcacatctggccacgaccgctcttcaaagatacgacttgcccttcattacagacgaagtgaagaaaacactcaatcgtatctaccatcagaatcggaaagtgcatgaaaagaccgttcgtactgccgctgccgcaatcattctgaacaataacccttcctacatggacgtgaaaaacatcctactgtcgattggggaattaccacaggaaatgaacaaatacatgcttgccatagtgcaggatatcctaagattcgaaatgcctgcctccaaaatcgtccggagagtgctaaaggagatggtagcacacaactatgatcgattttctaggagcggatccagcagtgcctatactggctatattgaaagatccccgcgatcagcttcaacctatagcctggacatactgtactcaggaagcggaatcctccggaggtctaacttgaatatatttcagtacatcggcaaagctggccttcacggatcacaagtggtgatcgaggcccagggtctggaagctctgatagccgcgacccccgacgaaggggaggaaaatctagattcttatgcagggatgagtgccattctgtttgacgtgcagttgcggcccgttactttttttaacggttactctgatcttatgtcaaagatgctgtctgcatctggggaccccatttcagtcgtgaagggattaattttactcatcgatcacagccaggagctgcagctccagtccggcctgaaggccaatatcgaagtgcaaggagggttggccatcgacatctccggagcgatggaatttagtttgtggtatcgggagtcaaaaacacgggtcaaaaatcgcgtcacagtggtaatcacaacagacatcactgtcgattccagctttgtgaaggcagggctggaaacgtcaaccgaaactgaggctggactcgagtttattagtactgttcaattctctcagtacccttttttggtatgcatgcagatggacaaggatgaggccccgtttaggcagtttgaaaagaagtatgaaagactgtccacaggaaggggctacgttagccagaagcgaaaggagtccgttcttgccggttgcgagtttccccttcaccaggagaactcagagatgtgcaaagtcgtattcgccccccaaccagatagtaccagcagcggatggttctag

SEQ ID NO: 5577 - DNA, 2685 bp, Artificial Sequence
  derived and/or modified sequence
atgatcctgctggccgtgctgttcctgtgcttcatcagcagctactctgcatcagtcaaaggacacacgactgggctgagcctgaacaacgataggctatataagcttacatatagcaccgaagttcttctggatcgtgggaaaggcaagctgcaagattctgtagggtaccggatttcatccaatgttgatgtggctttgctgtggagaaaccccgatggagatgacgatcagctgattcagattaccatgaaggatgtgaatgtggaaaacgtgaatcagcagagaggcgagaagagtattttcaaggggaagtccccttcaaagattatggggaaggagaacctggaggctctgcagcggcctaccctattgcacctgatacacggcaaagtgaaggaattttactcgtatcagaacgaggcagtagccatcgagaacataaaaaggggactcgcatctctgtttcagacacagctatcttcaggaactactaacgaggtggatataagcggaaactgtaaagtgacttaccaggcacatcaagacaaggtcataaagatcaaggccctcgatagttgcaagattgcaagatctgggtttaccacacccaatcaagttctgggcgtcagctcgaaagccacgtcagtgactacctacaagatcgaagactccttcgtgatcgctgtgttggccgaggagacgcataacttcggtctgaacttcctccagacgattaagggcaaaattgttagtaagcagaagctcgaactgaaaaccaccgaggctggcccgaggctcatgtcagggaagcaagccgccgcaatcattaaagccgtggatagcaagtatacagcaatcccaatcgtaggtcaggtcttccagtcccattgcaagggatgcccctccctgtcagagctctggcggtccacccggaaatatctgcagcccgataacctctccaaggcggaggctgtgcggaactttttggcattcatccagcatttgcgaaccgcaaagaaggaggagattttgcagatactgaaaatggagaacaaggaggtgttgcctcaacttgttgatgcagtcactagtgcccagacttcagactcgctcgaagctatcctcgattttctggacttcaaatcagattcatcaattatactgcaggagcggttcctgtatgcttgcgggttcgcctctcatcccaacgaagaattacttcgggcactaatttcgaagtttaagggctctattggcagctccgacatccgggagaccgtcatgataatcaccggcacccttgttcggaaactgtgtcagaacgagggctgcaagctcaaagctgtagtggaggccaagaagttaatactgggtggcttagagaaggctgagaagaaagaggacacacgcatgtacctgctcgctctaaaaaatgcccttttgcccgaaggcatcccatcactattgaagtacgccgaggctggcgagggaccaatctctcatttggcgacaaccgctctgcagaggtatgacctgccatttattaccgatgaggtaaaaaagactttgaatcggatttatcaccagaaccgcaaggtgcacgagaagactgtgagaaccgccgccgcagcgattattctgaacaacaatcctagctacatggatgttaagaacattttgctgagcatcggcgagttgccacaagaaatgaacaagtacatgctagctattgttcaggacatattacggttcgaaatgcctgcgagcaaaatcgtcagacgggtcctgaaggagatggtagcacacaattacgacagattcagccggagtggtagctccagtgcttatactggatacattgaaaggtccccccgctcggcctcaacctactcactggatatattgtacagtggctctggcattttgcgaaggtcaaacttgaacattttccagtatatcggcaaagcaggcttacacgggagccaggtcgttattgaggcccaggggcttgaagcactcattgctgcaacacccgatgagggcgaagagaatttggacagttacgcaggaatgtcggcaattctgttcgacgtgcagttaaggcctgtgaccttcttcaacggttactccgacctgatgagtaagatgctatcagcctccggagacccaatctccgttgttaaggggctgattctcctcatcgatcacagtcaggagctccaacttcagagtggcttaaaggctaacattgaagtacagggcggcctagccatagacatcagcggagccatggagttctccctttggtatcgggaaagcaagacacgggtaaaaaaccgagtgacagtggtgatcaccaccgatattactgtggacagctccttcgtaaaggcaggcctggagacctccaccgaaactgaggcaggtctggagtttatctctactgtccagttcagtcagtatccatttcttgtgtgtatgcagatggataaagatgaggcaccttttcgacagtttgaaaaaaaatacgagagactgagcactggacgtgggtatgtctcacagaaaagaaaggagagcgtgttggcagggtgtgagtttccactgcatcaggaaaactccgagatgtgcaaggtggtattcgcaccccagcccgatagtacatcctcaggctggttctag

SEQ ID NO: 5578 - DNA, 537 bp, Artificial Sequence
  derived and/or modified sequence
atggcccgggcccccctgcggcccgagaacaccatcgtgcggggctctgccaatcaatgccaggacacataccgggcagaggagttgacaggtcacactaccggcctgagcctgaataatgatagactctataagctgacatattccactgaggtgctgcttgaccggggcaaagggaagttgcaggacagcgtggggtaccggattagctccaacgtcgacgtcgctctgctatggaggaatcctgatggggacgatgaccagctgattcagatcactatgaaggacgtcaatgtggagaacgtcaatcaacagagaggggagaaatctattttcaagggcaaaagcccttcaaagattatgggcaaggagaacctcgaggccctccagagacccacactgctgcatctgattcacggcaaggtaaaagaattctactcttatcaaaatgaggcagtggctattgaaaatatcaagagggggctagctagcctgttccagacccaactgagctccggcaccactaatgaggtgtag

SEQ ID NO: 5579 - DNA, 1551 bp, Artificial Sequence
  derived and/or modified sequence
atgatcctgctggccgtgctgttcctgtgcttcatcagcagctactcggcaagtgtcaaaggccatactactggcctgtctctgaacaacgatcggttgtataaactgacctacagtacagaggttctactagatagaggtaaaggcaaactgcaggactccgtgggataccgcatatctagcaatgtggatgtggctctcttgtggaggaatccagacggggatgacgaccaacttatccagatcacaatgaaagatgtcaacgttgagaacgtgaaccagcagcggggagaaaaatccatatttaaaggaaagagcccttcgaagataatgggaaaagagaacttagaggcgctgcagcgtcccactctgctgcatctcatccacggcaaggtgaaagaattctattcctaccaaaatgaagccgtagcaatagagaacataaaaagaggactggcttcgctcttccagacgcagttatcaagcggtacaaccaacgaagtggacataagtgggaattgcaaagtaacttatcaggcgcatcaggacaaggtgattaagattaaagcattagattcctgtaaaattgccagaagtggcttcaccacacctaaccaggtactgggggtctcaagcaaggcaacttctgtaaccacatacaagattgaagatagctttgttatcgccgtcttggcagaggagactcataactttggcttgaattttttgcagacgatcaagggcaagatcgtctctaaacagaagctggaacttaaaacgactgaggctgggccacgactgatgtcagggaaacaagctgccgccatcatcaaggcggtggactcaaaatatactgccatccctatcgttgggcaggtcttccaatcgcattgcaaaggctgtccatccctgagtgagctgtggcgaagtacgagaaaatatctgcagcctgacaacctttctaaagccgaagccgttcgcaattttctagcttttatccagcatctccgtacagccaagaaagaggaaatcttacagattctaaagatggagaacaaagaagttctcccgcagctcgtggacgccgttacaagcgcacagacaagtgactccttggaggccatactagactttctcgactttaagtcagattcctcgatcatcttacaggaacgctttctatacgcttgtggattcgcaagccaccctaacgaagagctgctgagggctctgatttctaagtttaaaggaagcatcgggagttcagatataagagagacagtcatgatcatcacaggaaccctggtaaggaaactgtgtcagaacgaaggttgtaagctgaaggccgtagtggaagctaagaaactgatactgggcgggctggaaaaagccgagaaaaaagaggacacccgcatgtatctgttggctctcaagaatgccctcttacctgaaggcatcccatccctgctgaagtacgccgaggcaggagagggtccaatctctcatctcgccacgaccgcactccagaggtacgatctgttccataactag

SEQ ID NO: 5580 - DNA, 2685 bp, Artificial Sequence
  derived and/or modified sequence
atgattctcctagccgtattgttcctgtgtttcattagctcttattcagctagtgtcaaaggccacacaacaggcctatcactcaacaacgacaggctgtacaaactgacttatagcactgaggtgctcctagaccgcggaaagggaaagttacaggattctgtggggtacagaatatcaagcaacgtggatgtggcgctcctgtggaggaaccccgacggagacgatgaccaactgattcaaatcactatgaaagacgtgaatgttgagaacgtgaaccaacaaagaggagagaaatctatctttaagggcaagagcccttcaaagattatgggcaaggagaatctcgaagctctgcagaggccgactttgctccacttaatacacggcaaggtgaaggaattctacagttaccagaacgaggcagttgcgattgagaacattaagagaggactcgcctcacttttccaaacgcagcttagcagtggcaccaccaacgaggtagacatctctggtaattgcaaagtgacttatcaagctcaccaggataaagtgataaagatcaaagccctggattcgtgtaaaattgcacgcagtggttttactacccccaaccaagtgctgggggtgtcctccaaagccaccagcgttacaacctataagatagaagattcctttgtgatcgccgtgctcgctgaggaaacgcataattttggcctgaatttcctgcaaaccattaaaggaaaaatcgtctctaagcagaaactggaactaaaaaccacagaagctgggcctaggctgatgagtgggaaacaggctgcagccataataaaggccgtcgactcaaagtatacagcaatccccatcgtaggtcaggtgtttcagtcccattgcaagggctgtccttcccttagtgagctgtggagaagcaccagaaaataccttcagcctgacaatttgtcaaaagctgaggccgtgagaaacttcctggcgttcatacaacatctcagaaccgccaagaaggaagagatattgcagattttaaagatggagaataaggaagtgttgccgcagctagtcgacgccgtaacctcggcccagacctctgatagtttggaagctatcttggattttctggattttaagtccgacagtagcatcatccttcaggagcggtttctttacgcttgcggtttcgcctcacacccaaatgaagaactcctcagggcacttatcagtaaatttaaagggtccatcggttccagcgatattcgagaaacggtgatgatcatcaccggcacattggtcagaaagctgtgccagaacgaggggtgcaagttaaaggcggtggtggaggccaagaaactgatattgggtggcctggaaaaagcggagaaaaaggaggacaccagaatgtatctcctcgccctaaaaaacgcactgctgcctgagggcattccttccctgctgaaatatgcagaagcgggagagggccctatttcacacctcgccaccactgctctgcaaagatacgatctgccgttcatcaccgacgaggtgaaaaaaaccctcaatcgaatctaccatcaaaacaggaaggtgcatgagaaaaccgttagaacggccgctgccgcaatcattttgaacaataacccatcctatatggacgttaagaatattttgctatcaatcggtgagctgcctcaggagatgaataagtacatgctggctattgtgcaagacattctccgcttcgagatgccggcatccaaaatcgtgcgcagggttctgaaggagatggttgcccacaattacgatagattctcgcggtctgggtccagctcagcttatacgggctatattgagcgctcccccaggagtgctagcacgtacagcctggatatactgtactctggatccgggatactccgtcgctcgaacctaaacatatttcagtacataggtaaggccggactgcatggtagccaagtcgttattgaggcccaggggcttgaggctctcattgccgcaaccccggacgaaggagaagagaatctggattcctatgctggaatgagcgctattctttttgacgtgcagttgagacccgtaactttttttaacggatacagcgatctcatgtcaaaaatgctctccgcctctggagaccctatatctgttgttaagggactgattttactgatcgatcacagccaggaattgcagcttcaaagcggcctcaaggccaacatcgaggtccagggaggtctcgcaattgacatctccggagccatggagttttctctttggtatagggaaagtaaaactcgtgttaagaatagggtaacggttgtgattacaaccgatataaccgtcgatagctcttttgtcaaggccggacttgagacctccaccgagaccgaggcaggactggagtttattagcacggtgcagttcagtcagtatccattccttgtgtgcatgcagatggataaggatgaagctccctttcgccagtttgagaagaaatacgagaggctgagcacagggcgagggtatgtgagtcaaaagcggaaggagagtgtactcgccggatgtgaattccctcttcatcaggagaatagcgaaatgtgcaaggtggtgttcgcgcctcagcccgatagtacttcgagcggttggttttag

SEQ ID NO: 5581 - DNA, 2685 bp, Artificial Sequence
  derived and/or modified sequence
atgatcctcctggcagtcctgtttctgtgcttcatcagctcatactcagcttctgtgaaaggtcacaccactggactcagcctcaacaatgataggctctacaaattgacatactcaactgaggtgctgctcgacagaggcaagggcaagctacaggacagcgtgggttatagaatctcatcaaacgttgatgtcgccctgctgtggcgcaacccagacggcgatgatgaccagctgatccagataactatgaaggacgtaaacgtggagaatgttaaccagcagaggggagagaaaagcatattcaaaggaaagagtccttcaaagattatgggaaaggagaaccttgaggctctccaaagaccaactttacttcatctgattcatggcaaagtgaaagagttttacagctatcagaatgaagccgtggctattgaaaatattaagagggggctggcttccctcttccagactcaactttcctccggcaccacaaatgaagtggacataagtggcaactgcaaagtgacttatcaggcccatcaggacaaggttattaagatcaaagctcttgacagctgcaaaatagctcgtagcggctttaccactcccaaccaggtgctgggggttagttccaaagcaaccagcgtaacaacttacaagattgaagactctttcgtgatcgcagtactggcagaagagacacacaacttcggtctgaattttttacaaactattaaagggaagatcgtgagcaaacaaaagctagagctgaagacgacggaagccggtcctaggctcatgagcggaaagcaggcagccgcaatcattaaggcagtggactccaaatacactgccatacccatcgttggacaagtgttccagtcccactgtaagggctgcccttctctgtcggaactgtggcgcagcaccagaaagtatctccagccggataatctcagtaaggcagaagcagtccgaaactttcttgcattcatccagcacttgcgcactgccaaaaaagaggaaatcttgcagattttgaagatggaaaataaggaagtacttccgcagctcgttgacgccgtgacgagcgcgcagacatccgattctcttgaggccatcttggatttccttgactttaagtctgactcatccatcatcctgcaggaacgatttctttacgcttgtggttttgcctctcatcctaacgaggaactgttacgcgctctgattagtaagtttaaagggagcattgggtcatctgacattcgcgagacagtcatgatcatcactgggaccttggtgcgtaagctttgtcagaatgagggctgcaaactcaaagctgtggtcgaggccaaaaaactgatccttggcggattggaaaaggccgaaaagaaggaggacacccgtatgtatctgctggccctgaaaaatgcattgttacccgaggggataccatctctgctcaaatacgctgaagccggagaggggccaatttcccacctcgccaccacagcccttcagaggtatgacctgccctttattaccgatgaggtcaagaagacccttaacagaatttaccaccagaaccggaaggtgcatgaaaaaacggtgaggaccgctgccgcagccattattctcaataataatcctagctacatggatgtgaaaaatatcttactctccatcggggaacttccacaggagatgaacaaatatatgctcgctatagtccaggacattctgagatttgagatgccagcatccaaaatcgtccggagagttctcaaggaaatggtcgcacacaactatgacagattctcaagatcaggctccagcagcgcctatacaggttatatcgaacggagccctcggtccgcctcgacctactctctggatatcctctattcgggtagcggcattctgagaaggagtaatctcaacattttccaatacataggcaaagctggcctgcacggctcccaagtagttatagaggctcagggcctggaggcgctgatcgccgctacccctgatgaaggggaagagaacctggattcctatgctggtatgtcagccatcctatttgatgtacagcttcgccctgtcacattcttcaatggttacagtgacctcatgagcaaaatgctttctgccagcggggaccccattagcgtggtgaagggtctgatcctgttgatcgatcacagccaagagctgcagctgcagtccgggctgaaagctaacatcgaggtccaagggggattggcgattgacatttccggggctatggagttcagcctatggtatagggagtctaaaacccgcgttaaaaaccgagtaaccgtcgtcatcaccacagacatcacagttgacagctctttcgtgaaagcagggcttgagaccagcaccgaaaccgaggcagggctggagtttatttcgaccgtccaattctcacaatacccatttctagtttgcatgcagatggataaggatgaagcccctttcaggcagtttgagaaaaaatacgaaagactgtctaccggaaggggatacgtgtcccagaaaaggaaggaatcagtcctcgctggttgtgagttccctctccaccaggagaatagcgaaatgtgtaaagtcgtctttgcgcctcagcctgactctacttctagtggctggttctag

SEQ ID NO: 5582 - DNA, 537 bp, Artificial Sequence
  derived and/or modified sequence
atggcaagggctccattgcgaccagagaatactatcgtccggggttccgcaaaccagtgtcaagatacctaccgagcagaggagctgactgggcacaccacaggcctctcccttaacaacgacaggttatataagctcacttattccacagaagttctcctcgatcggggaaaggggaagctccaggactctgtcggatatcgaatctctagcaacgtggacgtggcccttctctggcgcaatcccgacggagatgatgatcagttgattcagatcaccatgaaagatgtcaacgtcgagaacgtgaatcagcagagaggtgaaaagtcaatttttaaaggcaaatctccaagtaaaattatgggtaaagaaaacctggaggctctgcagcgccctaccctgctgcatctgatacatgggaaagtcaaagaattctatagttatcagaacgaggccgtggccattgagaacatcaaaaggggactcgcatctttgttccagacacagctttcctctgggaccacaaatgaggtctag

SEQ ID NO: 5583 - DNA, 1551 bp, Artificial Sequence
  derived and/or modified sequence
atgattctgctggctgtgcttttcctgtgcttcattagctcctactcagccagtgtgaagggccatacaacagggctgagtcttaataacgacagactgtataaactcacctactccaccgaggtgttactcgaccgaggtaagggaaagcttcaagactccgtcgggtaccgcatctcctcaaatgtcgatgtggcgcttttatggcggaatcccgacggcgatgacgaccagctcattcagattactatgaaggatgttaatgtcgagaacgtgaaccagcagcgcggagagaaaagcatcttcaagggcaagtctcccagcaagatcatgggcaaagaaaatttggaagcgctgcaaaggccaacacttctccacctgattcatggcaaggttaaagagttctattcttatcagaacgaagctgtggccatcgagaacattaagcgcggactggcgagccttttccagacccagctgtctagtggaactacaaacgaggtggacatttctgggaattgtaaggtaacataccaggctcatcaagataaagtaatcaagatcaaagcgctcgattcatgtaagatcgcccgaagtggatttaccacgcctaaccaggtattgggtgtttcatccaaagccacgagcgtaaccacctacaagattgaggacagttttgttattgcagtgctggcagaggagacccacaactttggtttaaattttttacaaacaatcaaggggaagatcgtgtctaagcaaaaactggagctgaaaaccacagaggctggtccgcgtttaatgtccggaaagcaggccgctgcaattatcaaggcagtggactcgaagtacaccgctatcccaattgtcggccaagtgtttcagtcgcattgcaaaggatgcccctctctgtcggagctgtggaggtccactagaaagtatctgcagccggacaatctctccaaagctgaggccgtgagaaacttcctggccttcatccagcacctccgcacagcgaagaaagaagaaatcctgcagatcctgaaaatggagaacaaggaagtcctaccacagctggtggatgcagttacctccgcccagacttcggacagtttggaagcaattttggacttccttgattttaaatccgactctagcatcattttgcaggagcggtttctttatgcctgcggttttgcttcgcaccctaatgaagagctactcagagctctgatctctaagtttaagggctcaattggtagcagtgatatccgggaaaccgttatgattattacaggaacattggtgagaaaactctgtcagaatgaaggatgtaaactgaaagccgtggtggaggcaaaaaaactgatcttgggcggactcgaaaaagccgaaaagaaagaagatacacggatgtatctcctggctctgaagaatgctcttctcccggagggcataccctctttactaaagtatgccgaagctggtgaagggccaataagccatcttgcgacgactgctctccagaggtacgacctgttccacaattag

SEQ ID NO: 5584 - DNA, 4037 bp, Artificial Sequence
  derived and/or modified sequence
acctacgtttaatcattaatagtgagcccttcagtgaacttaggtcctgattttggagtttggagtctgacctttccccaaagataaacatgattgttgcaggttctgaagagggtcactccctcactggctgccattgaaagagtccacttctcagtgactcctagctgggcactggatgcagttgaggattgctggtcaatatgattcttcttgctgtgctttttctctgcttcatttcctcatattcagcttctgttaaaggtcacacaactggtctctcattaaataatgaccggctgtacaagctcacgtactccactgaagttcttcttgatcggggcaaaggaaaactgcaagacagcgtgggctaccgcatttcctccaacgtggatgtggccttactatggaggaatcctgatggtgatgatgaccagttgatccaaataacgatgaaggatgtaaatgttgaaaatgtgaatcagcagagaggagagaagagcatcttcaaaggaaaaagcccatctaaaataatgggaaaggaaaacttggaagctctgcaaagacctacgctccttcatctaatccatggaaaggtcaaagagttctactcatatcaaaatgaggcagtggccatagaaaatatcaagagaggtctggctagcctatttcagacacagttaagctctggaaccaccaatgaggtagatatctctggaaattgtaaagtgacctaccaggctcatcaagacaaagtgatcaaaattaaggccttggattcatgcaaaatagcgaggtctggatttacgaccccaaatcaggtcttgggtgtcagttcaaaagctacatctgtcaccacctataagatagaagacagctttgttatagctgtgcttgctgaagaaacacacaattttggactgaatttcctacaaaccattaaggggaaaatagtatcgaagcagaaattagagctgaagacaaccgaagcaggcccaagattgatgtctggaaagcaggctgcagccataatcaaagcagttgattcaaagtacacggccattcccattgtggggcaggtcttccagagccactgtaaaggatgtccttctctctcggagctctggcggtccaccaggaaatacctgcagcctgacaacctttccaaggctgaggctgtcagaaacttcctggccttcattcagcacctcaggactgcgaagaaagaagagatccttcaaatactaaagatggaaaataaggaagtattacctcagctggtggatgctgtcacctctgctcagacctcagactcattagaagccattttggactttttggatttcaaaagtgacagcagcattatcctccaggagaggtttctctatgcctgtggatttgcttctcatcccaatgaagaactcctgagagccctcattagtaagttcaaaggttctattggtagcagtgacatcagagaaactgttatgatcatcactgggacacttgtcagaaagttgtgtcagaatgaaggctgcaaactcaaagcagtagtggaagctaagaagttaatcctgggaggacttgaaaaagcagagaaaaaagaggacaccaggatgtatctgctggctttgaagaatgccctgcttccagaaggcatcccaagtcttctgaagtatgcagaagcaggagaagggcccatcagccacctggctaccactgctctccagagatatgatctccctttcataactgatgaggtgaagaagaccttaaacagaatataccaccaaaaccgtaaagttcatgaaaagactgtgcgcactgctgcagctgctatcattttaaataacaatccatcctacatggacgtcaagaacatcctgctgtctattggggagcttccccaagaaatgaataaatacatgctcgccattgttcaagacatcctacgttttgaaatgcctgcaagcaaaattgtccgtcgagttctgaaggaaatggtcgctcacaattatgaccgtttctccaggagtggatcttcttctgcctacactggctacatagaacgtagtccccgttcggcatctacttacagcctagacattctctactcgggttctggcattctaaggagaagtaacctgaacatctttcagtacattgggaaggctggtcttcacggtagccaggtggttattgaagcccaaggactggaagccttaatcgcagccacccctgacgagggggaggagaaccttgactcctatgctggtatgtcagccatcctctttgatgttcagctcagacctgtcacctttttcaacggatacagtgatttgatgtccaaaatgctgtcagcatctggcgaccctatcagtgtggtgaaaggacttattctgctaatagatcattctcaggaacttcagttacaatctggactaaaagccaatatagaggtccagggtggtctagctattgatatttcaggtgcaatggagtttagcttgtggtatcgtgagtctaaaacccgagtgaaaaatagggtgactgtggtaataaccactgacatcacagtggactcctcttttgtgaaagctggcctggaaaccagtacagaaacagaagcaggcttggagtttatctccacagtgcagttttctcagtacccattcttagtttgcatgcagatggacaaggatgaagctccattcaggcaatttgagaaaaagtacgaaaggctgtccacaggcagaggttatgtctctcagaaaagaaaagaaagcgtattagcaggatgtgaattcccgctccatcaagagaactcagagatgtgcaaagtggtgtttgcccctcagccggatagtacttccagcggatggttttgaaactgacctgtgatattttacttgaatttgtctccccgaaagggacacaatgtggcatgactaagtacttgctctctgagagcacagcgtttacatatttacctgtatttaagatttttgtaaaaagctacaaaaaactgcagtttgatcaaatttgggtatatgcagtatgctacccacagcgtcattttgaatcatcatgtgacgctttcaacaacgttcttagtttacttatacctctctcaaatctcatttggtacagtcagaatagttattctctaagaggaaactagtgtttgttaaaaacaaaaataaaaacaaaaccacacaaggagaacccaattttgtttcaacaatttttgatcaatgtatatgaagctcttgataggacttccttaagcatgacgggaaaaccaaacacgttccctaatcaggaaaaaaaaaaaaaaaaaaagtaagacacaaacaaaccattttttttctctttttttggagttgggggcccagggagaagggacaagacttttaaaagacttgttagccaacttcaagaattaatatttatgtctctgttattgttagttttaagccttaaggtagaaggcacatagaaataacatctcatctttctgctgaccattttagtgaggttgttccaaagacattcaggtctctacctccagccctgcaaaaatattggacctagcacagaggaatcaggaaaattaatttcagaaactccatttgatttttcttttgctgtgtctttttgagactgtaatatggtacactgtcctctaagggacatcctcattttatctcacctttttgggggtgagagctctagttcatttaactgtactctgcacaatagctaggatgactaagagaacattgcttcaagaaactggtggatttggatttccaaaatatgaaataaggaaaaaaatgtttttatttgtatgaattaaaagatccatgttgaacatttgcaaatatttattaataaacagatgtggtgataaacccaaaacaaatgacaggtccttattttccactaaacacagacacatgaaatgaaagtttagctagcccactatttgttgtaaattgaaaacgaagtgtgataaaataaatatgtagaaatca

SEQ ID NO: 5585 - DNA, 4092 bp, Artificial Sequence
  derived and/or modified sequence
tttcgaacccgcaatggaagaaaggggaggggtttatgcggggcggggtctggagttagtgttttgggagtgggaggtagttacagtgatgtctgttttttcccgttcaagaattaagtgtgtacctgcagacgtgtattcattcatatattcttgttctgaagagggtcactccctcactggctgccattgaaagagtccacttctcagtgactcctagctgggcactggatgcagttgaggattgctggtcaatatgattcttcttgctgtgctttttctctgcttcatttcctcatattcagcttctgttaaaggtcacacaactggtctctcattaaataatgaccggctgtacaagctcacgtactccactgaagttcttcttgatcggggcaaaggaaaactgcaagacagcgtgggctaccgcatttcctccaacgtggatgtggccttactatggaggaatcctgatggtgatgatgaccagttgatccaaataacgatgaaggatgtaaatgttgaaaatgtgaatcagcagagaggagagaagagcatcttcaaaggaaaaagcccatctaaaataatgggaaaggaaaacttggaagctctgcaaagacctacgctccttcatctaatccatggaaaggtcaaagagttctactcatatcaaaatgaggcagtggccatagaaaatatcaagagaggtctggctagcctatttcagacacagttaagctctggaaccaccaatgaggtagatatctctggaaattgtaaagtgacctaccaggctcatcaagacaaagtgatcaaaattaaggccttggattcatgcaaaatagcgaggtctggatttacgaccccaaatcaggtcttgggtgtcagttcaaaagctacatctgtcaccacctataagatagaagacagctttgttatagctgtgcttgctgaagaaacacacaattttggactgaatttcctacaaaccattaaggggaaaatagtatcgaagcagaaattagagctgaagacaaccgaagcaggcccaagattgatgtctggaaagcaggctgcagccataatcaaagcagttgattcaaagtacacggccattcccattgtggggcaggtcttccagagccactgtaaaggatgtccttctctctcggagctctggcggtccaccaggaaatacctgcagcctgacaacctttccaaggctgaggctgtcagaaacttcctggccttcattcagcacctcaggactgcgaagaaagaagagatccttcaaatactaaagatggaaaataaggaagtattacctcagctggtggatgctgtcacctctgctcagacctcagactcattagaagccattttggactttttggatttcaaaagtgacagcagcattatcctccaggagaggtttctctatgcctgtggatttgcttctcatcccaatgaagaactcctgagagccctcattagtaagttcaaaggttctattggtagcagtgacatcagagaaactgttatgatcatcactgggacacttgtcagaaagttgtgtcagaatgaaggctgcaaactcaaagcagtagtggaagctaagaagttaatcctgggaggacttgaaaaagcagagaaaaaagaggacaccaggatgtatctgctggctttgaagaatgccctgcttccagaaggcatcccaagtcttctgaagtatgcagaagcaggagaagggcccatcagccacctggctaccactgctctccagagatatgatctccctttcataactgatgaggtgaagaagaccttaaacagaatataccaccaaaaccgtaaagttcatgaaaagactgtgcgcactgctgcagctgctatcattttaaataacaatccatcctacatggacgtcaagaacatcctgctgtctattggggagcttccccaagaaatgaataaatacatgctcgccattgttcaagacatcctacgttttgaaatgcctgcaagcaaaattgtccgtcgagttctgaaggaaatggtcgctcacaattatgaccgtttctccaggagtggatcttcttctgcctacactggctacatagaacgtagtccccgttcggcatctacttacagcctagacattctctactcgggttctggcattctaaggagaagtaacctgaacatctttcagtacattgggaaggctggtcttcacggtagccaggtggttattgaagcccaaggactggaagccttaatcgcagccacccctgacgagggggaggagaaccttgactcctatgctggtatgtcagccatcctctttgatgttcagctcagacctgtcacctttttcaacggatacagtgatttgatgtccaaaatgctgtcagcatctggcgaccctatcagtgtggtgaaaggacttattctgctaatagatcattctcaggaacttcagttacaatctggactaaaagccaatatagaggtccagggtggtctagctattgatatttcaggtgcaatggagtttagcttgtggtatcgtgagtctaaaacccgagtgaaaaatagggtgactgtggtaataaccactgacatcacagtggactcctcttttgtgaaagctggcctggaaaccagtacagaaacagaagcaggcttggagtttatctccacagtgcagttttctcagtacccattcttagtttgcatgcagatggacaaggatgaagctccattcaggcaatttgagaaaaagtacgaaaggctgtccacaggcagaggttatgtctctcagaaaagaaaagaaagcgtattagcaggatgtgaattcccgctccatcaagagaactcagagatgtgcaaagtggtgtttgcccctcagccggatagtacttccagcggatggttttgaaactgacctgtgatattttacttgaatttgtctccccgaaagggacacaatgtggcatgactaagtacttgctctctgagagcacagcgtttacatatttacctgtatttaagatttttgtaaaaagctacaaaaaactgcagtttgatcaaatttgggtatatgcagtatgctacccacagcgtcattttgaatcatcatgtgacgctttcaacaacgttcttagtttacttatacctctctcaaatctcatttggtacagtcagaatagttattctctaagaggaaactagtgtttgttaaaaacaaaaataaaaacaaaaccacacaaggagaacccaattttgtttcaacaatttttgatcaatgtatatgaagctcttgataggacttccttaagcatgacgggaaaaccaaacacgttccctaatcaggaaaaaaaaaaaaaaaaaaagtaagacacaaacaaaccattttttttctctttttttggagttgggggcccagggagaagggacaagacttttaaaagacttgttagccaacttcaagaattaatatttatgtctctgttattgttagttttaagccttaaggtagaaggcacatagaaataacatctcatctttctgctgaccattttagtgaggttgttccaaagacattcaggtctctacctccagccctgcaaaaatattggacctagcacagaggaatcaggaaaattaatttcagaaactccatttgatttttcttttgctgtgtctttttgagactgtaatatggtacactgtcctctaagggacatcctcattttatctcacctttttgggggtgagagctctagttcatttaactgtactctgcacaatagctaggatgactaagagaacattgcttcaagaaactggtggatttggatttccaaaatatgaaataaggaaaaaaatgtttttatttgtatgaattaaaagatccatgttgaacatttgcaaatatttattaataaacagatgtggtgataaacccaaaacaaatgacaggtccttattttccactaaacacagacacatgaaatgaaagtttagctagcccactatttgttgtaaattgaaaacgaagtgtgataaaataaatatgtagaaatcata

SEQ ID NO: 5586 - DNA, 549 bp, Artificial Sequence
  derived and/or modified sequence
agtagggggctgcatggcacgcgcccctttgcgtccagagaataccatagtgcgggggagcgccaaccagtgccaggacacttaccgagctgaagagttgacaggtcacacaactggtctctcattaaataatgaccggctgtacaagctcacgtactccactgaagttcttcttgatcggggcaaaggaaaactgcaagacagcgtgggctaccgcatttcctccaacgtggatgtggccttactatggaggaatcctgatggtgatgatgaccagttgatccaaataacgatgaaggatgtaaatgttgaaaatgtgaatcagcagagaggagagaagagcatcttcaaaggaaaaagcccatctaaaataatgggaaaggaaaacttggaagctctgcaaagacctacgctccttcatctaatccatggaaaggtcaaagagttctactcatatcaaaatgaggcagtggccatagaaaatatcaagagaggtctggctagcctatttcagacacagttaagctctggaaccaccaatgaggtaga

SEQ ID NO: 5587 - DNA, 3855 bp, Artificial Sequence
  derived and/or modified sequence
tgcagttgaggattgctggtcaatatgattcttcttgctgtgctttttctctgcttcatttcctcatattcagcttctgttaaaggtcacacaactggtctctcattaaataatgaccggctgtacaagctcacgtactccactgaagttcttcttgatcggggcaaaggaaaactgcaagacagcgtgggctaccgcatttcctccaacgtggatgtggccttactatggaggaatcctgatggtgatgatgaccagttgatccaaataacgatgaaggatgtaaatgttgaaaatgtgaatcagcagagaggagagaagagcatcttcaaaggaaaaagcccatctaaaataatgggaaaggaaaacttggaagctctgcaaagacctacgctccttcatctaatccatggaaaggtcaaagagttctactcatatcaaaatgaggcagtggccatagaaaatatcaagagaggtctggctagcctatttcagacacagttaagctctggaaccaccaatgaggtagatatctctggaaattgtaaagtgacctaccaggctcatcaagacaaagtgatcaaaattaaggccttggattcatgcaaaatagcgaggtctggatttacgaccccaaatcaggtcttgggtgtcagttcaaaagctacatctgtcaccacctataagatagaagacagctttgttatagctgtgcttgctgaagaaacacacaattttggactgaatttcctacaaaccattaaggggaaaatagtatcgaagcagaaattagagctgaagacaaccgaagcaggcccaagattgatgtctggaaagcaggctgcagccataatcaaagcagttgattcaaagtacacggccattcccattgtggggcaggtcttccagagccactgtaaaggatgtccttctctctcggagctctggcggtccaccaggaaatacctgcagcctgacaacctttccaaggctgaggctgtcagaaacttcctggccttcattcagcacctcaggactgcgaagaaagaagagatccttcaaatactaaagatggaaaataaggaagtattacctcagctggtggatgctgtcacctctgctcagacctcagactcattagaagccattttggactttttggatttcaaaagtgacagcagcattatcctccaggagaggtttctctatgcctgtggatttgcttctcatcccaatgaagaactcctgagagccctcattagtaagttcaaaggttctattggtagcagtgacatcagagaaactgttatgatcatcactgggacacttgtcagaaagttgtgtcagaatgaaggctgcaaactcaaagcagtagtggaagctaagaagttaatcctgggaggacttgaaaaagcagagaaaaaagaggacaccaggatgtatctgctggctttgaagaatgccctgcttccagaaggcatcccaagtcttctgaagtatgcagaagcaggagaagggcccatcagccacctggctaccactgctctccagagatatgatctctttcataactgatgaggtgaagaagaccttaaacagaatataccaccaaaaccgtaaagttcatgaaaagactgtgcgcactgctgcagctgctatcattttaaataacaatccatcctacatggacgtcaagaacatcctgctgtctattggggagcttccccaagaaatgaataaatacatgctcgccattgttcaagacatcctacgttttgaaatgcctgcaagcaaaattgtccgtcgagttctgaaggaaatggtcgctcacaattatgaccgtttctccaggagtggatcttcttctgcctacactggctacatagaacgtagtccccgttcggcatctacttacagcctagacattctctactcgggttctggcattctaaggagaagtaacctgaacatctttcagtacattgggaaggctggtcttcacggtagccaggtggttattgaagcccaaggactggaagccttaatcgcagccacccctgacgagggggaggagaaccttgactcctatgctggtatgtcagccatcctctttgatgttcagctcagacctgtcacctttttcaacggatacagtgatttgatgtccaaaatgctgtcagcatctggcgaccctatcagtgtggtgaaaggacttattctgctaatagatcattctcaggaacttcagttacaatctggactaaaagccaatatagaggtccagggtggtctagctattgatatttcaggtgcaatggagtttagcttgtggtatcgtgagtctaaaacccgagtgaaaaatagggtgactgtggtaataaccactgacatcacagtggactcctcttttgtgaaagctggcctggaaaccagtacagaaacagaagcaggcttggagtttatctccacagtgcagttttctcagtacccattcttagtttgcatgcagatggacaaggatgaagctccattcaggcaatttgagaaaaagtacgaaaggctgtccacaggcagaggttatgtctctcagaaaagaaaagaaagcgtattagcaggatgtgaattcccgctccatcaagagaactcagagatgtgcaaagtggtgtttgcccctcagccggatagtacttccagcggatggttttgaaactgacctgtgatattttacttgaatttgtctccccgaaagggacacaatgtggcatgactaagtacttgctctctgagagcacagcgtttacatatttacctgtatttaagatttttgtaaaaagctacaaaaaactgcagtttgatcaaatttgggtatatgcagtatgctacccacagcgtcattttgaatcatcatgtgacgctttcaacaacgttcttagtttacttatacctctctcaaatctcatttggtacagtcagaatagttattctctaagaggaaactagtgtttgttaaaaacaaaaataaaaacaaaaccacacaaggagaacccaattttgtttcaacaatttttgatcaatgtatatgaagctcttgataggacttccttaagcatgacgggaaaaccaaacacgttccctaatcaggaaaaaaaaaaaaaaaaaaagtaagacacaaacaaaccattttttttctctttttttggagttgggggcccagggagaagggacaagacttttaaaagacttgttagccaacttcaagaattaatatttatgtctctgttattgttagttttaagccttaaggtagaaggcacatagaaataacatctcatctttctgctgaccattttagtgaggttgttccaaagacattcaggtctctacctccagccctgcaaaaatattggacctagcacagaggaatcaggaaaattaatttcagaaactccatttgatttttcttttgctgtgtctttttgagactgtaatatggtacactgtcctctaagggacatcctcattttatctcacctttttgggggtgagagctctagttcatttaactgtactctgcacaatagctaggatgactaagagaacattgcttcaagaaactggtggatttggatttccaaaatatgaaataaggaaaaaaatgtttttatttgtatgaattaaaagatccatgttgaacatttgcaaatatttattaataaacagatgtggtgataaacccaaaacaaatgacaggtccttattttccactaaacacagacacatgaaatgaaagtttagctagcccactatttgttgtaaattgaaaacgaagtgtgataaaataaatatgtagaaatc

SEQ ID NO: 5588 - DNA, 2828 bp, Artificial Sequence
  derived and/or modified sequence
gggaaataagagagaaaagaagagtaagaagaaatataagagccaccatgatccttctcgcagtgctttttctgtgcttcatctcctcgtactcggcctcggtaaagggtcatacgacagggctttcgctcaacaacgaccggctgtacaaacttacgtactccaccgaggtgttgctggatcgcggaaagggaaagctccaagattcagtgggctatcggatctcgtcgaatgtggatgtggcgttgttgtggagaaaccctgatggggatgacgatcagctcattcagatcaccatgaaagacgtgaacgtggaaaacgtgaaccaacagcgaggagagaagtccattttcaaaggaaaatcaccctcaaaaatcatgggcaaagagaatttggaggctcttcagcggcccacgcttttgcaccttattcacggaaaagtcaaggagttctactcgtatcagaatgaggcggtggctatcgagaatatcaagcggggactcgcgtcgctcttccagactcagctcagcagcgggactacaaacgaggtagatatctcgggtaattgcaaggtcacgtatcaggcgcaccaggacaaagtgattaagatcaaagcacttgacagctgtaaaatcgcgcggagcggtttcactacgccgaaccaggtgttgggagtatcgagcaaagcaacgagcgtaactacgtacaaaattgaggactcgtttgtgatcgcggtccttgcggaagagactcacaattttgggctcaattttctccaaactattaagggaaagatcgtcagcaagcaaaagctggagctcaagacaacggaggcgggaccacggctgatgtcgggcaaacaggcggctgccatcatcaaagcagtggattcgaagtacacagcaattcctattgtcggtcaggtgtttcagtcccactgcaagggatgcccgtccctgtcggaactctggcgcagcacgaggaagtaccttcagccggacaacctgtcgaaggcagaagccgtccgaaactttttggcctttatccagcatctccgaaccgcgaaaaaggaagagattctccaaattctcaagatggaaaacaaggaggtactgccacagctggtggacgcggtgacgtcggcgcagacgagcgactcgcttgaagcgattttggacttcctcgatttcaagtcggattcgtcgattattcttcaagaaagatttctctatgcatgcggatttgcctcacatccaaacgaggaactccttagggcgttgatttcgaagtttaaaggatcgattggcagcagcgacatccgggagacagtcatgatcattacggggactttggtgcgaaagttgtgtcaaaatgagggttgtaagctgaaggccgtggtcgaggcgaagaaactcattttgggcggactcgagaaagctgagaagaaagaggacacgagaatgtatttgttggcattgaagaatgcgttgcttcccgaagggatcccgtcgttgctcaaatacgccgaggcgggtgaggggcctattagccacctcgccaccacagcgttgcaaagatacgatctccctttcatcactgacgaagtcaagaaaacacttaatcgaatctaccaccagaacagaaaagtacatgaaaagacggtacgcactgctgccgcagcgatcatcctcaacaacaatcccagctacatggatgtcaagaatatcttgctgtccatcggagagcttccccaagagatgaacaagtacatgctcgccatcgtacaagacattctgagatttgagatgccggcgagcaaaatcgtccgacgcgtgctgaaggaaatggtcgcacacaactatgatcgcttttcaagatcgggttcgtccagcgcctatacgggatacatcgaacggtcaccgagatcagcgagcacgtactcgttggacatcctctactcagggtccgggattttgcgccggagcaacctcaacatctttcagtacatcgggaaagcggggctccacggctcacaagtggtaatcgaggcccaaggtttggaagcattgattgcggcgactcccgatgagggagaagagaatctcgattcgtatgccgggatgtccgcaattctcttcgacgtgcagcttcggcccgtaacgttctttaatgggtattcggatttgatgtcgaagatgctgagcgcgtcaggtgacccaatttcagtcgtgaaaggattgatcctgctcatcgatcattcgcaagaacttcagttgcagtcagggctcaaggccaacatcgaggtgcagggcggtcttgcgatcgatatctccggagccatggagttctcactgtggtacagggagtccaagactagagtcaagaatcgagtgacagtcgtgatcacaacagatatcacagtagactcatcgttcgtgaaggcgggattggagacaagcacggaaaccgaagccgggcttgaattcatctcgacggtccagttctcccagtatccgttcctggtgtgtatgcagatggacaaagatgaggctccgttcaggcagttcgaaaagaagtatgaacggctctcgactggaaggggatatgtatcccagaaacgcaaggaaagcgtcctggctggttgtgagttccccttgcaccaggagaactccgagatgtgcaaggtggtgtttgcccctcaaccggactcaacgtcgtcgggttggttttgataagctgccttctgcggggcttgccttctggccatgcccttcttctctcccttgcacctgtacctcttggtctttgaataaagcctgagtaggaag

SEQ ID NO: 5589 - RNA, 2828 nt, Artificial Sequence
  derived and/or modified sequence
gggaaauaagagagaaaagaagaguaagaagaaauauaagagccaccaugauccuucucgcagugcuuuuucugugcuucaucuccucguacucggccucgguaaagggucauacgacagggcuuucgcucaacaacgaccggcuguacaaacuuacguacuccaccgagguguugcuggaucgcggaaagggaaagcuccaagauucagugggcuaucggaucucgucgaauguggauguggcguuguuguggagaaacccugauggggaugacgaucagcucauucagaucaccaugaaagacgugaacguggaaaacgugaaccaacagcgaggagagaaguccauuuucaaaggaaaaucacccucaaaaaucaugggcaaagagaauuuggaggcucuucagcggcccacgcuuuugcaccuuauucacggaaaagucaaggaguucuacucguaucagaaugaggcgguggcuaucgagaauaucaagcggggacucgcgucgcucuuccagacucagcucagcagcgggacuacaaacgagguagauaucucggguaauugcaaggucacguaucaggcgcaccaggacaaagugauuaagaucaaagcacuugacagcuguaaaaucgcgcggagcgguuucacuacgccgaaccagguguugggaguaucgagcaaagcaacgagcguaacuacguacaaaauugaggacucguuugugaucgcgguccuugcggaagagacucacaauuuugggcucaauuuucuccaaacuauuaagggaaagaucgucagcaagcaaaagcuggagcucaagacaacggaggcgggaccacggcugaugucgggcaaacaggcggcugccaucaucaaagcaguggauucgaaguacacagcaauuccuauugucggucagguguuucagucccacugcaagggaugcccgucccugucggaacucuggcgcagcacgaggaaguaccuucagccggacaaccugucgaaggcagaagccguccgaaacuuuuuggccuuuauccagcaucuccgaaccgcgaaaaaggaagagauucuccaaauucucaagauggaaaacaaggagguacugccacagcugguggacgcggugacgucggcgcagacgagcgacucgcuugaagcgauuuuggacuuccucgauuucaagucggauucgucgauuauucuucaagaaagauuucucuaugcaugcggauuugccucacauccaaacgaggaacuccuuagggcguugauuucgaaguuuaaaggaucgauuggcagcagcgacauccgggagacagucaugaucauuacggggacuuuggugcgaaaguugugucaaaaugaggguuguaagcugaaggccguggucgaggcgaagaaacucauuuugggcggacucgagaaagcugagaagaaagaggacacgagaauguauuuguuggcauugaagaaugcguugcuucccgaagggaucccgucguugcucaaauacgccgaggcgggugaggggccuauuagccaccucgccaccacagcguugcaaagauacgaucucccuuucaucacugacgaagucaagaaaacacuuaaucgaaucuaccaccagaacagaaaaguacaugaaaagacgguacgcacugcugccgcagcgaucauccucaacaacaaucccagcuacauggaugucaagaauaucuugcuguccaucggagagcuuccccaagagaugaacaaguacaugcucgccaucguacaagacauucugagauuugagaugccggcgagcaaaaucguccgacgcgugcugaaggaaauggucgcacacaacuaugaucgcuuuucaagaucggguucguccagcgccuauacgggauacaucgaacggucaccgagaucagcgagcacguacucguuggacauccucuacucaggguccgggauuuugcgccggagcaaccucaacaucuuucaguacaucgggaaagcggggcuccacggcucacaagugguaaucgaggcccaagguuuggaagcauugauugcggcgacucccgaugagggagaagagaaucucgauucguaugccgggauguccgcaauucucuucgacgugcagcuucggcccguaacguucuuuaauggguauucggauuugaugucgaagaugcugagcgcgucaggugacccaauuucagucgugaaaggauugauccugcucaucgaucauucgcaagaacuucaguugcagucagggcucaaggccaacaucgaggugcagggcggucuugcgaucgauaucuccggagccauggaguucucacugugguacagggaguccaagacuagagucaagaaucgagugacagucgugaucacaacagauaucacaguagacucaucguucgugaaggcgggauuggagacaagcacggaaaccgaagccgggcuugaauucaucucgacgguccaguucucccaguauccguuccugguguguaugcagauggacaaagaugaggcuccguucaggcaguucgaaaagaaguaugaacggcucucgacuggaaggggauauguaucccagaaacgcaaggaaagcguccuggcugguugugaguuccccuugcaccaggagaacuccgagaugugcaaggugguguuugccccucaaccggacucaacgucgucggguugguuuugauaagcugccuucugcggggcuugccuucuggccaugcccuucuucucucccuugcaccuguaccucuuggucuuugaauaaagccugaguaggaag

SEQ ID NO: 5590 - protein, 1265 aa, Artificial Sequence
  derived and/or modified sequence
MSPALQDLSQPEGLKKTLRDEINAILQKRIMVLDGGMGTMIQREKLNEEHFRGQEFKDHARPLKGNNDILSITQPDVIYQIHKEYLLAGADIIETNTFSSTSIAQADYGLEHLAYRMNMCSAGVARKAAEEVTLQTGIKRFVAGALGPTNKTLSVSPSVERPDYRNITFDELVEAYQEQAKGLLDGGVDILLIETIFDTANAKAALFALQNLFEEKYAPRPIFISGTIVDKSGRTLSGQTGEGFVISVSHGEPLCIGLNCALGAAEMRPFIEIIGKCTTAYVLCYPNAGLPNTFGDYDETPSMMAKHLKDFAMDGLVNIVGGCCGSTPDHIREIAEAVKNCKPRVPPATAFEGHMLLSGLEPFRIGPYTNFVNIGERCNVAGSRKFAKLIMAGNYEEALCVAKVQVEMGAQVLDVNMDDGMLDGPSAMTRFCNLIASEPDIAKVPLCIDSSNFAVIEAGLKCCQGKCIVNSISLKEGEDDFLEKARKIKKYGAAMVVMAFDEEGQATETDTKIRVCTRAYHLLVKKLGFNPNDIIFDPNILTIGTGMEEHNLYAINFIHATKVIKETLPGARISGGLSNLSFSFRGMEAIREAMHGVFLYHAIKSGMDMGIVNAGNLPVYDDIHKELLQLCEDLIWNKDPEATEKLLRYAQTQGTGGKKVIQTDEWRNGPVEERLEYALVKGIEKHIIEDTEEARLNQKKYPRPLNIIEGPLMNGMKIVGDLFGAGKMFLPQVIKSARVMKKAVGHLIPFMEKEREETRVLNGTVEEEDPYQGTIVLATVKGDVHDIGKNIVGVVLGCNNFRVIDLGVMTPCDKILKAALDHKADIIGLSGLITPSLDEMIFVAKEMERLAIRIPLLIGGATTSKTHTAVKIAPRYSAPVIHVLDASKSVVVCSQLLDENLKDEYFEEIMEEYEDIRQDHYESLKERRYLPLSQARKSGFQMDWLSEPHPVKPTFIGTQVFEDYDLQKLVDYIDWKPFFDVWQLRGKYPNRGFPKIFNDKTVGGEARKVYDDAHNMLNTLISQKKLRARGVVGFWPAQSIQDDIHLYAEAAVPQAAEPIATFYGLRQQAEKDSASTEPYYCLSDFIAPLHSGIRDYLGLFAVACFGVEELSKAYEDDGDDYSSIMVKALGDRLAEAFAEELHERVRRELWAYCGSEQLDVADLRRLRYKGIRPAPGYPSQPDHTEKLTMWRLADIEQSTGIRLTESLAMAPASAVSGLYFSNLKSKYFAVGKISKDQVEDYALRKNISVAEVEKWLGPILGYDTD

SEQ ID NO: 5591 - DNA, 3798 bp, Artificial Sequence
  derived and/or modified sequence
atgtccccagccttgcaggatctgtctcagcctgaaggactgaaaaagactctaagagacgaaatcaacgctattctgcagaagcgcattatggtgcttgatggcgggatgggcaccatgatacagcgagaaaagctgaacgaggagcacttccgcggccaggagttcaaggatcatgcgcgcccactgaagggcaacaacgatatcctctcgattactcagccagatgtgatctatcaaatccacaaagagtatttacttgctggggcagatattatcgaaaccaacacattttccagtacctctatcgctcaggccgactatgggttggaacaccttgcctaccggatgaacatgtgctcagctggcgtggcacggaaagcggctgaggaagtgactctgcagactggtatcaaaagatttgtcgctggggccttaggtccaacgaataagacgctctcagtaagtcctagcgtggaacgccccgattaccggaacataaccttcgacgagctcgtggaagcatatcaggagcaggctaaaggcctgctggatggaggtgtggatatcctgctgattgaaacaatatttgacactgctaatgccaaggccgctcttttcgcactgcaaaatttgttcgaagagaaatacgcccctagaccaatcttcatttccggtacaattgtcgataagagtggtagaactctgtcagggcagacgggcgaaggcttcgtgatctctgtctcacacggggagcccctttgtattggtctgaattgtgccctcggagccgcagagatgcggccctttattgagataataggaaaatgcacaacggcctacgtcttgtgttatccgaatgctggtctgccaaatactttcggcgattacgatgaaacacctagtatgatggcaaagcacctgaaagactttgcgatggacgggctagtcaacatcgtgggggggtgttgcggctcgacccccgaccatatcagggaaatcgctgaggctgtgaaaaattgcaagccccgagttccacctgccactgccttcgagggacacatgctgttgtccggcctggaaccgttccggatcggaccatacaccaacttcgtgaatattggagaaagatgtaatgtggccgggagccgaaaattcgcaaaactcatcatggcagggaactacgaagaagcactttgcgtagctaaggttcaggtggagatgggggcgcaagtgttggatgtcaacatggatgacggaatgctggatgggccgagcgccatgactcgcttctgtaacctcatagcctcagagcccgacattgccaaagtgccactatgtatcgattcctcaaacttcgccgtgatagaggccgggttaaagtgctgtcagggcaagtgcattgtcaacagcattagtttgaaggagggagaggacgacttcctagaaaaagcgagaaagatcaagaaatatggagcggctatggtcgtgatggcattcgatgaggaaggccaagccactgagacagacacaaaaatccgtgtgtgcacccgggcctaccaccttctcgtgaagaagttgggattcaatcctaatgatatcattttcgacccaaacattcttaccatcggcacgggcatggaggagcacaacttgtacgctattaacttcatccatgccactaaagtgattaaggagaccctgcctggggcacgcatttcaggcggtctcagcaatctgagcttttcgttcaggggtatggaggccattagggaggctatgcacggcgtattcctgtaccatgccatcaaatccggaatggacatgggcattgtaaatgcaggaaatctcccggtgtacgacgacatccacaaggaactccttcaactttgtgaggatctgatatggaataaggaccctgaagctacagagaagctgctcagatacgcccagacccaaggaactggcggcaagaaggtcattcagacagatgagtggaggaatggcccagtagaagaaagactggagtatgctctggtcaaggggatcgagaagcatatcatcgaagacaccgaggaggcaagattaaaccagaagaaatatccacggcctctcaacataatcgaagggccattaatgaacggcatgaagatcgttggggatctgttcggagcgggaaagatgttcctaccacaggttatcaagagtgcccgcgtcatgaagaaagccgtggggcaccttattcccttcatggagaaagagcgggaggaaactagggtgctcaatggaactgttgaagaagaggacccctaccagggcactatagtgctagccactgttaaaggggacgttcatgacatagggaaaaatatcgttggcgtggtgttgggttgcaacaacttccgcgtgatcgatctcggggttatgactccatgtgacaaaattctcaaggccgccttggatcataaggcggatattatcggtttgtccgggttgattacacccagcctagatgaaatgatatttgttgcgaaggagatggaaaggttggccattcggatcccccttctaattggaggggccactactagcaagacccataccgccgtcaagattgctcctcggtatagcgcccccgtaatccatgtccttgatgcttcaaaatccgtcgtggtgtgctcgcagcttcttgatgaaaatctgaaagacgagtacttcgaggagattatggaagaatacgaggatatccgacaagaccactatgaatctctgaaagagcggcgatacctgcccctcagccaggctcggaagagtggattccagatggattggctctccgaaccccacccagtaaagccaacctttatcggaacccaagttttcgaagattatgacctgcagaagttagtggattatatcgactggaagccattttttgacgtgtggcagttgcgggggaaataccccaatcgaggcttcccgaagatttttaacgacaaaactgtcgggggggaggcccggaaggtctacgacgacgcacataacatgctgaatacacttattagccaaaagaaactgagagcgcgcggggtagtcgggttttggcctgcccagtccattcaagacgatattcacctgtatgcagaagcggctgttccccaggcggccgagcccatcgcgaccttctatggactacggcagcaggctgagaaggattccgcttctactgagccttactactgtttgagcgactttattgcccctctgcattctggaatccgcgattatttaggtctgtttgctgtcgcctgctttggcgttgaagagctcagtaaggcttacgaggacgatggcgatgactactcatcaatcatggtgaaggcgctgggcgacagattagccgaagcttttgcggaggaactgcatgagagagtaagaagggagctatgggcttattgtgggtcggagcagttggatgtggccgatctgcgaagacttaggtataagggtattcgtcctgctcccggctacccatctcagccagatcataccgagaaactcacaatgtggcgtctggccgacattgaacagtctaccgggattcggcttacggaatccctcgctatggcccccgctagcgcagtctcagggttgtacttcagtaatcttaagagtaagtactttgccgttggaaagatctccaaggatcaggtggaggactacgcccttagaaaaaacattagtgtggccgaagtcgaaaaatggttgggaccaatcctcggatacgacactgattag

SEQ ID NO: 5592 - DNA, 3798 bp, Artificial Sequence
  derived and/or modified sequence
atgagccctgccctgcaggacctgagccagcctgagggcctgaagaagaccctgagagatgagatcaatgccatcctgcagaagaggatcatggtgctggatggcggcatgggcaccatgatccagcgggagaagctgaatgaggagcacttccggggccaggagttcaaggaccacgcccggcccctgaagggcaacaatgacatcctgagcatcacccagccagatgtgatctaccagatccacaaggagtacctgctggccggggctgacatcatcgagaccaacaccttcagcagcaccagcatcgcccaggccgactatggcctggagcacctggcctacaggatgaacatgtgcagcgctggggtggccaggaaggctgctgaggaggtgaccctgcagacaggcatcaagagatttgtggccggggccctgggccccaccaacaagaccctgtctgtgagccccagcgtggagaggccagactacagaaacatcacctttgatgagctggtggaggcctaccaggagcaggccaagggcctgctggatggaggagtggacatcctgctgattgagaccatctttgacacagccaatgccaaggccgccctgtttgccctgcagaacctgtttgaggagaagtatgccccccggcccatcttcatcagcggcaccatcgtggacaagagcggccgcaccctgagcggccagacaggagagggcttcgtcatctctgtgagccacggggagcccctgtgcatcggcctgaactgtgccctgggcgctgctgagatgaggcccttcatcgagatcatcggcaagtgcaccacagcctacgtgctgtgctacccaaatgccggcctgcccaacaccttcggggactatgatgagacccccagcatgatggccaagcacctgaaggactttgccatggatggcctggtgaacatcgtgggcggctgctgcggcagcaccccagaccacatccgggagattgctgaggccgtgaagaactgcaagccccgggtgcccccagccacagcctttgagggccacatgctgctgagcggcctggagcccttcagaattggcccctacaccaactttgtgaacatcggggagcgctgcaatgtggccggcagcaggaagtttgccaagctgatcatggccggcaactatgaggaggccctgtgtgtggccaaggtgcaggtggagatgggcgcccaggtgctggatgtgaacatggatgatggcatgctggatggccccagcgccatgacccgcttctgcaacctgattgccagcgagccagacatcgccaaggtgcccctgtgcatcgacagcagcaactttgctgtgattgaggccggcctgaagtgctgccagggcaagtgcatcgtgaacagcatcagcctgaaggagggggaggatgacttcctggagaaggccaggaagatcaagaagtatggagctgccatggtggtgatggcctttgatgaggagggccaggccacagaaacagacaccaagatccgggtgtgcacccgggcctaccacctgctggtgaagaagctgggcttcaaccccaatgacatcatctttgaccccaacatcctgaccatcggcaccggcatggaggagcacaacctgtatgccatcaacttcatccacgccaccaaggtgatcaaggagaccctgcccggggcccgcatcagcggcggcctgagcaacctgtccttctccttccggggcatggaggccatccgggaggccatgcatggagtcttcctgtaccacgccatcaagagcggcatggacatgggcatcgtgaatgccggcaacctgcctgtgtatgatgacatccacaaggagctgctgcagctgtgtgaggacctgatctggaacaaggaccctgaggccacagagaagctgctgcgctatgcccagacccagggcactggaggcaagaaggtgatccagacagatgagtggagaaatggacctgtggaggagcggctggagtatgccctggtgaagggcatcgagaagcacatcatcgaggacacagaggaggcccggctgaaccagaagaagtacccccggcccctgaacatcatcgagggccccctgatgaatggcatgaagatcgtgggggacctgtttggagctgggaagatgttcctgccccaggtgatcaagagcgcccgggtgatgaagaaggctgtgggccacctgatccccttcatggagaaggagcgggaggagaccagggtgctgaatggcaccgtggaggaggaggacccctaccagggcaccatcgtgctggccaccgtgaagggagatgtgcatgacatcggcaagaacatcgtgggcgtggtgctgggctgcaacaacttccgggtcatcgacctgggcgtgatgaccccctgtgacaagatcctgaaggccgccctggaccacaaggctgacatcatcggcctgagcggcctcatcacccccagcctggatgagatgatctttgtggccaaggagatggagcggctggccatccgcatccccctgctgattggaggagccaccaccagcaagacccacacagctgtgaagatcgccccccgctacagcgcccctgtgatccacgtgctggatgccagcaagtctgtggtggtgtgcagccagctgctggatgagaacctgaaggatgagtactttgaggagatcatggaggagtatgaggacatccggcaggaccactatgagagcctgaaggagcggcgctacctgcccctgagccaggccaggaagagcggcttccagatggactggctgtctgagccccaccctgtgaagcccaccttcatcggcacccaggtgtttgaggactatgacctgcagaagctggtggactacatcgactggaagcccttctttgatgtgtggcagctgcggggcaagtaccccaacagaggcttccccaagatcttcaatgacaagacagtgggcggggaggccaggaaggtgtatgatgatgcccacaacatgctgaacaccctcatcagccagaagaagctgcgggcccggggcgtggtgggcttctggccagcccagagcatccaggatgacatccacctgtatgcagaggccgctgtgccccaggccgctgagcccatcgccaccttctacggcctgcggcagcaggccgagaaggacagcgccagcacagagccctactactgcctgagtgacttcatcgcccccctgcacagcggcatccgggactacctgggcctgtttgctgtggcctgctttggagtggaggagctgagcaaggcctatgaagatgatggagatgactacagcagcatcatggtgaaggccctgggggaccggctggccgaggcctttgctgaggagctgcacgagcgggtgcggcgggagctgtgggcctactgcggcagcgagcagctggatgtggccgacctgcggcggctgcgctacaagggcatccggcctgcccctggctaccccagccagcctgaccacacagagaagctgaccatgtggaggctggccgacatcgagcagagcacaggcatccggctgacagagagcctggccatggccccagccagcgctgtgtctggcctgtacttcagcaacctgaagagcaagtactttgctgtgggcaagatcagcaaggaccaggtggaggactatgccctgaggaagaacatctctgtggccgaggtggagaagtggctgggccccatcctgggctatgacacagactag

SEQ ID NO: 5593 - DNA, 3798 bp, Artificial Sequence
  derived and/or modified sequence
atgagccccgccctgcaggacctgagccagcccgagggcctgaagaagactctgagggatgagataaacgccatcctccagaagaggatcatggttcttgacgggggcatggggactatgatccagagagagaagctaaacgaggagcatttcagaggccaagaattcaaggatcatgccagaccactaaagggaaacaatgacattttgtccattacacagcctgacgtgatttatcagattcacaaagaatatttactggccggtgctgatatcattgagacgaacacttttagctcaacctccattgcccaagccgactatgggttagagcacctcgcctatcgcatgaacatgtgctccgcgggagtggccaggaaggcagctgaagaggtgacactgcagaccggcatcaagcggtttgtggctggagcgctaggccccacaaacaagaccctgtccgtctcgccctcagtcgagcggcccgattacaggaacatcactttcgacgaactagtcgaagcctaccaagaacaggcaaaggggcttctggatgggggcgtcgacatcctccttattgagacaattttcgacaccgctaacgccaaagccgccctgtttgcgttgcagaacctgtttgaggaaaagtacgcacctagaccaatattcatttctggcaccatcgtggacaagtccggtcggacactgagcgggcaaactggggaaggctttgtgatctcagtcagccatggggagccgttatgcattggccttaactgtgctctgggtgctgccgagatgaggccattcatagaaatcattggcaagtgcacaactgcatacgtgctttgctaccccaacgccggtctgccaaacacttttggcgactacgatgaaactccaagcatgatggccaagcatctgaaagattttgcgatggatgggctggtcaatatcgtgggcgggtgctgcgggtctactccagatcacatacgagaaattgccgaggcagtgaaaaactgcaaaccaagggttccccccgccacagctttcgaaggacatatgctcctctctggcctggaaccgttccgaatcggcccttacacaaactttgtcaatattggcgaacggtgtaatgtcgccggaagtagaaagtttgcaaagctcatcatggctggaaactacgaagaggccctctgcgtggccaaggtgcaggtggagatgggagctcaagttttggacgtgaacatggacgatggaatgctggatggccctagcgccatgacaagattctgtaatctgatagccagcgagccagatatagctaaagtgcctctctgcattgatagctctaacttcgctgtgattgaagctggattgaagtgttgccaggggaagtgtattgttaattcaatttccttgaaggagggcgaggacgacttcctggaaaaagctagaaagatcaagaagtatggagcggcaatggtggtgatggcttttgacgaagaggggcaagccacagaaacagacaccaaaatccgtgtgtgtacccgggcataccatctcctagttaagaaactcgggttcaaccccaacgatatcatatttgatcccaacatcctgaccattggcaccggcatggaagagcataacctttacgctatcaactttatccatgccaccaaagtcataaaggagactttacccggtgcacgtattagcggcgggctgtctaacctgtcttttagctttagaggcatggaggcgatccgcgaggccatgcatggcgttttcctatatcatgcaattaagtctggcatggacatgggtatcgtcaatgccggcaatctcccagtgtatgacgacatacataaagagctacttcagctgtgcgaggacctaatctggaataaggatcctgaggcaacagagaaactgctccggtacgcccagacccagggtaccggcgggaaaaaagttatacagactgacgaatggagaaatggaccagtagaggagcggctcgagtacgcgctggttaaaggaatcgagaaacacattatcgaggatacggaggaggctaggttgaatcagaagaagtatccacggcccctcaacataatcgaggggccactcatgaacggaatgaagatcgtcggggacctcttcggcgctggcaagatgttcttgcctcaggtaatcaaatcagctagagtgatgaagaaagccgtcggtcacttaataccttttatggaaaaagagcgagaagaaactcgggtcctgaatggaactgtcgaggaggaggacccctatcagggcacaattgtgctcgcgactgtgaaaggcgatgttcatgatattggtaaaaacatcgtgggagtggtacttggctgtaataactttagagtgatcgacctgggggtcatgacaccttgcgacaagatattaaaggcagccttggaccacaaggcagatatcattggactaagcggattaatcactccttctctggatgaaatgatcttcgtagcgaaagaaatggaacgcctggcaattagaatccctctgctgatagggggggctactacatcaaagactcatacagcagtcaagattgcgcccaggtacagtgcaccagtgatacatgttctcgacgcatcgaagtctgtggtggtctgcagccaacttctggatgagaacctgaaagacgagtactttgaggagatcatggaagagtatgaagacattagacaggatcactatgaatcactgaaggaaagaaggtacctccccctgagccaagcgagaaaaagcggcttccagatggattggctgagcgagccgcacccagtgaaacctacattcatcggtacccaagtgttcgaggattatgatttgcaaaaattggtggactatattgattggaagcccttttttgatgtttggcagttgcgcggaaagtaccccaatcgcggctttccaaagatcttcaatgacaagacggttggcggggaggcacgcaaagtttacgatgatgcgcataacatgctgaacacattgatttctcagaagaagcttagagcaagaggggtggtggggttctggcctgctcagtccatccaggacgatatccacctttacgctgaggctgcagtcccgcaggctgcagagcccatcgccacgttctacgggctacgacagcaggccgaaaaagattctgcttctactgagccatactactgcctgagcgattttatcgcaccacttcacagcggcattagggattatctcgggctgtttgcagtggcctgcttcggagttgaggaactgtccaaggcatacgaggacgatggtgacgattatagctcaatcatggtgaaggccttaggggatcggctagcagaagccttcgccgaagagctgcatgaacgtgtgcgccgagagttatgggcgtactgcggaagtgagcagctagatgtggccgaccttagacggttgcgatacaagggtatacgtcccgctccaggataccccagccagcctgaccacactgaaaaactgaccatgtggagactcgccgacatcgagcagtcaaccgggatacgcctcacagaatccctggccatggctccagctagcgccgtgtccggtctgtacttctctaatcttaaaagtaagtattttgctgttggcaagatatcaaaggatcaagtggaggactacgctcttagaaaaaacatcagcgtcgctgaagtggagaaatggttggggcccatcctggggtatgacacggactag

SEQ ID NO: 5594 - DNA, 3798 bp, Artificial Sequence
  derived and/or modified sequence
atgtctcctgctctgcaagacctgtcccagcccgaagggttgaagaaaacccttcgcgatgagataaacgccatcctccagaagcgaataatggtgctagatggaggcatgggaactatgatacagagagagaaacttaatgaggagcattttcgcggtcaggagtttaaggaccacgctagaccactgaaaggcaacaatgatatcctgtcgatcacacagccagacgtgatttaccagattcataaagagtaccttttggccggagccgacatcatagagactaataccttctcaagcaccagcatcgcccaagctgattatggactggaacacctcgcctatcgcatgaatatgtgctccgcgggtgtcgcccgaaaagcggctgaggaggtcacgttacagactggcattaaaaggttcgttgcaggagcactcgggcctaccaacaaaactctgtctgtgtctccttccgtggagcggccagactataggaacatcacctttgatgagctggtagaggcttaccaggaacaggccaaaggattactggatggaggcgttgacatcctgctgatcgagaccattttcgatacagccaatgccaaagcagccctgtttgcactgcagaacctgttcgaggaaaagtatgctcctcggccaatcttcatcagcgggacgattgtcgataaatccggccgtaccctgagcggccagacaggagagggctttgtgatcagcgtctctcatggcgagcctctatgtattgggctgaattgtgcgctaggcgcagctgagatgaggccttttattgagattatcgggaaatgtacaaccgcctacgtgctctgctaccctaatgccggattgcccaacaccttcggtgactatgacgagaccccaagcatgatggccaagcatctaaaggatttcgcaatggacggactggtcaatattgtcgggggatgctgcggcagcacgcctgaccacattcgggaaattgcggaggccgtgaaaaactgcaaacccagggttccccctgcaaccgccttcgaaggacacatgttgcttagcggtctggaaccctttaggattggtccctacaccaattttgtgaatatcggggagcgctgtaacgtggcagggagtagaaaatttgcaaaactgatcatggcgggaaactatgaagaagcactgtgcgtggccaaagtgcaggtggaaatgggcgcacaggtgcttgacgtcaacatggacgacgggatgctcgacgggccttccgcaatgactcgcttctgcaacctgatagcctccgagccagacatagcgaaagtgcccctctgtattgactccagtaatttcgccgtcatcgaagcagggcttaaatgttgccagggaaaatgtattgttaattccattagtttgaaagagggggaggacgacttcctcgaaaaagccaggaagatcaagaaatatggcgcagcgatggtagtaatggcatttgacgaagaaggccaggcaactgaaaccgacactaaaattcgcgtgtgcactagggcttatcatctgctggtcaagaaattagggttcaatccaaatgatattattttcgacccaaacatcctgactatcggcaccgggatggaagaacacaacctttatgcgatcaatttcatccatgcaacaaaagttatcaaggaaacgctgccgggagctaggatcagtggtggcctctccaaccttagcttttccttccggggaatggaggccataagagaggctatgcatggcgtcttcctttaccatgccatcaaaagcgggatggacatgggcatcgtcaacgcaggcaaccttcccgtgtatgacgacatccacaaggagctgctgcagctctgtgaggacctgatctggaacaaagatcccgaggctacagagaaactccttagatatgcgcaaacccaggggaccgggggtaagaaggtcatccagactgacgaatggcgcaacggccctgtggaggagcgattggagtacgctctcgtaaagggcatcgaaaaacacatcatagaggatactgaagaagctcgcctgaatcagaagaagtaccctcgaccactgaacattatcgaaggtccattgatgaatggcatgaagattgtaggtgatttgtttggggctggcaaaatgtttctcccccaggtcatcaagagcgcgagggtgatgaagaaggctgtgggccatctgatccctttcatggaaaaagagcgggaggagacccgcgtacttaacgggactgtcgaggaggaggacccgtatcaaggcaccatcgtgctggctacagtcaaaggagatgtgcatgatatcggaaaaaatatcgtcggtgtcgtgctaggatgtaataactttagggtcatcgatcttggagtgatgacaccgtgcgataaaatactcaaagcagcactagatcacaaggcagacattattggtctgtctggcctgattacgccttcactcgacgaaatgattttcgttgccaaagagatggagaggctggcaattcgcatcccactcttaataggcggtgctaccactagcaaaactcataccgccgttaaaattgctccacgttactccgcacccgtcatccatgtcctggatgccagcaagagcgtggtagtctgtagccagctcctggacgaaaaccttaaggacgagtatttcgaagaaataatggaggagtacgaggacattagacaggatcattacgagtccttgaaagaacgtagatatctaccgctcagccaggcccgtaagagcggcttccagatggattggctgtccgaacctcatcctgtcaagcctactttcattggaacccaagtcttcgaggattatgatcttcagaagctggtggactatatcgattggaagcctttctttgatgtgtggcagctcaggggaaagtaccctaaccgtgggtttccaaaaatcttcaatgacaagaccgttggcggagaagcccgtaaagtgtacgatgacgcacataatatgctgaatactctgatctcccagaagaaattgagggccagaggagttgtaggtttctggccagctcaatctatccaggacgacatccacctatacgccgaggccgctgtgcctcaagcagcagaacccattgctacgttttatggtctgcgccagcaggccgaaaaagactcagcttccactgagccctattactgcttgtctgacttcatcgctcccctccacagcggaataagagactaccttgggctgttcgctgtggcttgtttcggggttgaagaactctctaaagcatacgaggacgatggggatgattattcctccatcatggtgaaggcactgggagaccgcttagcggaagctttcgcagaggaactccacgagcgagtgaggcgagagctctgggcatattgtggctccgaacagctcgacgtagcggaccttcggagacttcgttacaaagggataagacccgctccgggatatcccagccagcccgatcatacagaaaagctaacaatgtggagactcgcagatatcgaacaatccacaggcatccgacttacagaatccctggccatggcccctgcttctgcggtgtccggcctctatttcagcaatttgaagtccaagtactttgccgtaggcaaaattagcaaggatcaggtggaggattacgccctgaggaagaatatcagcgtcgcagaggtagagaagtggttggggcctatactgggttacgacactgactag

SEQ ID NO: 5595 - DNA, 10529 bp, Artificial Sequence
  derived and/or modified sequence
aaaggttctaaatgtctgcggggctcagagccggatgtcacgtcgtcctcctctgccggttttctcttgggtccttttccgtgccgtcccgcgactccgcctctggccgcgcgtgtctggctgctaggccgacaccaaggactggccgggtacccgggaagaaagcacgtgctccagcagttgccgcgcccagccccgagagaggccctagggcgctgcgggctttcggggtccgcagtccccccgcgacgcgagccaacgggaggcgtcaaaagacccgggccttgtgtggcaggctcgcctggcgctggctggcgtggcccttggccgtcgtcacctgtggagagcacgtcttctctgccgcgccctctgcgcaaggaggagactcgacaacatgtcacccgcgctccaagacctgtcgcaacccgaaggtctgaagaaaaccctgcgggatgagatcaatgccattctgcagaagaggattatggtgctggatggagggatggggaccatgatccagcgggagaagctaaacgaagaacacttccgaggtcaggaatttaaagatcatgccaggccgctgaaaggcaacaatgacattttaagtataactcagcctgatgtcatttaccaaatccataaggaatacttgctggctggggcagatatcattgaaacaaatacttttagcagcactagtattgcccaagctgactatggccttgaacacttggcctaccggatgaacatgtgctctgcaggagtggccagaaaagctgccgaggaggtaactctccagacaggaattaagaggtttgtggcaggggctctgggtccgactaataagacactctctgtgtccccatctgtggaaaggccggattataggaacatcacatttgatgagcttgttgaagcataccaagagcaggccaaaggacttctggatggcggggttgatatcttactcattgaaactatttttgatactgccaatgccaaggcagccttgtttgcactccaaaatctttttgaggagaaatatgctccccggcctatctttatttcagggacgatcgttgataaaagtgggcggactctttccggacagacaggagagggatttgtcatcagcgtgtctcatggagaaccactctgcattggattaaattgtgctttgggtgcagctgaaatgagaccttttattgaaataattggaaaatgtacaacagcctatgtcctctgttatcccaatgcaggtcttcccaacacctttggtgactatgatgaaacgccttctatgatggccaagcacctaaaggattttgctatggatggcttggtcaatatagttggaggatgctgtgggtcaacaccagatcatatcagggaaattgctgaagctgtgaaaaattgtaagcctagagttccacctgccactgcttttgaaggacatatgttactgtctggtctagagcccttcaggattggaccgtacaccaactttgttaacattggagagcgctgtaatgttgcaggatcaaggaagtttgctaaactcatcatggcaggaaactatgaagaagccttgtgtgttgccaaagtgcaggtggaaatgggagcccaggtgttggatgtcaacatggatgatggcatgctagatggtccaagtgcaatgaccagattttgcaacttaattgcttccgagccagacatcgcaaaggtacctttgtgcatcgactcctccaattttgctgtgattgaagctgggttaaagtgctgccaagggaagtgcattgtcaatagcattagtctgaaggaaggagaggacgacttcttggagaaggccaggaagattaaaaagtatggagctgctatggtggtcatggcttttgatgaagaaggacaggcaacagaaacagacacaaaaatcagagtgtgcacccgggcctaccatctgcttgtgaaaaaactgggctttaatccaaatgacattatttttgaccctaatatcctaaccattgggactggaatggaggaacacaacttgtatgccattaattttatccatgcaacaaaagtcattaaagaaacattacctggagccagaataagtggaggtctttccaacttgtccttctccttccgaggaatggaagccattcgagaagcaatgcatggggttttcctttaccatgcaatcaagtctggcatggacatggggatagtgaatgctggaaacctccctgtgtatgatgatatccataaggaacttctgcagctctgtgaagatctcatctggaataaagaccctgaggccactgagaagctcttacgttatgcccagactcaaggcacaggagggaagaaagtcattcagactgatgagtggagaaatggccctgtcgaagaacgccttgagtatgcccttgtgaagggcattgaaaaacatattattgaggatactgaggaagccaggttaaaccaaaaaaaatatccccgacctctcaatataattgaaggacccctgatgaatggaatgaaaattgttggtgatctttttggagctggaaaaatgtttctacctcaggttataaagtcagcccgggttatgaagaaggctgttggccaccttatccctttcatggaaaaagaaagagaagaaaccagagtgcttaacggcacagtagaagaagaggacccttaccagggcaccatcgtgctggccactgttaaaggcgacgtgcacgacataggcaagaacatagttggagtagtccttggctgcaataatttccgagttattgatttaggagtcatgactccatgtgataagatactgaaagctgctcttgaccacaaagcagatataattggcctgtcaggactcatcactccttccctggatgaaatgatttttgttgccaaggaaatggagagattagctataaggattccattgttgattggaggagcaaccacttcaaaaacccacacagcagttaaaatagctccgagatacagtgcacctgtaatccatgtcctggacgcgtccaagagtgtggtggtgtgttcccagctgttagatgaaaatctaaaggatgaatactttgaggaaatcatggaagaatatgaagatattagacaggaccattatgagtctctcaaggagaggagatacttacccttaagtcaagccagaaaaagtggtttccaaatggattggctgtctgaacctcacccagtgaagcccacgtttattgggacccaggtctttgaagactatgacctgcagaagctggtggactacattgactggaagcctttctttgatgtctggcagctccggggcaagtacccgaatcgaggctttcccaagatatttaacgacaaaacagtaggtggagaggccaggaaggtctacgatgatgcccacaatatgctgaacacactgattagtcaaaagaaactccgggcccggggtgtggttgggttctggccagcacagagtatccaagacgacattcacctgtacgcagaggctgctgtgccccaggctgcagagcccatagccaccttctatgggttaaggcaacaggctgagaaggactctgccagcacggagccatactactgcctctcagacttcatcgctcccttgcattctggcatccgtgactacctgggcctgtttgccgttgcctgctttggggtagaagagctgagcaaggcctatgaggatgatggtgacgactacagcagcatcatggtcaaggcgctgggggaccggctggcagaggcctttgcagaagagctccatgaaagagttcgccgagaactgtgggcctactgtggcagtgagcagctggacgtcgcagacctgcgcaggctgcggtacaagggcatccgcccggctcctggctaccccagccagcccgaccacaccgagaagctcaccatgtggagactcgcagacatcgagcagtctacaggcattaggttaacagaatcattagcaatggcacctgcttcagcagtctcaggcctctacttctccaatttgaagtccaaatattttgctgtggggaagatttccaaggatcaggttgaggattatgcattgaggaagaacatatctgtggctgaggttgagaaatggcttggacccattttgggatatgatacagactaactttttttttttttttgccttttttattcttgatgatcctcaaggaaatacaacctagggtgccttaaaaataacaacaacaaaaaacctgtgtgcatctggctgacacttacctgcttctggttttcgaagactatttagtggaaccttgtagaggagcagggtcttcctgcagtgcctggaaaacaggcgctgtttttttgggaccttgcgtgaagagcagtgagcagggttcctgtggtttccctggtccctctgagatggggacagactgaagacagaggtcgtttgatttcaaagcaagtcaacctgcttttttctgtttttacagtggaatctaggaggccacttagtcgtctttttttcctcttagaagaaaagcctgaaactgagttgaatagagaagtgtgaccctgtgacaaaatgatactgtgagaaatggggcattttaatctaagtggttataacagtggattctgacggggaaggtgtagctctgttctcttcggaagacctcgttttctaaaggctggactaaatggctgcagaactccctttggcaaaaggcatgcgctcactgcttgcttgtcagaaacactgaagccatttgccccagtgtggtcaagcagccatgctttctgggcattttcgtcctcccataatttcatatttccgtacccctgaggaaacaaaaaggaaatgaggagagaaagttactgttaagggtggttaacattttttttgttttgttttgttttggtttttttttttttgagacagagtctggctctgtcgcccaggctggagtgcaggggcgcaatctcggctcatagcaagctccgcctcctgggttcatgccattctcctgcctcagcctccagagtagctgggactacaggtgcccgccaccacacccggctaattttttgtgtttttacaaaatacaaaaaagtagagacaggatttcactgtgttagccaggatggtcttgatctcccgacctcgtgatctgcccacctcagcctcccaaaatgctgggattacaggcgtgagccaccgagcctggccggttaacatcttttaattgtttccaggattgagcaggttctcagctgggctctgatatcccgtgcggagttggacaagtgggcagcataaagtcactcatttcttaccattttattcccctcaattctcaatatattcagtaatgaagaatggtgccaccactcaagcaacaagcctcaaactcaaccatgtcatctttttcttggatgattgcagttatttcaaaaatttgcatgcaaaatatacactcatcctacttcaagatggtggtggcaatagtcaggagaaggtaacattggagtcctggtttgattcgaaggatgaagacgaagaagcaagggaggaacaaatgaagaaccatctttgttcatgaataggaatattcaagattataaaggtatcaggtctcctaaaattgatctatggatttaataccattttcaatggaaattccaacagattttattgaatgaaacaagcaggtgtttatatggagtagcaaaggacttaaaattaccaaatgcttctaaatatgaaggagaggttggggacacgcaccctatgtgataccaagttttattgtcaagacagtgtcatggtgcagaggtaggcattctgagcaggggaacaaaataagggcctagaaactcacccgtgcatatgttgacctttgcaaaatgacctggtgacatggcaagtcagtggggacaggaaggaccactccctaagtaatcccagaacaatggctattcatgtgggaaaaaaagaaattttactttctctcaccttacctggtgataagttccaaatatgttaagggctttaatacaaaaagcaaaaattgtcagtgtttggatgaaaaaagccttagggcaggaaagaatctcttgagacataaagtagtaatcataaaggacaagatggttaagtcaattctgttaaaactcaaggcttatattaagcaaacacttgaagtgagaagatgatccacaacttgagaagacatttataatacaaataactgatgaaggattcataatcacaaatatagagaattcctatttaaaaaaatagaaaaatagtgaagactacacaagaggaaatagggcttttaaataaatagatgttctgtagcattggtcagggaaatatgaattaggaccacaatgagattccattttatatccataagatttgcaaaggttgggtctgacagtaccagttgttagatctgtagggacttgtacaacattgtggatgtgtaaacaggcaccactgctttaaaaaacaattatcccttacagacttgaacatttgcagacgttatgatcttgcttccaactcccacctgtatgtccagcaaactcttgcatgtggccactaggaggaatgtgtaagaatgttcatagttacatatttataatagttaataactggaaaaagtgaaatgtatgtctgtctacaggaaaataggtgaataattagatatatatattcattctacgggatattattcagtagtggaaatgagtgaactacagctatacctcacaataagaatgaatctcagaaaatattaaggaaaaaagcaagtttgaagagaccacatggggcgtactatttttattgagcccaaaaacaagcaaaaccaaagaatatgtagtctaagcatacgtatacaataaaactatgctattaaaaaaaaagaaggtaactgataaaccaaaattgagcatagtaattacccacagaaggaggaagtggaagggacaggagcacataggtagatgccaagttatgcagctgttctggttcctcctggtaggcttacaagtgtttactatatgctattaatacattatactttataactaatagataacagttttttacatattaaatatgttctacttaaatatattataaaaaataaaggcaaagtggaatgataacctaaaatctggtatggtgattttgtaggtaatgtttgtatatgtcaaatacagtttttaaggaaaggaagaacatcttagggtaaacagcagctagaaaggtgaggggcaggagagtggtgcatccttgctgctgccagcagtgcccagataccaggctttggggaatgagtggatggctggaccatttgctaagacagaggccaggggatgggagaaatgatgagttttggaaagattcgatgtgactagactgaatataggcagttggatactagactttggaatttaaaaagaatgtctggagttagaattgagagacttgaacgtggagatggaggtcaggctgcagtgcgatgggatcatctatggagcatatgaggagaagagaatctggaggaggaggagggggagccagcaggggagcagctgtgggttggaggaagccaggagggagagtgcaatgccgagaaagcaatgaagagcgtttcgaagcatgccagcagaacccaatgctgcaaagaggcctgggaatgggattgctgagggcccttctcacagtgagcccctcaagagcagcgtcaggggattgtggggactgttggcacacagctggctttgctaggttgaagacaatgggaggtgtggaagacttgttgactcatttaaagaagattggagggaaaggtaggattgagagtgtttcagacagaaaaaggattatatgctgagggtaaagcacaagtacagagggttgcagatagtgcagaagtctttaaaaacaattattttaacccaacttccagggagactgaatttcttctgccagtcagtaacaccatcaacctgggagttgcccctgacccctccagtcttagctcctgctcctgtaacaaaataccacaaactggttagcttatagagaacagatgtttatttcttacagttcaggagtctggaagtccaagatcatggtgccatcatggccgagttctggtgagggccctcttctgggatgcagcggccagcttctcatgttctcacagtgggtggagggtaagcttgctctctggcctcctcttaaaaaggcactaatcccattcatgagggctccaccttcatgacctaattacctcccaaagatgccatctccaaacaccatcattctggggattccatttcaacatgatttgggggatacatcagaccataacacttttctttttctcaaccttcacatccagttggttctcaagccctggcgattttacgcgctagataggtcttaagttcatctctacgcctgccctggttaaggttctcatcatttctcctctggattcatctgcaacacaggctgccgggttggttcccacctcctagagctggaagagtgggctctctgattctttacacccccgcctcaatcctcctgctgcctgaataaccatctccccgtgacctaggatatatcccagccccttagaggcatgcaaagccttccatgtctgaccctgcctcatgtcttggaagccctagactgctgctgtaccctgaaggaggtacctgctcacattggcccctctgtctggaataaccccaccccggttccacccaagtcaggaaagcttcccaacccctccctcccaccaccccaaagctaagtgaagtgacccctcttcttgcctctgtaacaccgccatgcacatttcatacagcccttgctgaaacttcatctagttctctgttagacttaacattccctaagggcaggtttggaaccttactcatctttatatggcgtctaaaatagtgcttgctttatgataggtgctcagtaaaggttgtcttgaattgagcagatcctctagggacaggagttggatggagagcagactgtaaagcctcatgagggcaggggccctgcctcttcctgagctcaggatacccagagcctagctcagtgcctgccatgaaattgttcactccatcaagccttgttaaatgagttcggggcggggggagcatgatggttttctctctctcagaaagaaagcgctgtatcaaagccctagcaccctctctacacccaccttcagtatttcatattagatgcggcccaagtgatactttctttaccgtcccgtgaagacagcatattggcagccctgcaaaaacaaaacaaaacaaaaccctcagttcatggcatacttgctataaatcagctatgtgtattgtcaaattgtagaactgaaagtatattctgattcggtgtgtgtataaggaaatatacaccagtatatgcattaaaacgtcaagaagagctgggcacagtgtcacatgcctgtaaacccagctattcaggaggctgaggtgggaggatcggttgaggccaggagtttgaggctgcagtgagctatgattgcacagctgcactccagcctgtgctgagacctcatctcttaaaaaataaaaaataaaaagtctaagaggatacacagaaatttttaagtggttacctccacggaatgggattaggggatcagaggtgagggaactcatggtttggctatttctcgttctttctgcactgtttcaaatttttacaagtgtatgttattgtacttttaaaaagattagcttggcaacaagtctagcctgaaatgggtgctattttgactagtctgagtgaaaagtgaggatttaaatgaagtaacccctaaactcagccagtcccatgtttttttaacacttggaatatctaattccatttacactgcattcttcaaatgtaattttcaaagatgccttttgcctcatcccttgcttttaagtattattatagacttttggagactcacgaaacaagcaatccctaaattctcgcccaggaaagtatcttggattaaatggtttttgagaaccttgagagtgtatattctatgaaatggaagaaacaagaactagacagagtcacaaatgctgttgatcacagacaatctctgccatccataaggtaaatgtaatacatctggcgacctgctgagtgtgaacttgcagcaggtgaggaaggaactctgaactctcacaatcttgtttcttcatttcccagagagaaactcggcaaagagaaaaaggacatttccctccaggttatctgaaagaatttcaatgcttacctttaatcatgtgacattgtttatcttggattaaaagaaaagaaaatgtatttattttgtgcatattttcaataaaatatataaaatcgagttggtatatagtgccaaataccattaattaaaaatattttaacctga

SEQ ID NO: 5596 - DNA, 3798 bp, Artificial Sequence
  derived and/or modified sequence
atgagccccgccctgcaggacctgagccagcccgagggcctgaagaagaccctgagagacgagatcaacgccatcctgcagaagagaatcatggtgctggacggcggcatgggcaccatgatccagagagagaagctgaacgaggagcacttcagaggccaggagttcaaggaccacgccagacccctgaagggcaacaacgacatcctgagcatcacccagcccgacgtgatctaccagatccacaaggagtacctgctggccggcgccgacatcatcgagaccaacaccttcagcagcaccagcatcgcccaggccgactacggcctggagcacctggcctacagaatgaacatgtgcagcgccggcgtggccagaaaggccgccgaggaggtgaccctgcagaccggcatcaagagattcgtggccggcgccctgggccccaccaacaagaccctgagcgtgagccccagcgtggagagacccgactacagaaacatcaccttcgacgagctggtggaggcctaccaggagcaggccaagggcctgctggacggcggcgtggacatcctgctgatcgagaccatcttcgacaccgccaacgccaaggccgccctgttcgccctgcagaacctgttcgaggagaagtacgcccccagacccatcttcatcagcggcaccatcgtggacaagagcggcagaaccctgagcggccagaccggcgagggcttcgtgatcagcgtgagccacggcgagcccctgtgcatcggcctgaactgcgccctgggcgccgccgagatgagacccttcatcgagatcatcggcaagtgcaccaccgcctacgtgctgtgctaccccaacgccggcctgcccaacaccttcggcgactacgacgagacccccagcatgatggccaagcacctgaaggacttcgccatggacggcctggtgaacatcgtgggcggctgctgcggcagcacccccgaccacatcagagagatcgccgaggccgtgaagaactgcaagcccagagtgccccccgccaccgccttcgagggccacatgctgctgagcggcctggagcccttcagaatcggcccctacaccaacttcgtgaacatcggcgagagatgcaacgtggccggcagcagaaagttcgccaagctgatcatggccggcaactacgaggaggccctgtgcgtggccaaggtgcaggtggagatgggcgcccaggtgctggacgtgaacatggacgacggcatgctggacggccccagcgccatgaccagattctgcaacctgatcgccagcgagcccgacatcgccaaggtgcccctgtgcatcgacagcagcaacttcgccgtgatcgaggccggcctgaagtgctgccagggcaagtgcatcgtgaacagcatcagcctgaaggagggcgaggacgacttcctggagaaggccagaaagatcaagaagtacggcgccgccatggtggtgatggccttcgacgaggagggccaggccaccgagaccgacaccaagatcagagtgtgcaccagagcctaccacctgctggtgaagaagctgggcttcaaccccaacgacatcatcttcgaccccaacatcctgaccatcggcaccggcatggaggagcacaacctgtacgccatcaacttcatccacgccaccaaggtgatcaaggagaccctgcccggcgccagaatcagcggcggcctgagcaacctgagcttcagcttcagaggcatggaggccatcagagaggccatgcacggcgtgttcctgtaccacgccatcaagagcggcatggacatgggcatcgtgaacgccggcaacctgcccgtgtacgacgacatccacaaggagctgctgcagctgtgcgaggacctgatctggaacaaggaccccgaggccaccgagaagctgctgagatacgcccagacccagggcaccggcggcaagaaggtgatccagaccgacgagtggagaaacggccccgtggaggagagactggagtacgccctggtgaagggcatcgagaagcacatcatcgaggacaccgaggaggccagactgaaccagaagaagtaccccagacccctgaacatcatcgagggccccctgatgaacggcatgaagatcgtgggcgacctgttcggcgccggcaagatgttcctgccccaggtgatcaagagcgccagagtgatgaagaaggccgtgggccacctgatccccttcatggagaaggagagagaggagaccagagtgctgaacggcaccgtggaggaggaggacccctaccagggcaccatcgtgctggccaccgtgaagggcgacgtgcacgacatcggcaagaacatcgtgggcgtggtgctgggctgcaacaacttcagagtgatcgacctgggcgtgatgaccccctgcgacaagatcctgaaggccgccctggaccacaaggccgacatcatcggcctgagcggcctgatcacccccagcctggacgagatgatcttcgtggccaaggagatggagagactggccatcagaatccccctgctgatcggcggcgccaccaccagcaagacccacaccgccgtgaagatcgcccccagatacagcgcccccgtgatccacgtgctggacgccagcaagagcgtggtggtgtgcagccagctgctggacgagaacctgaaggacgagtacttcgaggagatcatggaggagtacgaggacatcagacaggaccactacgagagcctgaaggagagaagatacctgcccctgagccaggccagaaagagcggcttccagatggactggctgagcgagccccaccccgtgaagcccaccttcatcggcacccaggtgttcgaggactacgacctgcagaagctggtggactacatcgactggaagcccttcttcgacgtgtggcagctgagaggcaagtaccccaacagaggcttccccaagatcttcaacgacaagaccgtgggcggcgaggccagaaaggtgtacgacgacgcccacaacatgctgaacaccctgatcagccagaagaagctgagagccagaggcgtggtgggcttctggcccgcccagagcatccaggacgacatccacctgtacgccgaggccgccgtgccccaggccgccgagcccatcgccaccttctacggcctgagacagcaggccgagaaggacagcgccagcaccgagccctactactgcctgagcgacttcatcgcccccctgcacagcggcatcagagactacctgggcctgttcgccgtggcctgcttcggcgtggaggagctgagcaaggcctacgaggacgacggcgacgactacagcagcatcatggtgaaggccctgggcgacagactggccgaggccttcgccgaggagctgcacgagagagtgagaagagagctgtgggcctactgcggcagcgagcagctggacgtggccgacctgagaagactgagatacaagggcatcagacccgcccccggctaccccagccagcccgaccacaccgagaagctgaccatgtggagactggccgacatcgagcagagcaccggcatcagactgaccgagagcctggccatggcccccgccagcgccgtgagcggcctgtacttcagcaacctgaagagcaagtacttcgccgtgggcaagatcagcaaggaccaggtggaggactacgccctgagaaagaacatcagcgtggccgaggtggagaagtggctgggccccatcctgggctacgacaccgactag

SEQ ID NO: 5597 - protein, 750 aa, Artificial Sequence
  derived and/or modified sequence
MLRAKNQLFLLSPHYLRQVKESSGSRLIQQRLLHQQQPLHPEWAALAKKQLKGKNPEDLIWHTPEGISIKPLYSKRDTMDLPEELPGVKPFTRGPYPTMYTFRPWTIRQYAGFSTVEESNKFYKDNIKAGQQGLSVAFDLATHRGYDSDNPRVRGDVGMAGVAIDTVEDTKILFDGIPLEKMSVSMTMNGAVIPVLANFIVTGEEQGVPKEKLTGTIQNDILKEFMVRNTYIFPPEPSMKIIADIFEYTAKHMPKFNSISISGYHMQEAGADAILELAYTLADGLEYSRTGLQAGLTIDEFAPRLSFFWGIGMNFYMEIAKMRAGRRLWAHLIEKMFQPKNSKSLLLRAHCQTSGWSLTEQDPYNNIVRTAIEAMAAVFGGTQSLHTNSFDEALGLPTVKSARIARNTQIIIQEESGIPKVADPWGGSYMMECLTNDVYDAALKLINEIEEMGGMAKAVAEGIPKLRIEECAARRQARIDSGSEVIVGVNKYQLEKEDAVEVLAIDNTSVRNRQIEKLKKIKSSRDQALAERCLAALTECAASGDGNILALAVDASRARCTVGEITDALKKVFGEHKANDRMVSGAYRQEFGESKEITSAIKRVHKFMEREGRRPRLLVAKMGQDGHDRGAKVIATGFADLGFDVDIGPLFQTPREVAQQAVDADVHAVGISTLAAGHKTLVPELIKELNSLGRPDILVMCGGVIPPQDYEFLFEVGVSNVFGPGTRIPKAAVQVLDDIEKCLEKKQQSV

SEQ ID NO: 5598 - protein, 197 aa, Artificial Sequence
  derived and/or modified sequence
TRYLARCTVGEITDALKKVFGEHKANDRMVSGAYRQEFGESKEITSAIKRVHKFMEREGRRPRLLVAKMGQDGHDRGAKVIATGFADLGFDVDIGPLFQTPREVAQQAVDADVHAVGISTLAAGHKTLVPELIKELNSLGRPDILVMCGGVIPPQDYEFLFEVGVSNVFGPGTRIPKAAVQVLDDIEKCLEKKQQSV

SEQ ID NO: 5599 - protein, 14 aa, Artificial Sequence
  derived and/or modified sequence
NTQIIIQEESGIPK

SEQ ID NO: 5600 - protein, 15 aa, Artificial Sequence
  derived and/or modified sequence
TGLQAGLTIDEFAPR

SEQ ID NO: 5601 - DNA, 2250 bp, Artificial Sequence
  derived and/or modified sequence
atgctgcgcgccaagaaccagctgttcctgctgagcccccactacctgcgccaggtgaaggagagcagcggcagccgcctgatccagcagcgcctgctgcaccagcagcagcccctgcaccccgagtgggccgccctggccaagaagcagctgaagggcaagaaccccgaggacctgatctggcacacccccgagggcatcagcatcaagcccctgtacagcaagcgcgacaccatggacctgcccgaggagctgcccggcgtgaagcccttcacccgcggcccctaccccaccatgtacaccttccgcccctggaccatccgccagtacgccggcttcagcaccgtggaggagagcaacaagttctacaaggacaacatcaaggccggccagcagggcctgagcgtggccttcgacctggccacccaccgcggctacgacagcgacaacccccgcgtgcgcggcgacgtgggcatggccggcgtggccatcgacaccgtggaggacaccaagatcctgttcgacggcatccccctggagaagatgagcgtgagcatgaccatgaacggcgccgtgatccccgtgctggccaacttcatcgtgaccggcgaggagcagggcgtgcccaaggagaagctgaccggcaccatccagaacgacatcctgaaggagttcatggtgcgcaacacctacatcttcccccccgagcccagcatgaagatcatcgccgacatcttcgagtacaccgccaagcacatgcccaagttcaacagcatcagcatcagcggctaccacatgcaggaggccggcgccgacgccatcctggagctggcctacaccctggccgacggcctggagtacagccgcaccggcctgcaggccggcctgaccatcgacgagttcgccccccgcctgagcttcttctggggcatcggcatgaacttctacatggagatcgccaagatgcgcgccggccgccgcctgtgggcccacctgatcgagaagatgttccagcccaagaacagcaagagcctgctgctgcgcgcccactgccagaccagcggctggagcctgaccgagcaggacccctacaacaacatcgtgcgcaccgccatcgaggccatggccgccgtgttcggcggcacccagagcctgcacaccaacagcttcgacgaggccctgggcctgcccaccgtgaagagcgcccgcatcgcccgcaacacccagatcatcatccaggaggagagcggcatccccaaggtggccgacccctggggcggcagctacatgatggagtgcctgaccaacgacgtgtacgacgccgccctgaagctgatcaacgagatcgaggagatgggcggcatggccaaggccgtggccgagggcatccccaagctgcgcatcgaggagtgcgccgcccgccgccaggcccgcatcgacagcggcagcgaggtgatcgtgggcgtgaacaagtaccagctggagaaggaggacgccgtggaggtgctggccatcgacaacaccagcgtgcgcaaccgccagatcgagaagctgaagaagatcaagagcagccgcgaccaggccctggccgagcgctgcctggccgccctgaccgagtgcgccgccagcggcgacggcaacatcctggccctggccgtggacgccagccgcgcccgctgcaccgtgggcgagatcaccgacgccctgaagaaggtgttcggcgagcacaaggccaacgaccgcatggtgagcggcgcctaccgccaggagttcggcgagagcaaggagatcaccagcgccatcaagcgcgtgcacaagttcatggagcgcgagggccgccgcccccgcctgctggtggccaagatgggccaggacggccacgaccgcggcgccaaggtgatcgccaccggcttcgccgacctgggcttcgacgtggacatcggccccctgttccagaccccccgcgaggtggcccagcaggccgtggacgccgacgtgcacgccgtgggcatcagcaccctggccgccggccacaagaccctggtgcccgagctgatcaaggagctgaacagcctgggccgccccgacatcctggtgatgtgcggcggcgtgatccccccccaggactacgagttcctgttcgaggtgggcgtgagcaacgtgttcggccccggcacccgcatccccaaggccgccgtgcaggtgctggacgacatcgagaagtgcctggagaagaagcagcagagcgtg

SEQ ID NO: 5602 - DNA, 2396 bp, Artificial Sequence
  derived and/or modified sequence
gggaaataagagagaaaagaagagtaagaagaaatataagagccaccatgttgcgcgccaaaaaccagctttttcttctgtcacctcactaccttcgccaggtgaaggaatcatccggcagcagactgatccagcagcgcctgctgcaccagcaacaaccccttcaccccgagtgggccgcactcgctaagaagcaacttaaagggaaaaacccggaggaccttatctggcacaccccagagggaatctcaatcaaaccactctactcaaaaagagataccatggatctgccggaggagttgcccggagtaaagccgttcacgagaggaccctatcccaccatgtacacctttagaccctggactatccgccagtacgccgggttcagcacagtagaagagtcaaacaagttttacaaagacaacatcaaggctgggcagcaggggttgtcggtagccttcgacctcgcgacgcatcgcggctacgactccgacaatccgagggtcagaggggacgtgggtatggcgggagtagcaatcgataccgtcgaggacactaagattttgttcgatgggattcctctggagaaaatgagcgtgagcatgacgatgaatggggccgtaattccggtcttggcgaactttatcgtcactggagaagaacagggagtcccgaaggaaaagctcaccgggactatccagaacgacattttgaaagagttcatggtccgcaacacttacatctttccgcctgagccttcgatgaaaatcatcgccgacatcttcgagtatacggctaaacacatgccgaagtttaactcgatttcaatttcagggtatcatatgcaagaagcaggagcggatgcaatccttgagttggcgtatacgttggcggacggccttgaatatagcaggaccgggctgcaagcgggactcacaattgacgagttcgcacccagactgtcgtttttctggggtattgggatgaatttctatatggagattgccaaaatgcgggcaggacgcagactctgggcccatctcatcgagaaaatgtttcaacccaaaaactcaaagtcgctcttgcttcgggcgcactgccagacgtcgggatggagcttgacagagcaggacccctacaataacatcgtacggacagcaatcgaggcgatggcagcggtgtttgggggaacgcagagcctccatacaaattcctttgatgaggcgctgggattgcccacggtcaaatcagcccgaatcgcgaggaatactcagatcatcatccaagaagaatcgggaatcccgaaggtggcagacccctggggtggatcgtacatgatggagtgtctgacaaatgacgtgtacgatgcggcgctgaaactcatcaacgagatcgaggagatgggagggatggccaaggcggtggcagaagggattcctaagctgcgaattgaggaatgcgcagcgcggaggcaggcgcggatcgactcgggctccgaggtgattgtgggggtcaacaaatatcagcttgagaaggaggacgccgtagaagtgctggctatcgacaatacgtcagtgcggaatagacagatcgaaaagttgaagaaaatcaagtcgagccgcgaccaggcactggcagaaaggtgcttggcagccctgacggaatgtgcggcgtcaggtgatgggaacatccttgcgttggccgtcgatgcctcaagagcacgctgtacagtgggggagatcactgacgctttgaagaaggtatttggagagcataaggcaaatgatcggatggtatcgggtgcctatcggcaggagtttggtgaaagcaaggagatcacgtcagcgatcaagagggtacacaagttcatggagagagagggaaggcgaccccgcttgcttgtagccaagatgggacaagatggacacgatagaggcgcgaaggtgatcgcgacggggtttgcggatctcggtttcgacgtagatattggaccccttttccagacacctcgcgaagtcgcgcagcaggcagtcgatgctgatgtccacgcagtgggaatttcgacattggcggcagggcataaaacccttgtcccagagctcatcaaggagcttaattccctcggtagacctgacattctggtgatgtgcgggggagtgattccgccccaagattacgagttcttgttcgaggtcggagtcagcaacgtgtttgggccaggtacaagaatccccaaagccgcagtgcaagtgctcgatgacattgagaagtgtctcgaaaagaaacaacagtccgtctaatgagctgccttctgcggggcttgccttctggccatgcccttcttctctcccttgcacctgtacctcttggtctttgaataaagcctgagtaggaag

SEQ ID NO: 5603 - DNA, 2250 bp, Artificial Sequence
  derived and/or modified sequence
atgctccgagcaaaaaatcagctattcttgctctccccccattatctgagacaggtgaaagaatcctcgggctctcgactcatacagcagagactgttacaccagcaacaaccactgcaccccgaatgggctgccctggccaaaaagcagctcaaaggcaagaacccagaggacctcatctggcatactccggagggaatcagtattaaaccattgtatagcaaacgcgatacaatggacttgcccgaagagctgcccggggtgaagccattcactaggggaccttatcctacaatgtatacgtttagaccgtggacaatccgacagtatgcgggtttctcaacggtggaagaaagtaataagttttacaaggacaatatcaaagcgggtcagcaaggcctttctgtggcattcgatctggcaacacatcgaggctacgatagcgataacccccgggtgcgcggtgatgtgggtatggccggcgtggctatagatactgtggaggacaccaagatcctcttcgatggaattcccctcgaaaaaatgtctgtgtccatgaccatgaacggagccgtgattccagtgcttgccaattttatagttactggtgaggaacaaggggttcccaaggagaagctgactggcacaatccagaatgacattctgaaagagttcatggttagaaacacttacatttttccgccggaacctagcatgaagatcattgcagacatctttgaatatactgcaaagcatatgccaaaatttaacagcattagcatatctggctaccacatgcaagaggctggagcagacgccattctggaactggcgtatacacttgctgatggcttggaatacagccgaacgggcttgcaggccggcctcacaattgatgagttcgcccctcgcctatctttcttctggggaatagggatgaatttttatatggagattgccaaaatgagagccggaagacggctttgggctcacctgattgaaaagatgttccagcctaaaaatagcaagagtctacttttgcgagcacattgtcagacttccgggtggtcactgaccgagcaggatccctataataacatcgtgagaaccgccatcgaagcgatggcggcagtatttggtgggacccagtcactgcacaccaactcctttgatgaagcgttgggcctgccgaccgtgaagagcgctcgaatagcacgaaatacacaaatcattatccaggaagagtctggcattcccaaggtggccgatccatggggcgggtcgtatatgatggagtgtcttacaaacgacgtgtacgacgccgctttgaagctgatcaacgaaattgaagaaatgggcggcatggccaaagcagtcgcggaggggatccccaagttacgaatcgaagaatgcgccgctaggcgacaggcaaggatcgatagcggcagtgaagtgattgtgggcgttaataaatatcagttggaaaaggaggatgcagttgaagtcctggccatagacaatacttcagtgcgaaatcgccaaatcgagaagctcaaaaaaataaagagcagtagagaccaggcgcttgccgagcgatgtttggctgctctgacggaatgcgcggcctcgggagacgggaacattttggccctcgctgttgacgccagccgagcacgatgcacagtgggggaaatcaccgacgctctgaagaaagttttcggagagcacaaggctaatgatcgaatggtgagcggggcctatcgacaggaatttggggaaagcaaggaaattaccagtgcaataaaacgtgtgcataaatttatggagagagaggggaggcgacccaggcttctggtggccaagatgggacaggatggccacgacagaggtgcgaaagtaatcgctacagggtttgcagatctgggtttcgatgtcgatattggaccgctgtttcaaactcctcgagaggtggcgcaacaggctgtagatgctgatgtacacgcagtggggatctccaccttagctgctggccacaagacattggtccccgagctaattaaagagttgaattctctcgggaggcccgacattcttgtgatgtgtggcggagtaatcccaccccaggattatgagtttctgttcgaagttggtgtttctaatgtctttggacctgggacccgaatcccaaaggcagccgtgcaggtattggacgatatcgagaagtgtttggaaaagaaacagcagagcgtc

SEQ ID NO: 5604 - DNA, 2250 bp, Artificial Sequence
  derived and/or modified sequence
atgctgcgggctaagaaccaattgtttttgctgtccccacactacctgcgccaggtcaaggaatcgtcaggtagccgcctgatccagcaacggctcctccatcagcaacaaccgcttcacccggaatgggctgcccttgcgaagaagcaactgaaaggcaagaatcctgaagatttgatttggcacactcctgagggaatctcgatcaagccgttgtactccaagcgagacactatggacctcccggaagaactcccgggtgtgaagccgttcactcgcggcccgtacccgacgatgtacaccttccgcccatggaccattcggcagtacgctggcttctcgaccgtcgaggagtccaacaagttttacaaggacaacatcaaggctgggcagcagggcctctccgtggcgttcgacctggccacccatagaggatatgattcggacaacccgagggtgcggggtgatgtgggaatggctggtgtggcgattgacacggtggaggacaccaaaattctgttcgatggaatccctctcgagaagatgagcgtgtcgatgaccatgaacggagcagtgatccccgtgctggcaaacttcatcgttaccggggaggaacaaggagtgccgaaggagaaactgacgggaactatccaaaatgacatcctgaaagagtttatggtccgcaacacgtacatctttcccccggaaccgagcatgaagatcatagctgacatcttcgaatacaccgccaagcatatgcccaagtttaactcgatctctatctctggataccacatgcaggaagcgggcgcggacgccattctggaactggcatacaccctcgcggacggactggagtactcgagaaccggtctgcaggcaggattgactattgacgagttcgcccctcgcctgtcgttcttttggggaatcggcatgaacttctacatggaaatcgcaaagatgcgtgcaggacgccgcctgtgggctcacctgatcgaaaagatgtttcaaccgaagaacagcaagtctctgcttttgagagcgcattgtcaaacttccggctggtcgctgactgagcaagacccttacaacaacatcgtgagaacggccatcgaagcgatggccgcggtgttcggaggaactcagagcctgcacactaactccttcgatgaagcactcgggctcccgaccgtgaaaagcgccaggatcgccagaaatactcagatcattatccaggaggagagcggaatcccgaaggtcgccgacccttggggaggatcctacatgatggaatgtctgaccaacgacgtgtatgatgcagccctgaagctgatcaacgagatcgaggagatgggaggtatggccaaggcggtggccgagggcattcctaagctccgcatcgaggaatgcgcggcgcggcgccaggccaggatcgattccggctcggaggtgatcgtgggagtcaacaaataccagctcgagaaagaggacgcggtcgaagtgttggccattgacaatacttcagtgaggaaccgccagatcgagaagctgaagaaaatcaaatcatcaagagatcaggctctcgcagaaagatgtcttgcagccctgactgagtgcgccgcgtcaggcgacggaaatatcctcgcgctcgcggtggatgcgtcacgcgcccggtgcaccgtcggagaaatcactgatgccctgaagaaggtgttcggagagcataaggcaaacgaccggatggtatcaggagcctaccgccaggagtttggcgagtctaaggagattacttcggctattaagcgcgtgcacaagtttatggaacgggaaggacgccgcccgagactgctggtcgcaaagatgggacaggatggccacgatagaggagccaaagtgattgccactggattcgcggatctgggattcgatgtggacatcggacctctgttccaaacgcctcgggaagtggcgcaacaggccgttgacgcggacgtgcacgcggtgggaatctccaccctggcggccgggcacaaaacccttgtgccggaactcatcaaagaattgaacagcctcggacgcccggatatccttgtgatgtgtggcggcgtgatccccccgcaggactacgagttcctctttgaagtgggcgtctcgaacgtctttggaccgggaacccggatcccaaaggctgcggtgcaggtgctcgatgacatcgagaagtgccttgagaagaagcagcagtcagtc

SEQ ID NO: 5605 - DNA, 2250 bp, Artificial Sequence
  derived and/or modified sequence
atgcttcgggcaaagaatcaactttttcttctttcccctcattacctccgtcaggtgaaggaatcgtcggggtcaaggcttattcagcagcgcctccttcatcagcagcagcctttgcatccagaatgggccgcactcgctaagaaacaactgaaggggaagaatcccgaagatttgatttggcatactcctgagggcatatcgattaagcctctgtacagcaagcgggacactatggacctgcctgaggaactcccgggtgtgaaaccattcactaggggaccttacccaaccatgtacaccttcaggccctggaccatccggcagtacgcaggattctcgaccgtcgaggaatccaacaagttttacaaggataacatcaaggcagggcagcagggcctgtcggtggcattcgatttggcgacccatcgaggatacgactcggacaacccaagagtcagaggcgacgtgggaatggccggcgtcgcaatcgacacggtggaggatactaagattctctttgatggaatcccactggagaaaatgtccgtgtcgatgaccatgaacggagcagtgatcccggtgcttgcaaactttattgtgactggagaagagcagggagtccccaaggaaaagttgaccggaacgatacagaatgacatcctgaaggagtttatggtgaggaacacttacatatttcccccggaaccatcgatgaagattatcgcggatatctttgagtacacggccaagcacatgccaaagttcaattcgatcagcatctctgggtaccatatgcaggaagcaggagcggacgccattctggaactcgcatacactcttgccgatgggctggaatactcgaggactggactgcaagcaggacttactatcgatgagttcgcacctcgcctgtcgtttttctggggaattggcatgaacttttacatggaaatcgcaaaaatgagagccgggcgccgcctgtgggcacatcttattgagaaaatgttccagccaaagaattcaaagagcctgcttcttagggcacactgccaaacttcaggatggtcgctgactgaacaggacccatacaataacattgtccgcaccgcaatcgaagcaatggcagcggtgtttggtggtacccagtccctgcacaccaattcctttgatgaggccctcggtctgcccaccgtgaagtccgcgagaatcgcaagaaacacgcagatcattatacaagaagaaagcggtattcctaaggtggccgacccttggggaggatcatacatgatggaatgcctgaccaatgacgtctacgatgccgcgctcaagctgattaacgagatcgaagaaatgggaggaatggcaaaggcagtggccgaggggattccgaaacttagaatcgaagaatgtgcagcacggcgtcaagctcggatcgactcggggtcagaggtcatcgtgggagtgaacaagtaccagctggaaaaggaggatgcagtggaagtgctggctattgacaatacttcagtgagaaaccgccagatagagaagctgaagaagatcaaaagttcccgtgatcaggcactcgccgaaagatgtctggccgcactgaccgagtgtgcagcatcgggagatggaaacattctcgcactggcagttgatgctagcagagctcgatgcactgtgggggaaattaccgatgcgcttaagaaggtgttcggcgagcataaggcaaacgataggatggtgtccggcgcgtaccgacaagaatttggagaatcgaaagaaatcacgtccgcgattaagcgggttcataagttcatggaaagagagggtcggcgccctcggctgctggtggcaaaaatgggtcaggatggccacgataggggcgcaaaagtgattgcaaccggatttgctgatctcggctttgatgtcgatattggacctctttttcagaccccaagggaagtggcacaacaggcagtggatgctgatgtgcatgctgtgggaatttcaactctggcagctgggcataaaaccctcgtccccgagctgatcaaagagctgaactccctgggacgtccagatattcttgtgatgtgtggaggggtgattcctcctcaagattacgagtttttgtttgaggtgggtgtgtccaacgtgtttggccctggtacccgtatccctaaagcagcagtccaagtcctggacgatattgagaaatgcttggaaaagaaacaacagtcagtc

SEQ ID NO: 5606 - DNA, 2250 bp, Artificial Sequence
  derived and/or modified sequence
atgctgagagctaaaaaccagctctttctgctctcccctcattacctgcgccaggtcaaggagtcttctggctcacgcctcatccagcaaaggctgctgcaccagcaacagcctctccaccctgagtgggccgctttggccaaaaaacagctgaaggggaagaatcctgaagatcttatctggcacactccagaaggtatatctatcaagcctctgtactcaaaaagagataccatggatcttccggaggagttgcccggggtgaagccattcacccgaggcccttacccgacgatgtacaccttcagaccctggactatcaggcagtacgccggcttcagtacagtagaagaatcaaataaattttataaagacaatatcaaagccgggcaacagggactgtccgtcgctttcgacctggcaacgcaccgcgggtatgatagcgataaccctcgggttagaggtgacgtgggcatggccggagtggccattgacacagtcgaggacactaaaattctgttcgatggcatacccctggaaaaaatgagcgtctcaatgacgatgaacggagccgtgattcctgtcttggctaactttatcgtgacaggagaggaacaaggggttccaaaggagaaattgacgggaaccatccagaacgacatcctcaaggagtttatggtaagaaatacttacatcttccctcctgagccctcaatgaagatcatagccgatatcttcgagtacactgctaaacatatgccaaagtttaattccatctccatctctggctatcatatgcaggaggctggagctgacgccatcctggaactcgcgtataccctggcagacggcctggagtacagtcgcactggcctccaggccggattgacaatagacgagttcgctccgcgactgtcttttttctgggggatcggcatgaatttttacatggagatagctaagatgcgggctgggcgcagactttgggctcatctcatcgagaaaatgttccagcctaaaaactctaaatcacttctgcttcgggcacattgccaaacatccggttggtcactgacggaacaggacccgtacaacaacatcgtgcgaactgcaatcgaagcaatggccgccgtgttcggtggaacacagtcactgcataccaattcttttgacgaagctctcggcttgcccacagtaaaaagcgcccggatcgctcggaatacgcagatcatcatccaggaggagtctggcattcctaaagtcgctgacccatggggggggagttacatgatggagtgcttgacaaacgatgtgtatgacgccgccctcaaacttataaatgagatcgaggaaatgggcggcatggctaaggccgtggcggagggcattcccaagctgcgaattgaggaatgcgcggcccggaggcaggccaggatcgatagcgggtctgaggttatcgtgggggtgaataagtatcagctggagaaggaagatgccgtcgaagtgctggccatcgacaacacctctgtgaggaacagacagattgaaaaactcaaaaagatcaagagctcacgagaccaggcgcttgcggaacgatgcctggcggccctcaccgagtgtgctgccagcggggacggaaacatcctcgctctcgctgtggatgcgtctagagctcgctgtaccgttggcgaaatcacagacgcactgaagaaagtcttcggagagcacaaagctaatgatcggatggtaagtggcgcttataggcaggaattcggggagtccaaagagataacatcagcgatcaagcgggtacataagttcatggagcgcgaaggcaggaggccacgactcctcgttgccaagatgggccaggatggtcatgacaggggggccaaagtcattgccaccggtttcgctgatctgggtttcgacgtggacatcggacctcttttccaaacccctagagaggtcgcacagcaagcggtcgatgctgatgtccacgccgtcggcatctccactttggctgcgggccacaaaactctggtgccggagttgatcaaagaactgaactccctgggcagaccagatatcctggtgatgtgtgggggagtgataccaccgcaagactacgagttcctgtttgaggtaggtgtcagtaatgtctttggcccagggactaggatcccaaaggccgccgtccaagtcctcgacgatatagaaaaatgcctggaaaaaaagcagcagtcagtg

SEQ ID NO: 5607 - DNA, 2250 bp, Artificial Sequence
  derived and/or modified sequence
atgctgagggccaagaaccagctgtttttgctgagcccgcactacttgcggcaggtgaaggaatcgtcaggatcaaggctgattcagcagcgcctcctccatcagcagcaaccgctccatccggaatgggccgcgctggcgaagaagcaactgaaaggaaaaaacccagaagatcttatttggcacacccccgaaggtattagcatcaagccactgtactccaagcgcgacaccatggacctgccggaagagcttcctggtgtcaagccctttacccggggcccgtacccaaccatgtacactttccggccatggactatcaggcaatacgcgggattctccaccgtggaggaatctaataagttttacaaggacaacatcaaagcgggtcaacaggggctctccgtggccttcgaccttgcgacgcaccggggatacgactccgataatccgcgcgtgcgcggagatgtcggaatggcaggagtcgccatcgacactgtcgaagatactaagatcctcttcgacggaatcccgctcgagaagatgtcggtgtctatgactatgaatggagctgtgatcccagtgctggcgaactttattgtgactggtgaggaacagggagtgcctaaagagaaacttaccggaaccattcagaacgacatcctgaaggagttcatggtcagaaacacgtacatcttcccaccggagccctcaatgaagatcatcgcagacatctttgagtacaccgcgaagcatatgccgaaattcaactcaatctcaatctcgggataccatatgcaggaagccggcgccgatgccatcttggaattggcttatacgctggccgacggactcgaatactcgcgcactggacttcaggcaggcctcaccatcgacgagttcgcccctcggttgagctttttctggggtatcgggatgaacttctacatggaaatcgccaagatgcgcgcaggacggcgcctgtgggctcacctgattgagaaaatgttccaacccaagaattccaagtccctcttgctcagggctcactgtcagacgtcgggatggtcgttgactgagcaggacccgtacaataacatcgttcggactgccatcgaagccatggctgccgtgttcggcggaacccagagcctccacactaactcatttgacgaagcgctgggactgccgactgtcaagtcagccagaatcgctcggaacacccagatcatcatccaagaagagtcaggaatcccgaaagtcgccgatccatggggaggctcctacatgatggaatgcctgacgaacgacgtctacgatgccgctctcaagttgatcaatgagatcgaggaaatgggaggaatggctaaagccgtggccgagggcatcccgaagctccggatcgaagaatgcgccgcgagacgacaggctaggattgactcgggctcagaggtcatcgtcggagtcaacaaataccagctggaaaaagaagatgctgtcgaggttctggccatcgacaacacctccgtcagaaacagacagatcgagaagctgaagaaaatcaagtcaagcagagatcaagccctggctgagcgttgccttgcagccctcaccgaatgcgctgcgtctggagacgggaatatccttgccctcgcggtcgacgcttcccgggcgcggtgtaccgtgggcgagataacggacgccctgaaaaaggtgtttggagaacacaaggctaacgaccgcatggtgagcggagcttaccgccaagaatttggagaaagcaaggaaattacttcggccatcaagagagtgcataagttcatggagcgcgaaggccgcagacctcggctcctggtcgcaaagatgggccaggacggccacgatcggggagctaaggtgatcgcaaccggattcgccgacctgggattcgacgtggacatcggaccactgttccaaacgccgcgagaagtggcgcaacaagctgtggacgcggacgtgcatgccgtgggtatctcaaccctcgctgccggacacaagaccctggtcccggaactgatcaaggaactgaacagcctgggacgcccggatattctggtgatgtgcggaggagtgatacccccgcaagactacgagttcctcttcgaggtgggagtcagcaatgtctttgggccgggtactcgcatccctaaggcggccgtccaagtgctggacgatatcgagaagtgcctggaaaagaagcagcagtccgtg

SEQ ID NO: 5608 - DNA, 2250 bp, Artificial Sequence
  derived and/or modified sequence
atgctcagggctaagaatcagctgttcctgctgtctccccactatctgagacaggtgaaagagagctcagggagcagactcatccagcagagactcctacaccagcagcaacccctgcaccccgaatgggcagctctggcaaaaaaacaactcaagggtaagaatccggaggatctcatatggcacactccagaagggattagcattaagcccctgtacagtaaacgagatactatggacctcccagaagaactgcccggggtcaagccttttacccggggaccatacccaacaatgtatacatttcgaccttggacaattcggcagtacgctggattctccaccgtagaagagtctaacaaattctacaaagacaacataaaagccggtcagcagggattgagcgtggctttcgaccttgccacccacagaggatatgattctgataaccctagagtccggggtgacgtgggcatggccggagtcgcaatagacacagtcgaagacaccaagatattgtttgatggcatcccattggagaagatgtctgtatctatgaccatgaacggggctgtaattcctgtcctggccaacttcatcgttacaggagaggagcagggtgtgcccaaggagaaactgactgggacaatccagaatgatattttgaaggagtttatggtccggaatacttacatttttcctccagagccatcaatgaaaataattgctgacatattcgagtatacagctaaacacatgccaaagtttaacagtatatcgatcagcggatatcacatgcaggaggctggcgctgacgccattcttgagttggcctatacgctcgccgacgggctggaatacagccggactggcctccaagcagggctgaccatcgacgaatttgccccacgtctttcctttttctggggcatcggaatgaacttttatatggagatcgctaaaatgcgcgccgggcggaggctgtgggcccacctgattgagaagatgttccagcctaagaatagcaaaagcctgcttctaagagctcactgtcaaacttccggctggagcctgacggaacaggatccttacaacaatatagttaggacagcgattgaggcgatggccgcagtgtttggcggtactcagtctctccacacaaatagcttcgatgaggcacttggactgcctactgtcaagtctgcacggatcgctagaaatacccagatcatcatccaagaagagagcggcatccccaaggttgctgacccctggggaggctcctacatgatggagtgcctgaccaacgacgtgtacgatgccgcactcaagctcattaatgagatcgaggaaatgggggggatggcgaaggccgtggctgaaggcatacccaagcttcgtatcgaggagtgcgccgctcgtcgtcaggcacggatcgatagcgggagcgaagtcattgttggcgtgaacaaatatcagctggagaaggaagatgcagtggaagtactggccatcgataatacttccgtccgaaatcgccagattgaaaaactgaagaagattaagtcatcacgtgaccaagcactagccgaacgttgtttggcggccctgacagaatgtgcggcttccggtgacgggaatattctagccctagccgtggacgccagccgagcccggtgtaccgttggcgaaatcaccgatgcactgaaaaaagtctttggcgagcataaagccaacgatcggatggttagtggtgcgtaccgacaagagttcggcgagagtaaggagataacatctgctattaagagggttcataaatttatggagagggagggccggaggccacgcctcctcgtcgcaaagatggggcaggacggtcatgaccggggggcgaaggttattgccaccggcttcgcagatctgggctttgacgtagatattggtccacttttccagaccccccgagaagtcgctcagcaggccgtggacgccgacgtccatgcagtggggatttccactttggctgcgggacacaagactctggtcccggaactcatcaaggagctcaattcactcgggcgacccgatatcctggtaatgtgcgggggagttatccccccgcaggattatgaattcctgtttgaggtgggcgtctctaacgtgtttggccctggaacaaggatccccaaagcagcagtccaggtgctggacgacatcgaaaagtgtctggaaaagaagcagcagtcggtg

SEQ ID NO: 5609 - DNA, 2250 bp, Artificial Sequence
  derived and/or modified sequence
atgctgagagctaaaaaccaacttttcttgctttccccacattatcttcggcaagtgaaggaaagctcgggttcgagattgattcaacaacgacttctgcaccagcaacaacccctccatcctgaatgggccgcccttgctaaaaagcagcttaagggaaagaatccagaggatctgatttggcatactccagaaggcataagcatcaaacctctttactcaaagagggataccatggatctccctgaagaacttccaggcgtgaagccattcacgcggggtccttaccctactatgtacacgttcagaccttggaccattcggcaatacgccggattttctactgtcgaagaatcaaataagttctacaaagacaacattaaagcaggtcagcagggactctcggtggcctttgacctggccacccatcggggatacgatagcgataatccaagagtgaggggagacgtgggaatggctggggtcgcaatcgatactgtcgaggatactaagatcttgttcgacgggatacctttggagaaaatgtcggtgagcatgaccatgaacggagcggtgatccctgtcttggcaaactttattgtcactggagaagagcagggagtccctaaggaaaagctcaccggaactattcagaacgatatacttaaagagtttatggtcagaaacacttacatctttcctcccgaacctagcatgaagataattgctgatatctttgaatacactgccaagcacatgccgaagtttaactcaatcagcatcagcggctaccatatgcaagaggccggtgcagatgcaattctcgaactggcttacacccttgcagatggtctggagtactctcggactggccttcaagccggccttaccatagacgagttcgcaccgaggctctcgttcttttggggaataggaatgaatttctacatggaaatcgcaaagatgagagctggacgcagactgtgggcacatcttatcgagaagatgtttcagccaaagaattccaaatcgcttctgctccgggcccactgtcaaacgagcggttggtcgcttaccgagcaggatccatacaacaatatcgtcagaacggccattgaagccatggcagccgtctttggcggaacccagagccttcatacgaactcctttgatgaggcacttggactccctaccgttaaatcggccagaatagcacgtaatacccagataatcattcaggaagaatccggcatccctaaggtcgccgatccctggggtggatcatacatgatggagtgtctcaccaatgatgtgtatgacgcggcactcaagctcattaacgaaatagaagaaatgggaggcatggcgaaggcagtggcagaaggcatacccaaactcagaattgaagaatgtgcggcacgtaggcaggcacgaatagattcgggatccgaagtgatcgttggagtgaataagtaccagctggaaaaggaggatgcggtggaggtcctggctatagataacacttcggtgcggaacagacagatcgaaaagctgaagaagattaagtcgtccagagatcaagccctggcagagaggtgtcttgcagcacttaccgagtgtgcagcatcaggtgatgggaacatcttggcacttgcagtcgacgcatccagggcacgatgcactgtgggggaaatcaccgacgcattgaagaaagtgtttggtgaacacaaggcaaatgaccggatggtgtccggggcgtaccgacaagagtttggagaatcgaaagagattacctcggcaattaagagagtgcataagtttatggaacgcgaagggcgcagaccgcggttgctcgttgctaagatgggacaagatggccacgatcgaggtgcgaaagtcattgcgactggatttgcagacttgggattcgacgttgacatcggccccctctttcagactcccagagaggtcgcacagcaggcagtggatgcagatgtgcacgcagtgggtattagcactcttgcggcaggacataaaactcttgtccctgaactgattaaagagctgaattcattgggtcgcccggatattctcgttatgtgtggcggagtcatcccacctcaagactatgagtttctgtttgaggtgggagtctctaacgtctttggaccgggcactcgaatccccaaagcagccgtgcaggtccttgatgacattgaaaagtgccttgagaaaaagcaacaatcagtc

SEQ ID NO: 5610 - DNA, 2250 bp, Artificial Sequence
  derived and/or modified sequence
atgctgagagccaagaatcagctcttcttgctctccccgcattaccttcgccaagtgaaagaatcctccggaagcaggttgatccaacaaagacttctccaccagcagcagccactgcacccagaatgggcggccctggccaaaaaacagctgaagggaaaaaaccctgaagatctcatctggcacactccagagggaatctcaatcaagcctctttactccaagcgcgacactatggacctgccggaagagctgccgggtgtgaagccattcacgagaggcccgtacccaacgatgtatacctttcgcccatggactatccggcaatacgctggattttccaccgtcgaagagagcaacaaattctataaagacaacatcaaggccggacagcagggactgtctgtggctttcgacctggctacccatcggggttacgacagcgacaacccgcgcgtgcggggtgacgtgggcatggcaggagtcgccatcgacaccgttgaggatacgaagatcctctttgacggaatcccgctggaaaagatgtcggtcagtatgactatgaatggagcggtgatcccggtgctcgcaaactttattgtgacgggagaagagcagggagtcccgaaggagaagctcaccggaacgatccaaaacgacatccttaaggagtttatggtgcggaacacctacattttcccgcccgagccgtcgatgaagattatcgcggatatcttcgaatacaccgcaaaacacatgccgaagttcaatagcatctcaatctcggggtaccacatgcaagaagcgggagccgacgcaattctggaattggcctacaccctggcagatggtcttgaatactccaggaccgggctgcaggcaggactcaccatcgatgaattcgccccacgcctgtctttcttttggggcattgggatgaatttctacatggagatcgcaaaaatgcgcgccggacggcgtctctgggcgcatctcatcgagaagatgttccaaccgaagaattccaaatcgctgctgctgcgagcacactgccaaacctcgggatggtccttgaccgaacaagacccttacaacaacatcgtgagaactgccatcgaggccatggccgcagtgtttggaggaactcagtcactgcatactaacagcttcgacgaagccttgggccttccgactgtgaaatcggcccggatcgcacgcaacacccagattatcatccaggaggaatcgggaattccgaaagtagccgacccctggggaggctcctacatgatggagtgtctcactaacgatgtgtacgacgccgcgctcaagctcatcaacgagatcgaggaaatggggggaatggccaaagcggtggccgaagggatcccaaaattgcgcatcgaagagtgcgccgcgagaaggcaggcaagaattgattcaggatcagaggtcattgtcggagtgaacaagtaccagctcgaaaaggaggacgccgtggaagtgcttgcaattgacaacacttcggtgcgcaaccgtcagatcgagaagttgaagaaaatcaagtcgagccgcgatcaggcgctggctgaaagatgcctcgccgccctgaccgagtgcgctgcctccggtgacggaaacattctggcgctcgctgtggacgcctccagagcccggtgcacggtgggggaaatcactgacgctctcaagaaggtgttcggagaacataaggctaatgaccgcatggtgtcgggagcctacagacaagagttcggtgagtcaaaagaaatcactagcgcgatcaaacgcgtgcacaagttcatggagcgagagggaagaaggcctcggctgctggtcgccaaaatgggtcaggatggacacgaccgcggagcgaaagtcatcgcgaccggcttcgctgacctgggattcgatgtggatatcggcccactgttccagacgcctcgcgaagtcgcccaacaggccgtcgatgccgatgtgcatgcagtgggaatcagcactctggctgcgggtcataaaacgctggttccagagctgatcaaggaactgaactccctgggacgcccagacatcctggtgatgtgcggcggtgtgatcccgccacaggattacgaattcctgttcgaagttggagtctccaacgtgttcggcccagggacccggattccaaaggccgctgtccaggtcctggacgacatcgaaaaatgtctggaaaagaaacagcagtcagtg

SEQ ID NO: 5611 - DNA, 2250 bp, Artificial Sequence
  derived and/or modified sequence
atgttgagagcgaaaaatcaactgttccttctgagcccacattacctgagacaggtgaaagagagctcaggatcacgccttatccagcaaagactcctccaccagcagcaacctctccatcctgagtgggcagctctggccaagaagcagcttaagggaaagaaccctgaggacctgatatggcatacgccggaaggaatctcaattaagccgctgtacagtaaacgggatactatggatctgcccgaggaattgcccggagtgaagccgttcacccgcggtccttaccccactatgtacactttccgcccgtggaccatccggcaatatgcagggttctccactgtcgaagaatctaacaagttctacaaggataacatcaaggccgggcaacagggcctgagcgtggcgtttgacctggctactcatagaggctacgactcagataacccgcgagtgaggggagacgtcggtatggcaggcgtggcaatcgacacggtggaggacaccaagatccttttcgatggaatcccgctggaaaagatgtccgtgagcatgacgatgaacggggctgtgatcccggtactggcaaacttcatcgtcacgggagaagagcaaggagtccctaaagagaaactgactggaacgatccaaaatgatatcctgaaggaattcatggtgcggaacacttacattttcccaccagagccatccatgaaaatcattgcggatatcttcgagtacactgcgaaacatatgccaaagttcaattcaatctcaatctcgggttaccatatgcaggaggcgggggcggatgccatactcgaacttgcctacaccttggcggatgggctcgaatacagccggactggactccaggcaggccttaccatcgatgaattcgccccgcggctttctttcttttggggcattgggatgaacttttacatggagatcgccaaaatgcgcgctgggcgcaggctgtgggcccatcttatcgaaaagatgttccaaccgaagaatagcaagagcctgctcttgagagcccattgtcagacctcgggttggtcactgactgaacaagatccatataacaacatcgtcagaactgcaatcgaggcaatggccgcggtgttcggtggaacccagtcacttcacaccaacagctttgacgaggccttgggcctcccaacggtgaaatcggcgcggatcgctcggaatacgcagatcatcatccaggaggagagcggaatcccgaaggttgcggacccttggggaggatcatacatgatggaatgcctgaccaatgacgtgtacgatgctgcgctgaaactcatcaatgagattgaggaaatgggaggtatggccaaggctgtcgcggaaggcattcctaaactccgcattgaagaatgtgcggcccggcggcaggccagaatcgattcgggaagcgaggtcatcgttggagtgaacaaataccagctggagaaggaggacgccgtggaggtgctggccattgataacacttcagtcagaaatagacagatcgagaagctgaagaagataaagtcatcgagggaccaagcgctggccgagcgctgcctcgccgctttgacggagtgcgcagcgagcggggacggcaatatcctggccctcgccgtggacgcctcgcgtgctagatgcactgtcggagaaatcaccgacgcgttgaaaaaggtgttcggcgagcacaaagcaaacgataggatggtgtctggtgcgtaccgacaggaatttggagaatcaaaggagatcacctcggccatcaagagagtgcacaaattcatggagagggaaggcaggaggccgcggctgctggtggccaagatgggtcaggacggacatgaccgcggagctaaggtgatcgcaaccggatttgccgatctcgggttcgacgtcgacattggaccgctctttcagacccctcgcgaagtggctcaacaggccgtcgatgcagatgtccacgcagtggggatttccactctcgccgcaggtcataaaacccttgtgccagagctcatcaaggagctcaattcgctgggcagacccgacatccttgtgatgtgcggaggggtgatcccgccgcaagattacgaatttctcttcgaagtgggagtgtccaacgtgttcggccctggaacccggatcccaaaggctgcagtgcaggtcctcgacgacattgaaaagtgcctggagaagaagcaacagtcggtg

SEQ ID NO: 5612 - DNA, 2250 bp, Artificial Sequence
  derived and/or modified sequence
atgctccgtgctaagaatcagctgttcctgttatcgcctcactacctcaggcaggtcaaagagtcaagcggctcgcggctgattcaacagcgactcctgcaccagcaacagcccctacacccggagtgggcagccctggctaagaagcaattaaaaggcaaaaacccggaggatctgatctggcacacacctgaagggatcagcattaagcctttgtattccaaaagagatacgatggacctgcctgaagagttacctggggtcaagccattcacaagaggcccatatcccaccatgtatacgttccgaccatggacaattaggcagtatgcggggttctccactgtggaggagagtaacaagttttataaggacaacattaaggccgggcagcaggggctgagcgtggcctttgacctggcgactcatagagggtatgatagcgataatccacgggtgagaggggatgtgggcatggcgggcgtagcaattgacaccgtggaggacactaaaattctgttcgatgggatacccctggagaagatgagcgtttccatgacaatgaatggggcggtcatcccggtgcttgccaacttcattgtcaccggagaggagcagggcgttcctaaagaaaagttaacaggaaccattcagaacgatattctaaaggagttcatggtgcggaacacctatattttcccgcccgagccgtccatgaagatcatagcagatatttttgagtatactgcgaagcatatgcccaaattcaactccatctcaataagcggttatcatatgcaggaggctggggcagatgccattctcgagctcgcctacacactggcggatggccttgaatactctaggaccggactgcaagccggcttgaccatcgatgagttcgcaccgagactgtcatttttttggggcatcggcatgaatttctacatggaaattgccaaaatgagagccggacgcagactgtgggcgcatttgatagagaaaatgttccagcctaaaaatagcaagtctcttcttctgcgcgcccattgccagaccagcggttggtcactaactgagcaggatccctataacaacatagtacggaccgccatagaagcaatggcggctgtatttggaggaacacagtccctccatactaattcattcgacgaggccctcggactgcccaccgtgaagagcgcccgcatcgcaaggaatacccagattatcatacaggaggaatccgggatccctaaagtggccgacccatggggaggctcttatatgatggaatgtctgacaaacgatgtctacgatgccgccctcaagcttatcaacgaaatcgaggagatgggcggcatggctaaggcggtcgctgaagggattcccaagcttcggatcgaagagtgcgctgcccggaggcaggccagaatagatagtgggagcgaggtgatcgtcggagtgaacaagtatcaacttgagaaagaagacgctgtggaagtgctggcaattgacaatacctctgtgagaaatcgacagattgagaaactcaagaagatcaagagttcgcgggaccaggcacttgctgagaggtgcttagcagctctgacagaatgtgcagcttccggagacggcaatattttggctctcgcagtcgatgcctctagggctcggtgcaccgtcggcgaaattacagatgcgctgaagaaagtgtttggagagcacaaggccaacgacagaatggtgtctggagcttacaggcaggagttcggagagtcaaaggaaatcacctccgccattaaacgtgtccataaattcatggaacgagagggcagacgaccgcggctgctcgtggccaagatgggccaagatggccatgacagaggtgccaaggtcatcgctacaggctttgcagatttggggttcgacgtcgacatcggacctctatttcagaccccccgagaagttgcacagcaggcggtcgacgccgacgttcacgctgtcgggatctctacattggcagctggccacaaaaccctggtgcccgagttgatcaaagaacttaacagcttggggaggcccgatattctagtgatgtgcgggggggtgattccccctcaagactacgagttcctgtttgaagtcggggtgtcaaatgtgtttggcccaggaacccgaattcccaaagccgcagtgcaggtcctggatgacatcgaaaagtgcctcgaaaaaaaacaacaatccgtg

SEQ ID NO: 5613 - DNA, 2250 bp, Artificial Sequence
  derived and/or modified sequence
atgcttagggccaagaaccaactgtttcttctctcgccgcattaccttcgccaggtcaaagaatcgtcaggatcccgactcatccagcagagacttctgcaccagcaacaacctcttcaccccgagtgggcagccctcgcaaagaaacaactgaaggggaaaaatcccgaggatttgatttggcataccccggagggtatctcaatcaagccactctactccaaacgcgacaccatggatctgccggaagagctgcccggagtgaaaccgtttacccggggaccttaccccactatgtacaccttccgcccttggacgatacgccaatatgcgggtttttctactgtcgaggaatcgaacaagttttacaaggacaacattaaggccgggcaacaagggctttcagtggcctttgatctcgcaacgcatcgcgggtacgatagcgataatccacgtgtgagaggtgatgtgggaatggctggtgtggcaattgacaccgtcgaagatactaagatactctttgacggaattccactggaaaagatgtcggttagtatgaccatgaacggagcagtcattccagtcctcgctaacttcattgtgactggtgaagagcaaggagtgcctaaggaaaaacttaccggaactattcaaaacgatatcttgaaggaattcatggtgcggaacacttacatattccctcctgagccttccatgaagatcattgcagacatattcgaatacactgccaagcatatgccgaagttcaactcgatctcgatatctggataccatatgcaggaagcaggcgccgatgcaatcctggaactggcatacactcttgcagatggtcttgaatactcccgaacgggattgcaggcaggcctgaccatcgatgagttcgcaccacgacttagtttcttttgggggatcggtatgaatttctatatggagatagcaaagatgcgggcaggtcggcgcctctgggcccacctgattgaaaagatgtttcagcccaagaatagtaagtcccttctgcttcgcgcacattgtcagacctcaggatggtcccttaccgaacaggacccatacaacaatatcgttagaactgcaattgaagcgatggcagcagtgtttggtggtactcagagcttgcacactaactcctttgatgaagcgcttggtctgccaactgtcaagtccgcgagaatcgcacggaacacccagattatcattcaagaagaatcggggattcccaaggtcgccgatccctggggagggagctacatgatggaatgcctgactaacgacgtgtacgacgccgcactgaagctcattaacgagattgaagaaatgggtggaatggccaaagcagtggcagaaggaataccgaaacttagaatcgaggagtgtgcagcccggagacaagcccggattgactcaggcagcgaggtgattgtgggagtgaacaaataccaactcgaaaaagaggacgcggtggaagtgttggccattgataatacctcggtccgaaataggcagattgaaaagctgaagaagatcaagtcctcaagggaccaagcgttggcagagcgctgcctggcagctctcaccgaatgtgcagcctcaggagatggaaacatacttgctcttgcggtggatgcatcaagagctagatgtacggtgggcgaaattaccgatgcacttaagaaagtgttcggtgaacataaagctaatgatcggatggtcagcggcgcttataggcaggaatttggagaatctaaggagatcactagcgcgataaagcgggtgcacaaattcatggagcgtgaagggcggaggcctagactgctggtggcgaaaatggggcaagatggacacgatcgcggtgccaaggtcattgcaaccggttttgcagatctgggatttgacgtcgatattggtccgctttttcagacgccccgagaagtggcccagcaagcggtagatgcggacgtccatgccgtaggaatctccactttggcagcaggacataaaacgctcgtcccagagcttatcaaggagcttaacagcttgggcaggccagacatcctcgtgatgtgtggcggggtgattccgcctcaagactacgagtttctgtttgaggtgggagtgtccaacgtctttgggcctgggactagaataccaaaggcagcggtgcaagtgcttgacgatatcgagaagtgcctggaaaagaagcagcaatccgtg

SEQ ID NO: 5614 - DNA, 2250 bp, Artificial Sequence
  derived and/or modified sequence
atgctgcgggccaaaaatcaactatttttgctgtcaccccattatctccggcaggtaaaggagagttcaggttcccgcctgattcagcagcgcctgcttcatcaacaacagccacttcaccccgagtgggccgcactcgctaaaaagcaactcaaggggaagaacccagaagacctgatttggcacacccctgagggcatttcaataaagcctctttacagcaaacgggatacaatggatctacctgaggagttgccaggagtgaagcccttcacacgagggccctaccctaccatgtacacctttagaccttggaccataaggcagtacgccggcttctctacagtggaggaaagcaacaagttttacaaggataatataaaggccggacagcagggactgtctgtggcatttgatcttgctacgcatcggggctacgatagcgacaatccacgcgtgagaggcgatgtgggcatggccggagtggcaatcgacaccgtagaggacacgaaaatcctgtttgacgggatcccactggagaagatgtctgtgagtatgactatgaacggggctgttatccctgtcttagccaacttcatagtgaccggagaagagcagggtgtgcctaaggagaagctgacaggcacaatccagaatgatatcctcaaagaatttatggttcgaaacacatacatcttccctcctgagccaagcatgaaaatcattgcggacatattcgagtacacagctaagcacatgcctaagttcaatagtatctctataagcggctatcacatgcaggaggctggagctgacgccatcttagagctagcttacaccttagctgacggtctcgaatactctcggactggcctgcaggccggcttgaccatagacgagtttgccccacgcctatcttttttttggggaataggcatgaatttctacatggagattgcaaagatgagagccggacgcagactttgggcgcatttgattgagaaaatgttccaacccaagaactccaaatccctcttgctgcgcgcgcactgccaaacctctggatggagcttgacagaacaggatccttataacaacatcgtcaggactgccatcgaagctatggccgcggtgttcggcggcacccaatcccttcacactaactccttcgatgaggctctcgggctgccaacagtcaaatctgctaggatcgcccgcaacacgcagataattattcaagaggagtcgggaattcccaaagtggctgatccctggggggggagctacatgatggagtgtctcactaatgatgtctacgatgccgctctgaaactgataaatgagatcgaggaaatgggaggtatggctaaggcggtagcagagggcatccctaaactgaggatcgaagagtgtgctgctcgcaggcaggctaggatagactcgggatccgaagttattgtcggggtgaacaaatatcagctggagaaggaagacgctgtggaagtgttggccatagacaatacatccgttcggaaccgccagatcgagaaactgaaaaagatcaaatccagcagagatcaggccctggctgagaggtgtctggcggcactgacagagtgcgcggcgagtggcgacgggaatattctcgctctggcagttgacgcttccagagcacgctgtactgtgggagagataacagatgcacttaaaaaggtattcggagagcacaaggcaaacgacaggatggtgtccggcgcgtacaggcaggaattcggcgaaagcaaggagatcacatccgcaataaaaagagtgcataagttcatggaacgggaaggtcgtcggcccagactgctggtagctaaaatgggccaagacggccatgaccgaggtgcaaaggtcattgccaccggctttgcagatctcggcttcgacgttgatatcgggccactgttccaaaccccacgcgaagtcgctcaacaggccgtggacgctgacgttcatgcagtgggcatttctacgctggcagcaggccacaaaaccctagtgcccgaactgatcaaagaattgaacagcctagggcggccagatattttggtcatgtgcgggggagtcatcccacctcaggactacgaattcttatttgaagttggcgtctcaaacgtctttggtcctggcacacgcattcctaaggctgcagtacaggtgctcgacgacatcgagaaatgcctggagaaaaagcagcagtctgtg

SEQ ID NO: 5615 - DNA, 2250 bp, Artificial Sequence
  derived and/or modified sequence
atgctccgtgcaaagaaccagttatttctgctgtcgccccattatctgaggcaagtcaaggaaagttcaggctcccgactcatacagcagcggctcttacatcagcagcagccgttgcaccccgagtgggcagcactggccaagaaacagctgaaggggaaaaaccccgaagatctgatctggcacactcctgagggcatttctataaaaccactgtactcaaagcgggatactatggacctgcctgaagaactaccaggagtgaaaccattcactagagggccctatccgactatgtacacttttagaccatggactatacggcaatacgctggattctcaaccgtagaggaatctaataaattttataaggataacatcaaagcaggacaacagggactatccgttgctttcgatctggccacacatcgaggctacgattctgataatcctagagttcgaggggatgttgggatggcaggggttgccattgacacagtggaagataccaagatactgtttgacgggatccctttggagaagatgtctgtgtccatgactatgaacggagctgtcatacccgtgctcgcaaacttcatagtcactggcgaggagcagggggtgccgaaagaaaaactgaccggcacaattcagaatgacattctcaaggagttcatggtgcggaacacatacattttccctccagaacccagcatgaagattatagcggatattttcgagtatactgcgaaacatatgccgaagttcaacagtatctccatatccggctaccacatgcaagaagcaggagcagatgcgattctggaactggcatatactctggcggatggtttggaatatagcagaacggggttgcaggcaggtctcacgatcgacgagtttgccccacgtttgtctttcttttggggaattggaatgaatttttacatggagattgctaagatgcgcgctggtagacgattatgggctcacctgatcgagaagatgtttcagcctaagaacagtaagtcgctgcttctccgagcccattgtcagacttccggatggagcctcacagagcaggacccatacaacaacatcgtccgtaccgccatcgaagccatggctgccgtcttcggcggcacgcagagcttacatacaaacagctttgatgaggcactcggattaccaacagtgaaatccgcgagaatcgcgcgcaatacccaaatcattatccaggaggagtcaggcattcccaaggtagccgacccctgggggggtagctatatgatggagtgcctaactaatgatgtgtatgacgctgcgctcaaactcataaacgaaattgaagagatgggagggatggctaaggctgtcgcagaaggaattcccaaactccggattgaagagtgcgcagcccgacgtcaggcccgcatcgattccggctccgaggtcattgtgggagtgaacaaataccagttggagaaggaagacgccgtggaagtattggccatcgataatacgagcgtccggaatcgacaaatcgagaagctgaagaaaattaaaagcagtagggatcaagcattggccgaacgttgcttagctgccctcacagagtgcgcagcttctggggatggcaacatcctggctctggccgtcgacgcctctcgtgcacgatgcaccgtgggggagataaccgatgcactgaaaaaggtcttcggagaacataaagccaacgacagaatggtgtccggggcatatcgacaagagttcggagaaagcaaagagataacatcagccatcaaaagggttcataagtttatggaacgcgagggaagacgtcccaggttgctagtcgctaagatgggccaggatgggcacgaccgcggcgcaaaggttattgcgaccgggtttgcagatttaggctttgatgtcgacatcgggcccctgttccagactcccagggaagtcgcacagcaggcagtggacgccgacgtccacgctgtgggtatatctacccttgccgccggtcataaaacattggtgcctgagcttattaaggagttgaacagcttgggtcggcctgatatcctggtcatgtgtgggggggtcattcccccacaggattacgagtttctcttcgaggtgggagtatccaatgtgtttggacccggcacccggatccccaaggcagctgtgcaagtgctcgacgacatagagaagtgtctggagaaaaaacaacagagtgtg

SEQ ID NO: 5616 - DNA, 2250 bp, Artificial Sequence
  derived and/or modified sequence
atgctaagggctaaaaaccagctatttctgttgtctccccactatctgaggcaggtcaaagagtcaagtgggagccgcctgattcagcagcgcctgcttcaccaacagcagccactacacccagagtgggccgccctcgctaaaaaacagttaaagggaaaaaatcccgaagacctgatatggcacactccagaaggcatctccataaagcccctttactcgaaacgcgataccatggaccttccagaagagttgcctggtgttaaaccattcactaggggaccttacccaacaatgtacacattccgaccttggacaatccgtcagtacgccggctttagcactgtagaggagtctaataagttctacaaggacaacataaaagccggtcagcaaggcctgtctgtggctttcgatctggccactcatcgggggtacgattccgataatcctagagtccggggggacgtgggaatggctggggtagcaattgatacagtcgaggataccaagattttgttcgatggtatcccgctggagaagatgagcgtttcaatgactatgaacggtgcggtgattccggttctggccaattttattgtgactggagaggagcaaggagtccccaaagagaagctgaccggaactattcagaatgatatactcaaggagttcatggtccgaaacacatacattttcccccctgaaccttccatgaaaattatagcggacatcttcgaatacactgctaagcatatgcctaagttcaattcaatctctatctctggataccacatgcaggaggcgggcgcagatgccattcttgagctcgcatacacactggcggacgggcttgagtacagtaggacaggtctccaagcagggttgacaatcgacgaattcgctcccaggctatcattcttttggggcatcggaatgaacttctatatggagatcgcaaaaatgcgtgcaggccgtcggctctgggcccacctgattgaaaagatgtttcagcccaagaactctaaaagcctcctactgcgagctcattgccagacttccggctggtctctcactgaacaagatccatataataatatcgtgcggactgccattgaggcgatggctgctgtattcggagggacgcaatcgttgcataccaactcttttgatgaggctctgggactgcccactgttaaatcggctcggatcgcgagaaatacccagatcataattcaggaggagagcggtatccccaaagttgcggacccttggggtgggtcatacatgatggagtgtctgaccaacgacgtttacgatgctgctcttaagctgataaacgagatcgaagaaatgggtggcatggctaaggcagtggccgagggcattccgaagctccgcatcgaagaatgcgcagcccgccggcaggcacgcatcgattctggctccgaagtcatcgtcggtgtcaataaataccaactggaaaaagaagacgcagtggaggttctggctattgacaataccagtgttagaaacaggcagatcgagaaactcaaaaagatcaaaagttcccgtgatcaggcactggctgaaaggtgcctcgccgcgctaaccgaatgcgcggcctccggggatgggaatatcctggcattggctgttgacgcctccagggcacggtgcactgtgggcgaaatcactgatgctttgaagaaagtgttcggagaacacaaggctaatgacagaatggtgtctggcgcctatagacaggagtttggcgagagtaaagagattacatccgcaataaaaagagtccataagttcatggagcgtgagggccggagaccaaggctgttagtggctaaaatgggccaggatggccacgacaggggagctaaagttattgccaccgggttcgccgacctcggctttgacgttgatataggtcccttattccagacgccacgcgaggtagcgcagcaagccgtggacgcagacgtccacgctgttgggatctccacgctggccgccggacataaaaccctggttccagaactgattaaggaattaaacagtctcggaaggccagacattctggttatgtgcggcggtgtcatacctcctcaggactacgagttcctgttcgaggtcggagtttccaatgtgtttggaccagggacaaggatcccaaaggccgctgtgcaggtcctcgacgatatcgagaagtgtctggagaagaagcagcagtctgtc

SEQ ID NO: 5617 - DNA, 2250 bp, Artificial Sequence
  derived and/or modified sequence
atgctgcgcgcaaagaatcaacttttcctcctgagccctcattacctgcgccaggtcaaagagtcctccggttcacggctgatccagcagcggctccttcatcagcagcaacctctccaccctgagtgggccgccttggctaagaaacaactcaagggaaagaacccggaggacctcatatggcacacccccgagggcatctcgatcaagcccctctatagcaagcgcgacacgatggacttgcctgaagaactgcctggagtgaagccttttactagaggtccatacccgactatgtacacctttagaccgtggactatccgccagtacgccggattctcaaccgtggaagaatccaataagttctataaagataacattaaagcgggccagcaaggactgtcggtggccttcgatctggcgacgcaccgcggttacgattcagataacccaagggtgagaggagacgtggggatggctggtgtggcgatcgatactgtggaagataccaaaattctgttcgacggcatcccgctcgagaagatgtccgtgtcgatgactatgaacggagctgtgatcccagtcctggccaacttcattgtgactggcgaagagcaaggggtgccgaaggagaagctcacgggtacgatccaaaatgacatcctgaaggagtttatggttcgcaatacttacatctttccgccagagccatcgatgaagatcattgcagatatcttcgaatacactgcaaagcatatgccaaagttcaactccatttcgatttccggataccacatgcaagaagcaggtgcagatgctatcctggaactggcttacaccctcgcggatggactcgagtactcgcgcactggactgcaggcgggcctgactattgacgagtttgcgccacggctctcgttcttctgggggatcggaatgaacttctacatggagatagcgaagatgcgcgccggacggcggctgtgggcgcatctcattgagaagatgttccagcccaagaacagcaagtccctgctgctgcgcgcacattgtcaaacctcgggatggtcgctgactgaacaggatccatacaacaacatcgttcgaactgcgattgaggccatggccgccgtctttggaggtacccaatcactgcacaccaacagctttgacgaagccctgggactcccgactgtgaaaagcgccaggatcgcccgcaacacccagatcatcatccaggaggaatcgggcatccccaaggtcgccgacccatggggaggttcctacatgatggaatgcctgacgaacgacgtgtacgatgcggcgctgaaactgatcaatgagattgaagagatgggaggaatggcaaaggccgtggccgagggaatccccaagctgaggatcgaagaatgcgcggcgcggagacaggcacgcattgactctgggtctgaggtgatagtcggagtgaataagtatcaattggaaaaagaggacgctgtggaagttctcgcgatcgacaatacttccgtgaggaataggcagatcgaaaagctcaaaaagatcaaatccagccgggatcaggcgctggcggaacggtgcctggcagccctgactgagtgcgccgcctcgggagacggaaacattctggcactcgctgttgacgcttcccgcgctcggtgcactgtgggcgagatcactgatgcactgaagaaagtgtttggcgagcataaggcaaacgaccgcatggtgtccggagcgtacaggcaggagttcggagaatccaaggaaatcacttcggctatcaagagagtgcacaagttcatggagcgcgaaggaaggcgcccgcgcctcctggtcgcaaagatgggacaggacggtcacgatcgcggagccaaggtgatcgcgaccggcttcgccgacctgggattcgacgtggatatcggcccgttgttccaaacccctcgcgaggtggcccaacaggcggtcgacgccgatgtccacgctgtgggtatctcgactctcgcagcaggacacaagaccttggttccggaacttatcaaggagcttaactccctgggacggcccgacattctggtgatgtgcggaggagtcattcccccacaagactacgaatttctgttcgaagtgggagtctcgaatgtgttcgggcccggaacccgcatcccaaaggccgccgtgcaagtgctggacgacatcgaaaagtgtcttgagaagaagcaacaatcggtc

SEQ ID NO: 5618 - DNA, 2250 bp, Artificial Sequence
  derived and/or modified sequence
atgctgagagccaaaaatcagctcttcctgctttcgccacactacctgagacaggtcaaagagtcatccgggtcacgcctaattcagcagcggctcctccatcaacaacagccattgcatccagagtgggcagctctcgccaagaagcagctgaaggggaaaaatccagaggacctgatttggcatacgccggagggtatcagtattaaacccctgtactctaaacgtgatacgatggacctacctgaagaactgcctggagtcaagccgtttacccgcggtccttatccaacaatgtacacttttcgcccctggaccattcgacagtatgctggattctccacagtcgaagagtccaacaagttctacaaagataacattaaggctggccagcaggggcttagtgttgccttcgacctagcaacccatagaggatatgattccgacaatccaagagttagaggggacgtgggaatggccggagttgccatcgacaccgttgaagacacgaagattctattcgatggtatccccctagagaagatgagtgtgtccatgactatgaacggggcagtcatcccggtcttggcaaactttattgtgaccggtgaggaacaaggcgttcccaaggaaaagctgacagggactatccaaaacgacatcctgaaggagtttatggtccgtaatacatacattttcccgcctgagccttctatgaagattatcgctgatatctttgagtataccgctaaacacatgcctaagttcaactcgatatcaatctctgggtatcatatgcaggaagccggcgctgatgcaatcctggaacttgcttacacactggcggacgggctggagtactctcgaactggcctgcaagccggtttaactatcgatgagtttgctccacgcctctccttcttttggggaataggcatgaacttctacatggagattgcaaagatgcgagctggccgtcgactatgggctcatcttattgagaagatgtttcagccaaagaacagcaagtctctgttactccgagcccattgccagacaagcggctggagtctcactgaacaggatccgtataacaatattgttcggaccgccatcgaggcaatggccgcggtgttcgggggcacccagtctcttcatacaaactctttcgacgaagccctcggtcttccaaccgtgaagagtgcgcggatcgcccggaatactcagatcataattcaggaggagagtggtatccctaaagttgctgacccctgggggggttcgtacatgatggagtgtctgaccaatgatgtttacgacgctgccctgaagctcatcaatgagatagaggagatggggggaatggccaaagcggtcgcggagggaatacccaagctgaggattgaggaatgtgctgcccgtcgccaggctcgaatcgacagtggctccgaggtgattgtgggggtgaacaagtatcagctggagaaggaggacgctgtggaggtcctggccatcgataacacgagtgttcgtaatcgccagattgagaaactgaaaaagatcaaaagctcaagagaccaggccctggctgaacggtgcctggctgccctgaccgaatgcgctgcatctggagatgggaacatattggctttggctgtggacgcaagccgcgccagatgcacggtaggggaaattactgacgccctcaagaaagtgttcggcgagcacaaggctaatgataggatggtgtctggtgcttatcggcaggaattcggcgagtcgaaggagattacatcagcaattaaacgcgtccataagtttatggagagggaaggacgtagacccagactgctggtagcaaaaatgggtcaagacggtcatgaccgaggagccaaggttattgccaccggctttgccgaccttggctttgacgtggatataggcccattgttccaaactccgagagaagtggcacagcaggccgtggatgctgatgtgcatgccgtgggtattagcaccctcgctgccgggcacaaaaccttggttcccgagcttattaaggagctgaactcacttggacgaccggatatattggttatgtgcgggggcgtaatccctccacaggactatgagtttctctttgaggtcggagttagcaacgtgttcggccctggtactagaatccctaaagctgcagtccaagttttggatgacattgagaagtgcctggagaaaaaacagcaatcagta

SEQ ID NO: 5619 - DNA, 2250 bp, Artificial Sequence
  derived and/or modified sequence
atgctccgtgccaagaatcagctcttcctcctgtcaccgcattacttgagacaggtgaaggaatcgagcggatcacgcctgatccagcaaaggctcctgcatcagcaacagccgctgcatcctgagtgggcggctctggccaaaaagcaacttaagggcaagaaccccgaggacctgatctggcacactccagaaggaatctccatcaagccgctgtactccaagcgcgataccatggatctgcctgaagagctgccgggtgtgaagccgttcactagaggaccttaccctaccatgtacacttttcgcccttggaccatccgccagtacgcgggtttttccacggtggaggaaagcaacaaattctataaggacaacatcaaggcaggacagcagggcctcagcgtggctttcgacttggccacgcatagaggttacgattccgacaaccctcgggtgcggggggacgtgggcatggccggagtggccatcgacactgttgaggacaccaagatcctgttcgatggaatcccgctggagaagatgtcggtttcgatgactatgaatggggcagtgatcccggtgctcgcgaactttattgtgaccggcgaggagcagggcgtgccgaaagagaagctgaccgggaccatccagaacgatatcctgaaagagttcatggtccgcaacacctatatcttcccacctgagcctagcatgaaaatcatcgctgatatcttcgaatacaccgccaagcacatgcctaagtttaactcaatctcgatctcaggataccacatgcaggaggccggggccgacgcgatcctggaactggcctataccttggccgatggactggagtattctcggaccggcctgcaagcaggactcaccatcgacgaattcgccccgagactgtccttcttttgggggatcggaatgaacttctacatggaaatcgccaaaatgagagcaggacgcagactttgggcccatctgatcgagaagatgttccagccaaagaacagcaaatcccttctcctgcgcgcccattgccagacttcaggttggtcattgaccgaacaggatccatacaataacatcgtgcggaccgccatcgaggcgatggcagcggtgtttggtggaacgcagtcgctgcacaccaattcgtttgacgaagcgctcggactcccgactgtcaagtccgcccgcatagctcggaacactcagatcatcatccaggaagaatcgggaattccaaaagtcgctgatccgtggggcggaagctacatgatggaatgtctcaccaacgacgtgtatgacgcagcgctcaaactcatcaatgagatcgaagagatgggcggaatggccaaggcggtcgccgaggggatcccgaagctgcgcattgaagaatgcgccgcgagacgacaggcgcggatcgatagtggctccgaggtgatcgtgggagtgaacaaataccagctggaaaaggaggacgcagtcgaagtgctggcgatcgacaatacctcggttcggaatcggcagatcgaaaaacttaagaagatcaagagctcaagggaccaggcgctcgcggaaagatgccttgccgccttgaccgagtgcgcagcctcgggagatggtaacatccttgcgctggccgtggatgcatcccgcgcgagatgcaccgtgggggaaattacggacgcccttaagaaggtgttcggcgagcacaaggccaatgaccggatggtgtcaggagcctacaggcaagagttcggtgaatccaaagaaatcacctcggcgatcaaaagggtgcacaagttcatggaacgcgaggggcgccggccgcgcctgctcgtggctaagatgggacaggacggtcacgacagaggagccaaggtgatcgccaccgggttcgcggacctgggcttcgatgtggacatcggaccactgtttcaaacccctagggaggtggcccagcaagcagtcgacgccgatgtgcacgcggtcgggatttcgacgctggccgcgggacacaaaaccttggtgcctgagctgatcaaggagctgaactccctgggcaggccggatattctggtgatgtgcgggggcgtgatccctccgcaagactacgagtttttgttcgaagtcggagtgtcgaacgtgtttggacctggaacccggatccccaaagccgcggtgcaagtcctggacgatattgaaaaatgtctggaaaagaagcaacaatcggtg

SEQ ID NO: 5620 - DNA, 2250 bp, Artificial Sequence
  derived and/or modified sequence
atgcttagagccaaaaatcagctgttccttctgagccctcattatctgcgccaagtcaaggaaagcagcggatcccggctgatccaacagagacttctgcatcaacaacagcctctgcacccagaatgggcagcacttgcaaagaagcaactgaagggaaagaatccagaagatcttatctggcacacgccagagggaatatcgatcaaaccactctactcgaagagagatactatggatcttccagaagagcttcctggagtcaagccctttacccgcggaccttacccaaccatgtacacttttaggccgtggaccatccgccaatacgctggattctcgaccgtggaggaaagcaacaagttttacaaggataacataaaggcgggacagcaagggctttccgtggcctttgatctcgcaacccatcgcggctacgattcggacaatccccgggtcaggggtgatgtgggtatggctggcgtcgcaattgatactgtggaagataccaaaatcctcttcgacggaatcccacttgagaagatgtcagtctccatgactatgaacggtgccgtcattcccgtgctggcaaactttatcgtgaccggtgaagaacaaggagtgcctaaggaaaagctgactgggactattcagaacgatattctcaaggagtttatggtgagaaatacctacatttttccccctgaaccttcgatgaaaatcatcgcagatatcttcgagtacactgccaagcatatgcccaagtttaactctattagcatctcgggttatcacatgcaggaggcaggagccgatgcaattctggagctcgcctacacgctggctgacgggcttgagtactctcgtaccggtctgcaagcaggtcttactatcgacgaatttgcgccaagactttcgttcttttggggtatcggcatgaacttttacatggaaattgccaaaatgcgcgcagggagacgcctctgggcgcaccttattgaaaagatgttccaacctaagaattccaagagccttcttctgcgtgcacattgtcaaacctctggatggtcactgactgaacaagatccttacaacaatattgtcagaacggcgattgaagcgatggcagcagttttcggtggaacccagagcctccatactaactcctttgacgaagctctgggcctgcctactgtgaaaagcgccagaattgcacgcaacactcagattatcattcaagaggaatcgggcatacctaaggttgccgacccttggggaggatcgtacatgatggagtgccttacgaacgacgtgtacgatgcagccctgaaactgatcaacgaaatcgaagaaatgggcggcatggcaaaagcagtggccgagggtattccaaagctcaggatagaagaatgtgcagctcggcggcaggcccggattgacagcggatccgaagtcatcgtgggcgtgaataagtaccagctggaaaaagaggacgccgtggaagtgctcgcaattgacaacacttcggtcagaaacagacagatcgagaaactgaagaagattaagtcgtcacgggaccaagcgctcgcagaaaggtgcctggctgccctcacggagtgtgcggcatctggcgatgggaacattcttgcactggctgtggatgctagccgcgcgcgttgtactgttggagaaataaccgacgcactcaaaaaagtgtttggagaacacaaggcaaatgacagaatggtcagcggagcttaccgccaggaattcggagagtcaaaggagattacttcggcaattaagagagtccataagtttatggagagagaaggtcgcagaccacggctccttgtggcgaagatggggcaagatggtcacgatagaggggcaaaggtgatcgccactggcttcgcagatctgggcttcgacgttgatataggccctctcttccagacccctcgggaagtggcgcaacaggcagtggatgcagatgtgcatgcagtcggtatttcgacccttgcggctgggcataagaccctcgtgccagaattgataaaggaacttaactcactgggtagaccggatattctggtgatgtgcggtggagtgattccacctcaagactacgaatttctgtttgaagttggagtgtcaaatgtttttggcccaggcaccaggataccaaaggcggccgtccaggtgctcgacgatattgagaaatgtctggagaagaaacaacaatcggtg

SEQ ID NO: 5621 - DNA, 2250 bp, Artificial Sequence
  derived and/or modified sequence
atgctgagggctaagaatcagctgtttttgctgtctccacattacttacgccaggttaaagaaagctcagggtctcggctgatacagcagcgtctcctccatcaacagcaaccattgcacccagagtgggcggccctcgcaaagaagcagcttaaaggaaaaaaccctgaagatttaatttggcacacaccggaggggatttctatcaagccattgtacagcaagagggataccatggatctaccagaggagttgccgggcgtgaaaccctttacacgagggccataccccactatgtacacttttcgtccatggacaatccgccaatacgccgggtttagtactgtggaagagtcaaataaattttacaaagacaacataaaggctggacagcagggcctcagtgtggcctttgacctcgccacccatagaggttacgatagcgacaatcctagagtaagaggagatgtgggcatggccggtgtggcaattgatacggttgaagacactaagatcctgtttgacgggatcccgttggaaaaaatgtcagtttccatgactatgaatggggctgtcattccggtactcgcgaacttcattgtgaccggggaagagcagggcgttccaaaggagaagctgaccggcactatacagaacgacattttgaaggagttcatggtgaggaacacctatatcttcccaccggaaccttcaatgaaaataattgccgacatttttgagtataccgcgaagcacatgccgaaatttaacagcattagcatcagcggatatcacatgcaggaagctggggccgatgccatcctggaactggcttacacactagcggacggcctggagtactcaagaacaggtctgcaggccgggctgacaattgacgagttcgcgcctcggctgtctttcttttgggggattggcatgaacttctacatggagatagctaaaatgcgggccggaagaaggctctgggctcacctgatcgaaaagatgtttcagcctaaaaactcaaagagcctcctgttgcgtgcacattgtcaaacaagcggttggagtttgaccgagcaggacccctataataatatcgtgaggaccgcaatcgaagccatggccgctgtgttcggtggaacccagtccctgcacacaaattcttttgatgaggcactgggacttcctactgttaagtccgctagaatagccagaaacacccagatcatcatacaagaggagtccggtattcccaaggtggccgacccatggggcggcagctacatgatggaatgtctgacgaacgatgtctacgatgcagctcttaagttgataaacgagatcgaggagatgggggggatggccaaggcagttgcggaaggcataccgaaactgcgaatcgaggaatgtgctgctcggagacaggctcggatcgactccggaagcgaagttatcgtaggggtgaataagtaccagttggagaaagaggacgcggtggaagtgctggcgattgataacacttccgtgcgaaatcgccaaattgagaagttgaagaaaattaagagctcaagagatcaggccctcgccgaacgatgtctcgctgccctgaccgagtgtgctgcttcaggcgatggcaacatcctggctcttgcagtggacgccagcagggctcgttgtacagtcggtgaaataacggacgctctgaaaaaagtatttggcgagcacaaagcgaacgatcgaatggtcagcggagcttacagacaggagttcggggagagtaaggagatcacttcagccattaagcgagtgcacaagtttatggaacgggagggacgcaggccccgactgctggtggcaaagatgggtcaggacgggcacgaccgaggcgccaaggtgattgcgaccgggtttgcagatctggggttcgatgtcgatattggcccactgtttcagacgccgagggaggtggcccagcaggctgtggacgcagacgtgcatgccgtaggtatctcaacactcgcagccgggcacaaaacgctcgtgcccgagctcattaaagaactgaattcattgggccgaccagatatcctggtgatgtgtggtggcgtaatcccccctcaggactacgaattcttgtttgaggtcggcgtatcaaatgtattcggccccgggaccaggatccccaaggctgctgtccaggttctcgatgacatcgagaagtgtctcgaaaagaagcagcaaagcgtg

SEQ ID NO: 5622 - DNA, 2250 bp, Artificial Sequence
  derived and/or modified sequence
atgctcagagccaagaatcagttgtttctcttgagtccgcattatcttcgccaggtcaaggaatcaagcggctccaggttaattcagcagaggctcctgcatcagcaacagcctttgcacccagagtgggctgccttagccaagaagcaactgaaggggaaaaacccagaggacctgatatggcacacacccgagggaatatccattaaaccactatattccaagagggacactatggatctacctgaagagctgccaggcgtgaaaccattcacccgtgggccgtaccccaccatgtacaccttcagaccatggacgattcggcagtatgccggattttctacagttgaggagagtaataagttctataaggacaatattaaggcaggccagcaggggctctccgtggcatttgatctggctacacacagaggctatgattccgataacccaagagtgagaggggatgtcggaatggccggggtggctatcgacacagtggaagatacaaaaatcctgttcgacggaatccctctggaaaagatgtccgtgtccatgaccatgaatggcgcagtgatacccgtactggcgaacttcattgtaacgggggaggagcaaggcgtgcccaaagaaaagcttacaggaaccattcagaatgacattctgaaagaattcatggtgcgtaacacatatatatttccccccgagccatccatgaagatcatcgccgatatttttgaatataccgccaagcacatgcccaagttcaacagtatttctatctccggatatcacatgcaggaggccggggctgatgcaatcctggaactggcgtacacccttgctgatggcctcgaatactctaggacagggctccaagctgggctgactatagacgaattcgcccctcgcctatccttcttctggggaatagggatgaacttttatatggaaatcgctaaaatgagggcaggaagaagattgtgggcccatcttatcgagaaaatgtttcagccaaagaactctaaatcccttctgctcagagcccactgtcagacctcgggctggagtttgaccgagcaggacccatataacaatatagttcggacggcaatcgaggctatggctgcagtctttggagggacccaatcgctgcacacgaactcgtttgatgaggctttaggcctgcctacagttaagtctgcacgaatagcgaggaatactcagatcattattcaagaagagtccggcatacccaaggtggccgacccctggggcggttcctatatgatggagtgcttgacaaacgacgtttacgatgctgccctgaagctgatcaacgagattgaagaaatgggcggtatggccaaggcggtggcagaagggatcccaaaactaagaatcgaagagtgcgcagcacgcagacaggcacgaatcgacagtggaagcgaggtgattgtcggggtcaacaaataccagctggaaaaagaggacgctgttgaggtgttggccattgataacaccagcgtgaggaataggcaaatcgaaaagttgaaaaaaatcaagtcttcccgagaccaagcccttgccgaaagatgcctggccgcgctcactgaatgtgctgcctcgggggacggtaacatacttgcgctggccgttgacgccagcagagcccgctgcacagtcggagagatcactgatgccctgaagaaggtattcggagaacacaaagcaaacgatcggatggtctctggagcctatcgtcaggaattcggagagagcaaagagattacatccgccatcaagagagtccataagttcatggaaagagaaggtcggagaccccgcttgctggtagcaaagatgggccaagatgggcacgatagaggcgccaaggtcatcgccacaggctttgctgacctggggtttgacgttgacataggcccattattccagacccccagagaggttgctcagcaggcggtggatgccgacgttcacgccgtgggtataagtaccctggcagccgggcacaaaacgctggtaccggaactaatcaaggaacttaattccttgggtcggcccgatattttggtgatgtgcggtggtgtgatcccaccccaggattacgaatttctttttgaggttggggtcagcaatgtcttcggccctggcactaggatccctaaagcggctgtacaggtgctcgacgacattgaaaagtgcttggagaagaagcaacagtctgtc

SEQ ID NO: 5623 - DNA, 2250 bp, Artificial Sequence
  derived and/or modified sequence
atgctgcgcgctaagaaccagctcttcctgctctcgccacactacctgcgtcaggtcaaagagtcatccgggtccagactgatccagcaacgactgctgcatcagcagcaaccactgcacccagagtgggccgctctggcgaaaaagcagttgaagggcaagaatcccgaagatctgatctggcacaccccggagggcatctctatcaagcctctctactcgaaacgcgatactatggacttgccggaagagttgcctggcgtgaagccgttcacccgcggcccgtacccgactatgtatacctttcggccatggacgatccggcaatacgccggctttagcactgtcgaggaatccaacaagttctacaaagacaacatcaaagccggacagcaaggcctttcggtggcgtttgacctggcaactcatcggggctacgacagcgacaacccaagagtgcgcggagatgtaggtatggcaggggtggcgattgacaccgtggaagataccaagatcctcttcgacggtattccgcttgagaaaatgtcggtgagcatgactatgaatggggccgtgatacccgtgctcgcaaatttcatcgtgaccggcgaagagcagggggtgccgaaggagaaattgactggaaccatccaaaacgatatcctgaaagaattcatggtgcggaacacgtacatctttccgcctgagccttcgatgaagattattgcggatatctttgaatacactgcaaaacatatgcccaagttcaactcgatcagcatctccggctatcacatgcaggaggcgggggctgatgcaatcctggagctggcgtacaccctcgccgacggattggaatactctaggaccggactccaagcaggactgaccatcgacgagttcgcgccacggctttcgttcttctggggcatcggtatgaacttctacatggaaatcgcgaagatgcgcgcgggccgccggctgtgggctcaccttatcgagaaaatgttccaacctaagaattccaagtcactgctgttgcgggcacattgccaaacctcaggatggtcccttaccgaacaagacccatacaacaatattgtcagaaccgccatagaagccatggcagctgtgttcggaggcacccagtcactgcatactaatagctttgatgaagcacttggacttccgaccgtgaaatctgccaggatcgcccgtaacacccagattatcatccaagaggaatcagggatcccaaaggtggccgacccatggggaggctcatatatgatggagtgcctcactaacgacgtctacgatgccgccctgaagctcattaacgaaatcgaggagatgggagggatggccaaggcggtcgcggaggggattccaaagctccggatcgaagagtgcgctgcccggcgccaggccagaattgattcggggagcgaagttatcgtcggagtgaataagtaccagctcgaaaaggaggatgcggtggaagtgttggccatcgataatacctcagtgcggaacagacagatcgagaagctgaaaaagatcaagtcctcgcgtgaccaggccttggccgaacggtgcctggctgccttgaccgagtgcgccgcctccggagacggtaatatcttggccctggccgtcgacgcctcccgggcacgctgtactgtcggagaaatcactgacgccctgaagaaggttttcggagagcataaggcaaacgaccggatggtgtccggcgcctaccgccaggaattcggagaaagcaaggagatcacttcagctatcaagcgggtgcacaaattcatggaaagagaagggcgccgcccgagactgcttgtggccaaaatgggccaggacggccacgacagaggggccaaggtgatagcgaccggattcgccgatctcggattcgatgtggatatcggacccctctttcagactccaagggaggtggcacaacaagccgttgacgcggacgtgcacgctgtcgggatcagcacgctcgcggccggtcataagactctcgtcccggaattgatcaaggaactcaactcactgggacgcccggacattcttgtgatgtgcggaggagttattcccccacaggattacgagttcctgttcgaagtcggagtgtcgaacgtgtttggaccagggacgcgcatcccgaaggccgcagtgcaggtactcgacgatattgagaaatgtctggagaaaaagcaacagtcggtc

SEQ ID NO: 5624 - DNA, 2250 bp, Artificial Sequence
  derived and/or modified sequence
atgcttcgcgccaagaatcagctgtttttgctttcgcctcactacctcagacaagtgaaagaatcttccggatcccgattgattcaacagaggcttcttcatcagcagcaacctctgcaccctgagtgggcggcacttgcgaagaaacagctcaagggcaagaatccagaagatcttatctggcatactccagaaggcatttccattaagccgctttactccaagagggatactatggatcttcctgaagaattgcccggagtgaagccattcacgcggggcccttaccctaccatgtacactttccggccatggactatcaggcagtatgccggtttctcgaccgtcgaggaatccaacaagttttacaaagacaacattaaagcaggacagcaaggcttgagcgtggcgttcgacctcgccactcatcgcggttacgactcagacaacccacgggtgcgtggtgatgttgggatggcaggagtggcgatagatactgtagaggataccaaaattctgtttgatggcatccctttggagaaaatgtctgtgtcgatgaccatgaacggtgcagtcattcctgtgcttgcaaactttatagtgacgggcgaagagcagggagtgcctaaggaaaagctgaccggtaccattcagaacgacattctcaaggagtttatggttcggaatacctacattttcccaccagaaccttcgatgaagattattgcagacatctttgaatacactgcgaagcatatgcctaaattcaattccatttcaattagcggctatcatatgcaggaggccggtgccgatgcaatcctggagctggcatatactctggccgacggtcttgaatactcccgaaccggactccaagcaggattgaccatagacgagttcgcacctagactttcgtttttctggggaatagggatgaacttctacatggagatcgccaagatgagagcaggtcggagactctgggcacatcttatcgagaagatgttccagcctaagaattcgaaatcgcttctgcttcgcgcgcactgtcagaccagcgggtggagcctgaccgaacaggatccttacaacaacattgtgagaactgcaattgaggcaatggcagctgtgtttggcggaactcagtcgcttcataccaattcctttgatgaagcactcggacttcctactgtgaagtccgccaggatcgcaagaaacacccagataatcatccaagaagaatcgggaatcccgaaggtggcggacccatggggcggttcatacatgatggaatgtctcactaacgacgtgtacgacgcagcgctgaagttgatcaacgaaattgaagaaatggggggaatggcgaaggcagtggcggaaggaattccaaaactgcggatagaagaatgtgcagcacggcgtcaagcacggattgactcgggttcggaggtgatcgtcggagtgaataagtaccagctcgagaaggaagatgcagtggaggtgctcgctatcgataacacctccgtcagaaacagacagatagaaaaactcaaaaagatcaagtcaagccgtgatcaggccctggcagagcggtgcctggccgccctcaccgaatgtgcagccagcggagatggtaacattctggcacttgcggtggatgccagcagggcacgctgtaccgtcggagaaattactgacgcactgaagaaggtctttggtgaacataaagcgaatgatcggatggtgtcgggggcgtatcgccaggaattcggcgaaagcaaggaaataacctcggcgattaaacgtgtgcacaagttcatggaacgcgaaggacgccgcccgaggctgctggtcgcaaagatgggtcaggatggtcacgataggggggccaaggtcatcgcaaccggattcgcggatctgggatttgatgtggacatcggtcctctgtttcagacgccacgggaggtggcacaacaggcagtggacgccgatgtgcacgcagtcggcatttcgactcttgcagcaggtcacaagaccctcgttccagaactcattaaagagctcaacagcctgggtagacccgacatcctggtcatgtgtggaggtgttataccaccccaagattacgaatttctgtttgaagtgggggtgtcgaatgtgttcggtccaggaactcgtatcccaaaagcagccgtgcaagtcttggatgacatcgaaaaatgcctggaaaagaagcaacagtcggtg

SEQ ID NO: 5625 - DNA, 2250 bp, Artificial Sequence
  derived and/or modified sequence
atgctgcgggccaagaatcaactatttctgttaagtcctcactacctgcgtcaggtgaaggaaagctccggtagcaggctgattcaacagcgcctgcttcaccagcaacaacctctgcatccggagtgggccgcactggcaaaaaagcagctaaaaggcaagaacccggaggatctgatctggcataccccggaggggatcagtatcaagcccctgtatagtaagcgcgataccatggacctgccggaggagctgcctggagttaaaccatttacccgagggccgtacccgaccatgtatacgttcagaccttggacgattcgtcagtatgctggcttctcaaccgtcgaggagagcaacaaattctataaggacaacatcaaggcgggtcaacaagggctgagcgtggctttcgatctggccactcaccgtggctacgacagcgacaaccctcgcgtgaggggtgatgttggcatggcgggggtggctatcgatacggtggaagatactaaaattctgttcgatggcattccgttggaaaagatgagcgtaagcatgaccatgaatggtgcggttatccctgttctggctaacttcatcgtcacgggtgaagagcagggcgtgccgaaggagaaattgaccggtacgattcagaacgatatactgaaggaatttatggttcgtaacacctacattttcccgccagagccatcgatgaagatcattgccgacatttttgagtatacggcaaagcacatgccaaaatttaactctattagcatcagcggttatcatatgcaggaggcgggcgcggatgcaatccttgaattggcatacactctggcggacggtttggaatatagcaggaccggcctgcaggcgggcctgactatcgacgagttcgctccacgactgtcgttcttctggggtattggaatgaatttttatatggagatcgctaaaatgcgcgcgggccgacgcctatgggcccacctcatcgaaaagatgttccaaccgaagaacagcaagagcctgttactgagggcacactgccagaccagcggttggagcctgactgaacaagacccttacaacaatattgtccgtacggcaatagaagcaatggcggccgttttcggcggcacccaaagcttgcatacgaattcctttgatgaagccctgggtctgccgactgtgaaaagcgcccgcattgcccgtaacacccaaattattatccaagaggagtcaggtattccaaaggttgccgatccgtggggtgggtcgtatatgatggagtgtttgaccaacgacgtgtatgacgcagctctgaaactgatcaatgagattgaagagatgggcgggatggccaaggctgtggctgaaggtatcccgaaactgcgcatcgaggaatgcgcggcgaggaggcaagcaagaattgacagcggctccgaggtgatcgtgggtgtcaacaaataccagcttgaaaaggaggatgcggtagaggtgttggcaatcgacaacaccagcgtgcgcaatcgacagatcgaaaagttgaagaaaattaagtccagccgcgatcaggcactggcagaacgctgcttagcagcactaaccgagtgtgctgcgtccggtgatggcaacattttggccttggccgtagacgcaagcagggcgcgctgtacggttggtgagattacggatgccctgaaaaaagtgttcggcgagcataaagcgaatgaccgcatggttagcggcgcgtatcgacaggaatttggggaatccaaagaaattacctccgccattaagcgggtgcataaatttatggaacgcgagggccggcgccctcgcctgttggttgccaagatgggccaggatggccacgatcgaggtgcaaaagttattgccaccggttttgccgacctgggatttgacgtggatattggaccactgtttcaaacgcctagagaagttgcgcaacaggcagttgatgccgacgtgcatgctgtgggcatctctaccctggcagccggtcataagaccctcgtgccggagttgataaaggaactcaatagcttgggacgccccgatatcctggttatgtgtggaggcgtgatcccacctcaggactatgagtttttgttcgaggttggcgtgagcaacgtgttcggtccaggtaccaggattccaaaggctgccgtgcaggttctggacgacatcgaaaagtgcctggagaagaagcaacaaagcgtg

SEQ ID NO: 5626 - DNA, 2250 bp, Artificial Sequence
  derived and/or modified sequence
atgctgagggccaagaatcaactattcctgctgtcaccacactacctgcgtcaggtgaaagaaagctccggttcccgtttaatacagcagaggctcttgcatcagcagcagcctctgcaccccgagtgggccgccttggcaaagaagcagctcaaaggcaaaaaccctgaggacctgatctggcatactcctgaaggcatcagtataaaacccctttacagtaagcgagataccatggatctacccgaggagctgcctggagtgaagccgtttaccagaggtccctacccaacaatgtacacattccgcccctggaccatcagacaatacgctggcttttctaccgtggaagagagcaacaaattctacaaagataatattaaggccgggcaacaggggctgtccgttgccttcgatctggcaactcacaggggatacgacagcgacaatcctcgcgtgaggggggatgttggaatggcaggggtggcgattgacaccgtggaggacaccaagattctttttgacggcatccccctggagaagatgagtgtgagcatgaccatgaacggcgccgttattccagtgctcgccaactttatcgtcaccggagaggaacagggcgtgccaaaagagaaactgactggcacaatacagaatgatatattaaaagaattcatggtcaggaatacctatatattccctccagaaccctctatgaagattatagcagacatttttgagtacacagctaagcacatgcccaaattcaattctattagtatctccgggtatcatatgcaggaagcgggcgccgatgccatcttggagctggcgtacacactggcagacggcctggagtattcacgcaccggcctgcaagcaggactgacgatagacgaattcgctcctcggctgtccttcttttggggtattggaatgaacttctacatggagatcgctaagatgcgcgcgggccgccgcctgtgggcccacttaattgaaaaaatgtttcagcctaaaaattccaagagcctgctgctgagggcccattgtcagaccagcggttggtcgctgaccgagcaggatccttataacaatattgtgcggaccgctatcgaagctatggcggctgtctttggtggcacccagtccttacacacgaacagttttgatgaggcattaggcctgccaactgtgaaaagcgctcggattgctcggaacacccagatcatcattcaggaggaatctggaatccccaaggttgccgacccctggggagggtcctacatgatggagtgtcttacaaacgacgtctatgacgccgccctgaaattgatcaatgagatcgaggaaatgggcgggatggctaaggccgtggccgagggcatccctaaattgagaatcgaagagtgcgccgccagacgacaagcaagaatagattctggctctgaggtgatcgtcggagttaataaatatcagctggaaaaagaggacgccgtggaagttctcgcaattgataatacttcagtgcggaacaggcagattgaaaaactgaagaagattaagagctctagggaccaggccttggccgaacggtgtctggctgccttaacggagtgcgcagcatctggggatggaaacatcctggcactggcagttgatgccagcagagcccgttgcaccgtgggagagattaccgacgctttgaagaaggtcttcggagagcacaaggctaacgataggatggttagcggagcgtacaggcaggaatttggggagagtaaagagatcacctcagccatcaagagggttcataagtttatggaacgcgagggacgacgacccaggctgcttgtggccaagatggggcaggacggccacgataggggagccaaagttatcgcgaccggattcgctgacctaggtttcgatgtcgatattgggcccctgttccaaacacctcgggaggtagctcagcaggccgtggacgccgacgtccatgctgtggggatttccacgctagccgccggccataagacgctggtgccagaactgatcaaggaacttaacagcctgggtcggcctgatatcctcgtgatgtgcggaggagtcattccccctcaggactacgaattcctcttcgaggtgggtgtgagtaacgtgtttggccccggaacccgcataccaaaagctgcagtacaagtgttagatgatattgagaagtgtttagaaaagaagcagcagagtgtg

SEQ ID NO: 5627 - DNA, 2250 bp, Artificial Sequence
  derived and/or modified sequence
atgctgagggctaaaaaccagctgtttttactaagcccccattatttgagacaggtgaaagaaagtagtgggagccgactgatccagcagcgactcctccatcagcagcaacccctgcacccggagtgggccgcactcgctaaaaaacagctaaaaggaaagaatcccgaggacctgatctggcacacgccagaaggcataagcataaagcccctgtacagtaagcgggacacaatggacctgccagaggaactgccgggggtcaagccattcacacgcggtccataccctaccatgtataccttcagaccctggaccatccgccagtacgccgggttcagcactgtggaagagtcaaacaagttttacaaagacaacatcaaggccgggcaacagggcctgtccgttgccttcgacctggcaacacatcgcggatatgattccgacaatcctagagtgcggggcgatgtgggaatggctggcgtagcgattgatacagtggaagataccaagatcctcttcgacggaatcccgctggagaagatgtccgtgtctatgaccatgaacggggctgtgatccctgttttggctaatttcatagtgaccggggaggagcaaggagtacctaaggaaaaattaacaggtaccatacaaaacgacatccttaaggagttcatggtgcgaaatacatacattttcccgcctgagccaagtatgaaaatcatagcggacatttttgagtacaccgcgaagcacatgccaaagttcaactctatctctattagcggctatcatatgcaagaagcaggcgcagatgcgatccttgaactagcatataccttggctgacggcctggaatatagtcgaacaggactgcaggctgggctgacaattgacgagtttgcccccaggctttcattcttctggggcatcgggatgaacttctacatggagattgccaaaatgcgggcaggccgtaggctctgggctcacctcatagaaaaaatgtttcaacctaaaaactcaaagtcgctccttctccgggcacattgtcaaacatccggctggagcttaacagaacaggacccttacaataatattgttcgcacagctattgaagccatggcggccgtcttcggaggaacacaatcactccacactaactccttcgacgaggcactcggcctgcctactgtaaagtctgctcggatcgcacgtaacacacagatcattatccaggaagagtcagggattcccaaggtcgccgatccctgggggggctcttacatgatggagtgcctgacaaatgatgtgtatgatgcggccttgaaattgatcaatgagatcgaggaaatgggaggaatggctaaggctgtggccgagggtatccctaagttaagaatagaggaatgcgccgcgcgccgacaggccaggattgacagtggctcagaggtgatagtcggggtgaataagtaccaattggagaaagaagacgccgtagaagtgctggctatcgacaatacatcagttagaaacaggcagattgagaaactaaaaaagattaagagcagcagagaccaggccctcgcagaacggtgcttggctgcactaaccgaatgtgcggcctcaggggacggaaacattttggcccttgctgttgatgcgtcgcgagctagatgtaccgttggtgaaatcaccgatgctctgaagaaagtttttggtgagcacaaagccaacgatcggatggtttccggggcttatcgccaggaattcggagagagcaaagagattacgtcagccatcaaaagagtgcacaagttcatggagagggagggtagaaggccacgactgctggtcgcaaagatgggacaggatggacacgaccgcggagcaaaggtgatagcaacaggctttgcagaccttggtttcgatgtggatattggaccacttttccaaaccccacgggaggttgcccagcaggccgtggatgccgatgtgcatgcggtcggaatatctacattggcagccggccataagacactggtgccagagctgatcaaagaattgaactctcttgggcgcccagacatactggtgatgtgcgggggtgtcatacccccgcaggattacgagttccttttcgaggtgggagtgtcgaacgtgttcgggcctggcacccgtatacccaaagctgcggtgcaagtattggacgacatcgaaaagtgtctggagaaaaaacaacagagtgtt

SEQ ID NO: 5628 - DNA, 2250 bp, Artificial Sequence
  derived and/or modified sequence
atgcttcgggcaaagaaccagctgttcctcctgtccccccactacttgcgccaggtgaaggaatcgtccgggtcaaggcttattcaacaacggcttcttcatcagcaacagcctctgcacccagaatgggccgcactggcaaagaaacagcttaaggggaaaaaccctgaagatcttatctggcatactccagaaggcatctcaatcaagccactttactcaaagcgcgacaccatggatcttcctgaggaacttccgggtgttaaaccgtttaccaggggtccttaccccaccatgtacacttttagaccatggaccattcgccaatatgcaggtttctcaaccgtcgaagagtccaacaagttctataaagataacattaaggctggacaacaaggactttcggtggcctttgacctcgcaactcataggggttacgacagcgacaatccccgtgtacggggagacgtcggcatggcaggcgtggccattgacactgtcgaggacaccaaaatcctttttgacggcattccactcgagaagatgtcggtgtccatgaccatgaatggtgcggtgattcctgtgcttgcaaactttatcgtgactggcgaggaacagggtgtgcctaaagagaaactgaccggcaccatccagaacgacatactcaaggagtttatggtgagaaacacctacattttcccccctgaaccctcaatgaagataattgcagacatcttcgagtataccgctaagcatatgcccaagttcaattcgatttcgatctccggataccatatgcaggaagctggagctgacgctatcctggagctggcgtacactcttgcggatgggcttgaatactcgcgtactggccttcaggcgggcctcacgattgacgaatttgcacctcggctgtcgttcttttggggaattggaatgaacttttacatggagattgccaagatgcgtgcagggcgacgactttgggcacacctgattgaaaagatgtttcagccgaaaaacagcaagagccttctgctccgtgcacactgtcaaactagcggatggtcacttactgagcaagatccatacaacaatatcgtccggaccgcaattgaagccatggctgcagtgtttggcggcactcagagcctccacaccaattcctttgatgaagcactgggtctgcccaccgtgaaatcggcaagaatcgcccgaaacacgcagattatcatacaagaagaatcagggattcctaaggtggcagatccttggggtggatcgtacatgatggaatgcctcaccaacgatgtgtacgatgcagcgcttaagctgattaatgaaattgaagaaatgggtggaatggcaaaggcagtcgcagagggcatccccaagctccgcattgaagaatgtgccgcaaggagacaagcacgaatagatagcggatcagaggtcatagtcggggtcaacaaataccagctggaaaaagaagatgccgtcgaagtgctggcaatcgacaacacgtctgtgcggaacagacaaatagaaaagctgaagaagatcaagagttccagagatcaagcactggcagaaagatgtctggccgcactgactgaatgcgcggcatccggagacggcaacatccttgcacttgccgtggacgcatccagagctcgctgtactgtcggagaaattaccgacgctctcaaaaaggtgtttggtgagcataaggcaaacgaccgcatggtcagtggagcatacagacaagagttcggggaatcgaaggaaatcaccagcgcgatcaaacgcgttcataagttcatggagagagaagggcgacgtcctagacttctggtggccaagatggggcaagatgggcatgaccggggagcaaaggtcatagcaactggctttgcagacttgggcttcgatgtggatataggccctctttttcaaaccccgcgggaggtcgcacaacaggcagtggatgccgacgtccacgcagtcgggatctcaactcttgcagctggtcataaaactctcgtgccagagcttatcaaagaacttaactctctgggcagaccggatattctcgtcatgtgtggcggagtgattccacctcaggattacgaattcctgtttgaagtgggggtttcaaacgtgttcggtcctggcacccgtattcctaaggcagcagtgcaggtgctggacgacattgaaaagtgccttgaaaagaagcagcaatccgtg

SEQ ID NO: 5629 - DNA, 2250 bp, Artificial Sequence
  derived and/or modified sequence
atgctccgggcaaagaatcagctgtttctcctgagtccgcattatctgcgccaagtgaaagagtcgtctggaagcagactgattcaacagcgcctgctccaccagcaacagccactccatcccgagtgggctgccctcgctaaaaagcagctcaagggaaagaacccagaggatcttatctggcacacgccagagggaatttcaatcaaacctctatatagtaagcgcgacacaatggacttacctgaggaactgcccggagtgaagccatttacaagaggtccatatccgacaatgtacaccttccgcccttggacgattcgtcagtacgcgggattcagcaccgttgaagagagcaataagttttacaaggacaatataaaagctggccagcagggcctgagcgtggccttcgacctcgctacacatcgtggctacgatagcgacaatccacgagtacgtggcgacgtgggcatggccggagtggccattgacaccgtcgaggacacaaaaatcctcttcgatggcattcccctggagaaaatgtccgtgagcatgacgatgaacggggcagtcattcctgtcttggccaactttatcgtgacaggagaggagcaaggcgttcccaaggaaaaactgacgggtacaattcagaatgatatcctcaaggaattcatggtccgaaatacttatatttttccgccggagccttctatgaaaatcatcgcggacatttttgagtacaccgcaaagcatatgccgaaatttaacagcataagcatatccggatatcacatgcaagaggccggcgctgacgcaattctggagctcgcatataccctggcggatgggcttgagtactcccgaaccggactccaagcaggtctgaccatagatgagtttgccccccgtctgtcattcttctgggggatcggcatgaacttctacatggaaatagcaaagatgagagccggacgcaggctctgggcccaccttattgaaaagatgttccagccaaagaactccaaatcccttctgctccgcgctcactgccagacctccgggtggtccctgacagagcaggatccctataataacatcgtccgcaccgccatcgaggctatggctgctgttttcggaggcacccagagtctccacaccaactctttcgacgaggctctcggtctgcctaccgtgaagtcagcgcgcattgcccggaatacacagattatcatacaagaggaatccggcatacccaaggttgccgacccctgggggggaagttatatgatggaatgtctgacaaatgacgtgtatgacgcagcattgaagctgattaacgagatagaggagatggggggcatggccaaggccgtggccgaaggcatccccaaactccgaatcgaagagtgtgcagctagacgacaagcaagaattgattcaggaagcgaagtgatcgtaggagtaaataagtaccaactggagaaggaggacgctgttgaagtcttggccattgataacactagtgttcgaaatcgacaaatcgagaaactgaaaaagattaagagctcaagggatcaggccctggccgagcgctgtctcgctgccttaacggaatgtgctgctagtggcgatggcaatatcctggcactggccgtcgacgcatccagagcgaggtgcacagtcggagaaattactgatgccctgaagaaggtgtttggcgagcacaaagctaacgatcgtatggtttcaggggcctaccggcaggaatttggagaaagcaaggagattacctcagcaataaagcgtgtgcataagtttatggaacgagaggggagacggcctagattattggtggctaaaatgggtcaggacggccacgaccgaggagccaaggtcatcgcaacagggttcgccgatctagggttcgacgtcgatatcggaccgctgttccaaacaccccgcgaagttgcacagcaggctgtggatgctgacgtacacgctgttggaatctcgactcttgcagccggacacaagactctggttcctgagctaatcaaggagctcaattcccttggtcgccctgacattctagtaatgtgtggcggagtcattccaccacaggactatgagttcctgtttgaggttggtgtgagtaacgtgttcgggccgggaacaagaatacctaaggctgccgtacaggtgcttgacgacatcgaaaaatgcctggaaaagaagcaacagtccgtt

SEQ ID NO: 5630 - DNA, 2250 bp, Artificial Sequence
  derived and/or modified sequence
atgttaagggctaaaaatcagctgtttttgctcagtccacactatttacgtcaggtgaaggagtcaagcggatcccggttgatccagcagcggttgctacatcagcagcaacccctgcacccagagtgggctgcactcgcgaagaagcagctcaagggaaagaatcctgaggatctgatttggcacacaccggaaggcatcagtattaaacctctgtatagcaaacgggacaccatggacctaccggaggagcttccaggagttaaaccctttactagagggccctatcctaccatgtatacattccggccgtggacaattagacaatacgctggcttttctactgtggaggagtcaaacaagttttataaggataatatcaaagcggggcagcagggactgtctgtggcattcgacttagctacgcaccgtgggtacgatagtgacaatccaagggtgcgcggggatgtgggcatggccggtgtggccatcgacaccgtcgaagacacaaaaatcctcttcgatggaatccccctggagaagatgagcgtcagtatgaccatgaacggcgcagtaatacctgtcctcgctaacttcatcgtgactggagaggagcagggggtgccaaaggagaaactcactgggacaatccagaacgacatactcaaagagttcatggtccggaatacatacatctttcctcctgaaccctctatgaaaatcatcgctgacatcttcgagtacaccgctaaacacatgcccaagtttaacagtattagtatttccggctaccacatgcaggaggccggtgctgatgcgatcctggaactcgcttatactctagccgatggactcgagtattcacgcacaggactgcaggccgggctaaccatcgatgagtttgctccccgacttagctttttttggggtataggaatgaacttctatatggaaattgcaaagatgagggccggaaggcgcctgtgggctcacctgattgaaaagatgttccagccaaagaacagcaagtcactcctgctgagagcacattgtcaaacaagcggttggagtctcacagagcaggatccgtacaacaatatagtcagaacggcgattgaagctatggctgcagtttttggaggtacacagtccctacataccaattcatttgacgaggccctcggacttccaactgtgaaatctgccagaatcgcccgcaacacacagatcataattcaagaggagtctggaatcccaaaagttgcagacccatggggcggatcctacatgatggagtgtctgacaaacgatgtctatgacgccgctcttaagctgattaacgagattgaggagatgggtggaatggctaaggctgtggccgagggcattcctaagctgcggattgaagaatgcgcagcccgaaggcaggctcgcatcgatagtgggtccgaggttattgtgggcgttaacaaatatcaactagaaaaggaggatgccgtggaagtgctggctatcgacaacacatctgtaaggaacagacagatagaaaaactgaagaagatcaagtctagtcgcgatcaagcactggcggagaggtgtctggctgcgttgacagagtgcgcagcgagcggcgacggtaacatccttgccttggcggtggacgcatccagggctcgttgtaccgtgggcgaaatcacagatgcactaaagaaggtgttcggagagcataaggccaatgaccggatggtctcaggagcctaccgacaggaattcggggagtcgaaagagataacgtcagcaatcaaacgagtgcacaagttcatggagagggagggcaggcgcccacggctgctcgtggctaaaatgggacaggatggccacgatcgcggtgctaaagttattgctaccgggttcgccgacttggggttcgatgtggacatcgggccgttgttccagaccccaagggaagtcgcacagcaagctgtggacgccgacgtccatgccgtcggcatttcaactctcgccgcaggccataaaacactcgtccccgagttgatcaaggaacttaattcactgggccggccggatatacttgtgatgtgcggcggggtgattcctccacaagattatgaatttctattcgaggtgggtgtgagcaacgtgtttgggcccggtacaaggattcccaaagctgctgtccaggtcttggacgatattgaaaagtgtctggaaaagaagcagcagtccgtt

SEQ ID NO: 5631 - DNA, 2250 bp, Artificial Sequence
  derived and/or modified sequence
atgctccgtgctaagaatcaactcttccttctctcgcctcattaccttaggcaggtcaaggagagcagcggatcgagacttatacagcagagactgctgcaccaacagcaaccccttcatcctgaatgggcagcactcgcaaagaaacaactcaaaggcaaaaacccagaagatctcatatggcatacccccgaaggcatttctattaagccactttattccaaacgggacaccatggatctgcctgaagaactgcctggcgtaaagccatttaccaggggaccttaccctactatgtacacttttcgaccctggaccattagacaatacgccggcttctcaaccgtggaagaaagcaacaaattctacaaggataacatcaaagctgggcagcagggactctcggtggcatttgatctggcaactcatagaggatatgattcggataacccaagggtccgcggcgatgtgggaatggcgggagtggcaattgacactgtggaggataccaagattctgttcgatggtatacctttggagaaaatgtctgtgagcatgaccatgaatggtgcagtcattccagtgctggccaactttattgttaccggcgaggaacaaggagtgccgaaagagaagctgacgggaactatacaaaacgatatactgaaggaattcatggtgagaaacacctacatttttccacccgagccaagcatgaagattatcgccgacattttcgaatacactgctaaacacatgccaaaattcaactctatatcgatctccggataccatatgcaagaggccggtgcagacgccatcctggaactcgcgtacacgctggcagatggcctggaatatagcagaaccggactccaggcgggactcactattgacgagttcgcgccacgcctgtcattcttttggggaattgggatgaacttctacatggaaatcgccaagatgcgtgcaggaaggcgcctttgggcgcacctgattgagaaaatgtttcaacccaaaaactccaagagccttctcctccgggcccattgtcaaacctccggttggtcgctgaccgaacaagatccttacaacaatattgtgagaactgccatcgaagccatggcggcagtctttggcggtacccaatcccttcatactaatagcttcgatgaggctctcggtctgccgaccgtcaagtcagcacggatagccagaaacacgcagataatcattcaagaagaatcaggtattccgaaagttgccgacccatggggaggtagctacatgatggagtgtctgacgaacgatgtgtacgacgctgctctgaagttgattaacgaaattgaagagatgggaggaatggccaaggccgtcgcagagggcatccctaagctgcgtattgaggaatgcgcagcccgtagacaagcaaggatcgacagcggaagcgaagtgatagttggtgttaacaagtaccagctggagaaagaggacgcggtggaggtgctggctatcgataacacttccgtgcgcaatagacaaattgagaagctgaagaaaatcaaatcctccagggatcaggcactcgcagaacgctgcctggccgccctgactgaatgtgcagctagcggggatggaaatatcctggcccttgcggtcgatgcctcccgcgcacgatgtactgtgggagagattaccgacgcgctgaaaaaggtgtttggagagcacaaggcaaatgatagaatggtgtcgggggcttacagacaggaatttggagaatcgaaggaaattactagcgctattaagcgagtccataagttcatggagcgtgagggccgacgcccgagattgctcgttgcaaaaatggggcaggacggtcacgatagaggggcaaaggtgattgcaaccgggtttgcagatctgggcttcgatgttgatattggcccacttttccagactccacgagaggtcgcccagcaggcagtggatgcggatgtgcatgcagtgggaatatccacccttgccgcaggacacaagactcttgtgccagaattgatcaaagaactgaacagcctgggtcgtccggatattcttgtgatgtgcggtggcgtcatccccccgcaagactacgaatttctgtttgaagtgggagtctcaaacgtgtttggacccggaactcggattcccaaagccgcagtccaggtccttgatgatatcgagaagtgcctcgaaaagaagcagcaatccgtc

SEQ ID NO: 5632 - DNA, 2250 bp, Artificial Sequence
  derived and/or modified sequence
atgctgagggctaagaaccaactgttcctgctttccccccattacctgagacaggttaaggaatcaagcggtagtaggctgatccagcaacgtctcttgcaccagcaacaacccctgcaccccgaatgggctgctttagccaagaagcagctgaaaggcaagaaccccgaggaccttatctggcatactccagaaggcattagtataaaacctctctacagtaagcgagacaccatggatttaccagaggagctgcctggcgttaaacctttcactagaggcccatatcccaccatgtatacatttcgcccctggaccatacgacagtatgctggttttagtactgtcgaggagtccaacaaattctacaaagacaacattaaggccggacagcagggcctgtccgtggcctttgatctggccacccatcgcggctatgactctgataatccccgggtcaggggggatgtgggcatggctggcgtggccattgacacagtggaggatacaaaaatactattcgatggcattccgctagaaaaaatgtccgtgagtatgaccatgaatggagcagttatcccagttctggcaaattttatcgtgacaggcgaggagcagggcgtcccaaaagaaaagctgacaggaactatccagaatgatatcttaaaggagttcatggtgagaaatacctatatcttcccacctgagcccagtatgaagatcatcgctgatattttcgagtatacagcaaaacacatgcctaagtttaatagcataagcatcagcgggtaccacatgcaggaagcaggtgccgacgcaattctggaactggcttacacactggcagacggcctggagtacagtcgcactggactgcaagctggcctgaccatagatgaattcgcacctagactttcattcttctgggggattggtatgaacttttacatggaaatagctaaaatgcgggccgggagaaggctgtgggctcatctgatcgaaaagatgttccagccaaagaattccaagagtctacttctcagagcccattgccagacctccggctggagtctcaccgagcaggacccttataacaacatcgttcggaccgctattgaggctatggccgccgtgttcggcggcactcagagtttgcacaccaactcctttgatgaggctctcggcctgcccacagttaagtccgctagaattgcccggaatacccaaatcattattcaggaggagtccgggataccgaaggtcgctgacccctggggcggctcatacatgatggagtgtttaaccaacgatgtatacgatgctgccctcaagctgataaacgagatagaggagatgggcggcatggctaaagccgtggctgaaggcatacccaagctgaggatagaggagtgtgctgcacgcaggcaagcccgtattgattccgggagcgaggtgatcgtgggggtgaacaagtatcagctggaaaaagaggatgccgtggaagtcctggcaatcgataatacatcagttaggaatcggcaaattgaaaaactgaaaaagataaaatcttctcgcgaccaggctctggccgagcgctgccttgcagccctgactgaatgcgcagctagcggcgacgggaacattctagcactggccgtcgacgcaagccgcgctagatgtaccgtgggggaaataacagacgccctgaagaaagtttttggcgaacataaggctaacgatcgaatggtgtctggcgcctaccgtcaggagttcggcgagtcaaaggagattacctcagccataaagcgggtgcacaagtttatggaaagggaagggagacgccccagattactggtggccaaaatgggccaggacggccacgacaggggcgccaaagtcatcgctaccgggttcgcagacctcggctttgacgtggacatcggacccctattccaaacaccgagggaggtcgcccagcaagccgtggatgcagatgttcacgccgtgggcatctccacactggctgccgggcacaaaaccctggttccagaactcattaaggaactaaattctcttggaaggcccgatatactggtcatgtgtggcggggttattccaccacaggactacgagtttctcttcgaagtgggtgtctccaatgtcttcggccctggaactcggatcccaaaggcagccgtccaggtcctggacgacatcgaaaaatgcctagagaagaaacagcagagcgtg

SEQ ID NO: 5633 - DNA, 2250 bp, Artificial Sequence
  derived and/or modified sequence
atgctgagggctaagaaccagctgtttctgctgagccctcattatcttaggcaggtcaaagagagctcaggcagtcgccttatacagcagcgactcctccaccagcaacagccccttcaccccgaatgggcagcactggccaagaagcagcttaaagggaagaatccagaggatttgatatggcacaccccggaagggatctccataaaaccgctgtacagcaagcgggacactatggatcttcccgaggagctgccgggagtgaagccattcacacggggaccatatcccaccatgtacacttttagaccatggacgatacggcagtatgcaggattcagcaccgtggaggagagcaacaaattttataaggacaatatcaaagcagggcaacagggattgagcgttgcatttgacctggcgacccatagaggttatgactcagacaaccctcgcgtgagaggggatgttggcatggctggggtggctattgatacggtggaggacaccaaaattttgttcgatggcatcccgttagagaagatgagtgttagcatgacgatgaacggagccgtgattccggtcttggctaattttatcgtaactggggaagaacagggggtgccaaaggagaagttgactggtaccatccaaaatgacattctcaaggaatttatggtgagaaatacctacattttccctcctgaaccttctatgaagattattgccgacatctttgagtatacggccaagcacatgcccaaattcaattctatctccatcagcggctaccacatgcaggaggccggagccgacgcaatcttagagctcgcttacactctggccgacggtcttgagtactcacggacgggactccaagcaggattaaccatcgacgaattcgcaccccgtctgtcattcttttgggggattggcatgaacttctacatggagatcgccaagatgcgagccggcagacgcttatgggcgcacttgatcgagaaaatgtttcagcccaagaactccaagtctctgctgcttcgggcacattgtcagaccagtggctggtcactgacagaacaggatccttacaataatattgtgcgaaccgctattgaagccatggccgctgtgttcggaggcactcagtcactgcacaccaattcttttgacgaggccttagggctcccaacagtgaagtcagctcggattgctcgtaacacccagattattatccaagaagagtctggtatccctaaagtagccgatccttgggggggtagttatatgatggagtgcctcacaaatgacgtttacgatgccgccttgaagctcatcaatgaaattgaggagatgggcgggatggccaaggcggtggcagaggggatacccaaattgcgcattgaagagtgtgccgcgcgccgtcaggcacgcatcgattccggaagtgaggtcattgtgggcgtcaataaataccagctggagaaggaggatgccgtggaagtgctagccatcgacaatacgtcggtgcgtaataggcagatagagaagctcaagaaaattaagagttcgcgcgatcaggcactggccgaacgctgtctggctgcgttgacagaatgcgctgcttctggcgatggaaatatcttggcactggctgtggatgccagccgtgcacgctgcacagtaggcgaaatcaccgatgccttgaaaaaggtgtttggagaacataaggctaatgaccggatggtgagcggagcatatagacaagagttcggcgagagcaaagaaataacttctgccatcaaacgcgttcacaaattcatggagcgagaaggtcgaagaccccggctgctcgtggccaagatggggcaggacggtcatgaccgaggtgcaaaggtgatcgctacggggttcgcggatctcggctttgacgttgacatcgggccgttattccaaactcctagggaggtcgctcagcaggctgtcgacgctgacgtgcatgccgtgggcattagtactctcgccgctggccacaagactctagtccccgagctgatcaaagagcttaactccctcggtcgccccgatatcctagtgatgtgtggaggcgtgattccgccacaggactacgaatttctcttcgaggtcggtgtgagtaatgttttcggaccgggaaccagaattcctaaagcagctgtacaggtcctcgacgacatcgagaagtgtctcgaaaagaaacaacagtccgtt

SEQ ID NO: 5634 - DNA, 2250 bp, Artificial Sequence
  derived and/or modified sequence
atgctgcgggcaaagaaccagctgttcctcctgtccccgcattacctgcgccaggtcaaggaatcatcgggcagccggctgatccagcaacgcctgctgcaccagcagcaacctctgcaccccgaatgggcagctctggccaagaagcaactcaaagggaagaacccggaggacctgatctggcatacgcctgaaggaatctcgatcaagccgctgtactccaaaagggacacgatggatctgcccgaagagcttcccggtgtgaagccgtttacccgcggaccgtaccctactatgtacacttttcggccctggaccattagacaatacgccggcttctccactgtggaggaatccaacaagttttacaaagacaacatcaaggccggccagcagggtctgagcgtcgcttttgacctggctactcaccgaggttatgatagcgacaatccgcgcgtgcgcggggacgtggggatggccggggtggcaattgacaccgtcgaggatactaagatactgttcgatggaatcccattggagaagatgtctgtgagcatgaccatgaacggcgccgtgattcctgtgctggccaatttcatcgtaactggagaagagcagggagtgccgaaagagaagctcaccggaaccatccagaatgatatcctgaaagagtttatggtgagaaacacttacattttcccgcctgagccatcgatgaagattatcgccgacatcttcgagtacacggcaaagcacatgcctaagttcaactctatcagcatctcaggataccatatgcaagaggcgggagccgacgcgatcctcgagctggcctacacccttgcagacggtctggaatactcgcgaactggcctgcaagcagggctgactatcgatgaattcgccccacgcctctccttcttctggggaataggaatgaatttctatatggaaattgcaaagatgagagctggcagacgcctgtgggcccatttgatcgagaaaatgttccagcctaaaaactccaaatcccttctgttgcgcgctcactgccaaacgagcggatggtccctcaccgaacaagatccgtacaataacatcgtgcgcaccgccatcgaggctatggctgcagtgttcggtggcacccagtcactgcacaccaacagcttcgacgaggcgctcggcctgccgaccgttaagtctgcacgcatcgcccgcaacacccagattatcatccaggaggaatcgggaattccaaaggtcgccgacccgtggggtggatcttacatgatggagtgtctcactaatgacgtgtacgacgcggccttgaagctgattaacgagatcgaagaaatgggaggcatggccaaagcagtggctgaaggcatcccgaagttgaggattgaggaatgcgctgcaaggcggcaggcgagaatcgactccggttcggaagtgatcgtgggcgtcaataagtaccagttggaaaaagaagatgcagtggaagtcctcgcgatcgataacacttcggtccggaacaggcaaatcgaaaagctgaagaaaatcaagtcgtcacgcgatcaggcgcttgctgaacgctgcctggccgccttgacggaatgcgcagcatcaggggatggaaacatcctcgccctggccgtcgatgcgtcccgggcgcggtgcactgtgggagagatcactgacgcgctgaagaaggtgttcggagagcacaaggccaacgaccggatggtgtccggagcctatagacaagaattcggagaatccaaggagatcacttccgcaatcaaacgagtccataagttcatggaaagagagggacggcgtccaagactcctcgtggccaagatgggacaggacggccacgacaggggcgccaaggtgatcgcaactggattcgcggacttgggttttgatgtagacataggtccactcttccagaccccacgcgaagttgcgcagcaggctgtagacgcggacgtgcatgcagtgggaatctcaactctcgcagctgggcataaaactctggttccggagctgattaaggagctcaattcgctcggccggccagacatccttgtgatgtgtggcggggtgatacccccgcaagactacgaattcttgtttgaagtgggagtcagcaatgtgttcgggccgggcaccaggattcccaaagctgcagttcaagtgctcgacgatatcgaaaagtgcctggagaaaaaacagcaatcagtg

SEQ ID NO: 5635 - DNA, 2250 bp, Artificial Sequence
  derived and/or modified sequence
atgctcagggcaaaaaaccagttgtttttgttgagcccacattatctgcggcaggttaaggaatcttctggcagccgtctgattcagcagagactcctgcatcaacagcagcctctgcatccagaatgggccgccttggccaagaaacagcttaagggtaagaacccagaggacctgatctggcacacacctgaggggatctcaataaagccactgtactcaaagagggacactatggacctgcctgaggagcttcctggggtcaaaccttttacccgcggaccctatccgacgatgtacacttttaggccttggaccattcggcaatacgctggcttctctaccgtagaggaatcaaacaagttctacaaggacaacattaaggcagggcaacaggggctctctgtggccttcgaccttgcgacacatcgggggtatgactctgacaaccccagggtgcggggggatgtgggaatggcgggtgtggctatagatacggtggaggacaccaaaatcctgttcgatgggattccacttgagaaaatgagcgtgagtatgacgatgaacggggccgtgatcccggttttggcaaatttcatcgtcactggtgaggagcagggagtgcccaaagaaaaattgacgggcactatccagaacgatatcctgaaggagttcatggttcgcaacacgtatatcttcccaccagagccgtcaatgaagatcatcgccgatatcttcgagtacacagccaagcatatgccaaaattcaattcaatctcaatttcaggctatcacatgcaggaggctggggctgatgctatcctcgagttggcgtatacacttgcagacggcctagaatattcccggacggggctgcaggctggcctcacaatagacgaatttgctcctaggctgagtttcttctggggtattggcatgaatttttacatggagatcgccaagatgcgtgctggccgacgtctttgggcccacctgatcgaaaagatgttccagccgaagaattctaagtccctccttctgagggcccattgtcagacatccgggtggtcattgacagagcaggatccctacaacaatatagtgcgaacagccattgaggctatggctgccgtgtttggaggaacccagagcctgcatacaaactcctttgatgaagcactagggttgcccactgtgaaatccgcgcgcattgctagaaatacacagattattatccaggaggagagcggcattcctaaggtcgctgatccctggggaggttcatatatgatggaatgccttacaaacgacgtgtatgatgctgcgctcaagctcattaacgagatcgaagaaatggggggcatggccaaagccgtggccgaaggcattccaaagctgaggattgaggagtgcgccgcaagaagacaagccagaatagactctgggtcggaagtgatcgtgggcgtgaataaataccagctggaaaaagaggacgcagtagaggtgctggcaattgataacacctcagtacgtaataggcagatagagaaactgaagaagataaaatctagccgggatcaggcactcgccgagaggtgcctagcagctttaacagagtgcgccgcgagcggggacggtaatatcttggcccttgccgttgatgcttccagagcaagatgtacagtcggagagattacggatgccctcaaaaaggtgttcggtgagcataaagccaacgatcgcatggtgtccggtgcataccgacaagagttcggtgagtccaaagagattaccagcgcgataaaaagggtgcacaagtttatggagagagagggccgacgtccccggctgttggtagccaagatgggtcaagacggtcacgacaggggcgcaaaggtgatcgccaccggctttgccgatcttgggttcgacgttgatataggtccgttattccagacacctcgcgaggtggctcaacaggcagtagacgccgatgtacatgctgtaggtatctctaccctggcggccggacacaagactctggtgccagagcttatcaaggaactgaattccctgggacggcctgatatcctggtgatgtgcggaggagtgattcctccccaagattacgagtttctattcgaagtcggtgtgtctaacgtgttcggaccgggtacaagaatccctaaggcagcagtacaggtattagacgacatcgagaaatgtctagaaaaaaaacagcagtctgtg

SEQ ID NO: 5636 - DNA, 2250 bp, Artificial Sequence
  derived and/or modified sequence
atgttgcgcgccaaaaaccagttgtttctgctgtccccacactatctgcgacaggtgaaagaatcatcggggagtaggttgatacagcagcgcttgttacatcaacagcagccccttcaccctgagtgggccgctctggcaaagaagcagcttaagggcaagaatcccgaagacctgatctggcacacccccgagggtattagtattaagcccctctactccaaacgggacacaatggacctccccgaggagctgccgggcgtgaagccatttactcgcggcccttatcccaccatgtacactttcaggccgtggacgatccgtcagtacgcaggatttagcaccgtggaggagtcaaataagttttacaaggacaacatcaaagcaggccagcagggtctgagtgtggccttcgatctcgctacgcacagggggtacgactctgataatccacgggttcgcggcgatgtcggaatggctggggtcgcgatagacaccgtcgaggataccaagatcctgtttgacggtatccctttggaaaagatgagcgtatctatgactatgaatggcgctgtcatccctgtgttggccaactttatcgttacaggagaagaacagggcgtgccaaaagaaaaactgactggcaccattcagaacgatatactgaaggagttcatggtcagaaacacctatatcttcccgcccgagccatccatgaagataatcgcagacatcttcgaatatacagccaagcacatgcctaagttcaacagcatctccatcagtgggtaccacatgcaggaggccggagccgacgccatcctagagctggcctatacacttgccgacggtctagagtattcgagaactggacttcaggccggcctcacaattgatgagttcgccccccggctgtcctttttttggggaattgggatgaatttttacatggaaattgctaaaatgcgtgccggcaggcgcctgtgggcacacttgattgaaaaaatgtttcagcctaaaaacagtaagagtctgctgctacgtgcgcattgccagacatcggggtggtccctaacggagcaggacccctacaataacattgtacgcactgccattgaagccatggccgcagtgtttggggggactcaatctttgcacaccaattcattcgatgaggctttaggcctgcctactgtcaaatccgcgagaatagcacggaacacgcaaatcataattcaggaagagtctggcattcctaaggtggcagacccctggggaggcagttatatgatggagtgtttgaccaatgatgtctacgacgccgccttgaagctgattaatgagattgaagaaatggggggcatggccaaggctgttgctgaggggattccaaagctgaggatcgaggaatgtgccgctcgtcggcaggcccggatcgactccggctctgaagtgattgttggcgtgaacaagtaccagctggagaaggaagacgctgtggaagttttggccattgacaatacaagcgtgcgcaaccgccagatcgagaagctaaagaagattaagtcgtcaagggaccaggcattagccgagaggtgccttgccgccctaactgagtgcgcagcaagtggagatggcaacatactagcactcgccgtggatgcctccagagcacgttgcactgtaggggaaatcactgacgcactgaagaaggtgtttggagagcacaaagccaacgacagaatggttagcggggcgtatcgccaggaattcggagagagcaaagagatcacatcagctatcaagagagtccataaattcatggaacgagagggtcggagacccagactgctagtggctaaaatgggacaggacggccatgaccgaggagctaaagtaattgcaacgggttttgcagatttaggttttgacgtggatatcggacccctgttccaaacccctcgggaagtggcccagcaagccgtagacgccgacgtgcatgccgtcggtatcagcactctggccgccggacataagacactggtccccgagctcattaaagagctaaactccctcggccggcctgatatcctggttatgtgtggcggagtgatcccccctcaggactatgaattcttgtttgaggtcggagtctcaaacgtttttggcccgggcacccgaattccgaaagccgcggtgcaggtcttggatgacatcgagaagtgtctggagaaaaaacagcagtcggtc

SEQ ID NO: 5637 - DNA, 2250 bp, Artificial Sequence
  derived and/or modified sequence
atgctccgcgccaaaaaccaactttttcttctctcaccgcactacttgcggcaggtgaaggagtcctcagggagtaggctaatccagcagaggctgttgcaccagcagcaacctctacatccagaatgggcggcccttgctaaaaagcagctgaagggtaagaatccagaggacctcatctggcatacaccagaaggcatctccatcaagcccttgtatagcaagcgggacacaatggacctgcctgaggagctccctggcgtaaaaccttttacaaggggcccttacccgactatgtacactttccgaccttggaccatacgacagtacgctggttttagcaccgttgaagagtcgaacaagttctataaggacaatattaaagctggacagcaggggttatcagtagctttcgacctggcaacacaccgagggtacgactctgataatccccgcgttcgaggagacgtgggcatggccggggtggcaattgacactgtggaggacaccaagattctctttgatggtatcccgctggagaagatgtccgtcagtatgacaatgaatggtgccgtgattcccgtgctagcaaatttcattgtgacgggggaggagcagggagtgccgaaagaaaagttaacgggcaccatacagaacgatatccttaaggaattcatggttagaaacacgtatatctttccccctgagccctcaatgaaaatcattgcagatatctttgagtacacagccaagcacatgcctaagttcaactcgatcagcatctccggttatcacatgcaggaagcgggagccgacgctatcctggagctagcttacactttggcagatggtctcgagtatagcagaacaggtttgcaggctggcctcacgatcgacgaatttgcgccacgattgtctttcttctggggcatcgggatgaatttctatatggaaattgcgaaaatgcgcgcgggtcgcaggctttgggctcatctcattgaaaagatgttccagccaaaaaacagcaaatccctccttctgagagcacattgtcaaacatcgggctggagtcttactgaacaggacccatataacaacatcgtgagaacagctattgaagccatggccgcggtttttgggggaacacaatcactgcatactaactcattcgatgaggctctcggtttgccgaccgtcaaatcggccaggatagcccgcaatactcagatcataatccaggaggagtctggaatccccaaggtcgctgatccttggggcgggagctacatgatggagtgcctcaccaatgacgtgtatgacgctgctcttaaactaatcaacgagatcgaggagatgggcgggatggcaaaagccgtagctgaaggtattcctaagttgcgaatcgaagagtgcgcagctaggaggcaggcaagaatagatagcggatctgaagtgatcgttggagtgaacaagtatcagctggagaaagaggatgctgtggaggtgttggccatcgacaatacaagcgtgagaaatagacagatcgaaaagttgaaaaaaattaaatccagtcgagaccaggcactagcagaaagatgcctggctgctctgaccgagtgtgctgcctcaggagacgggaatattctagctttggccgtggacgcctcccgagccaggtgtacagtgggtgaaataaccgatgcgcttaagaaagttttcggcgagcataaggcgaatgacaggatggtttcaggagcataccgccaagagtttggcgagagtaaggagataacaagcgccatcaagcgcgtgcataagttcatggagcgagaggggagaaggcctcggctactagtcgctaagatgggtcaggatggccacgaccggggcgccaaagtcatcgctacgggctttgccgatctaggcttcgatgtggacataggaccccttttccaaacaccaagggaggtggcccagcaagccgtagatgcagacgtacacgctgtcggaatatccaccctggccgccggtcataagaccctggtgcctgagctgatcaaagagcttaacagtctggggaggcctgatatattggttatgtgtggaggggtgattcctccgcaagattacgagtttctcttcgaggtaggtgtgagtaatgtgtttggtcctgggaccaggatccccaaggctgccgtccaggtcctggacgacatcgagaaatgcctggaaaagaaacagcagtccgtg

SEQ ID NO: 5638 - DNA, 2250 bp, Artificial Sequence
  derived and/or modified sequence
atgctgagggcgaaaaaccagctgtttctgctgagcccacattatctccgacaagtgaaagagtcctccggctcccgactcattcaacaaaggcttctgcaccaacagcagcctctccatcccgaatgggccgcgctggcgaagaagcagcttaaggggaaaaaccccgaggacctgatttggcacactcctgagggcatctcaatcaagcctctctatagtaagagagacaccatggatctgcccgaagagctacctggcgtgaagccctttacacgtggcccatatcccaccatgtacacctttaggccatggactattaggcagtacgcaggattttctactgtggaggagtcgaacaaattctataaagacaacatcaaagctggccaacagggcttgagcgtggcattcgatttagcgacacacagaggttatgatagcgacaatccacgcgtgagaggcgacgtggggatggcgggcgtggcaatagacacagtcgaagatactaaaatcctgttcgatggcatccctttagagaaaatgagcgtcagcatgactatgaacggcgccgtgattcctgtacttgctaacttcattgtgacgggtgaggaacaaggggtgcctaaggaaaagctgacgggcactattcaaaacgacatcctaaaggaatttatggttagaaatacgtacatctttccacccgagccttctatgaaaataatcgctgacattttcgagtacacagccaaacacatgcctaagttcaactcgatctccatctccggttatcacatgcaggaagctggggcagatgccatcctggaattggcatacaccctggcagacggattggagtactctaggacgggtctgcaggccggactgacaattgatgaatttgccccccgcctgtcatttttttggggcataggaatgaacttttacatggagattgctaagatgagagccgggcggcggttatgggcacacctcattgagaaaatgttccagcctaaaaactcaaagagtcttcttctgcgcgcacattgccagacctccggctggtccctaaccgaacaggacccctacaacaatatcgtgcgtacagctatcgaagccatggctgctgtgttcggaggtacgcaatctctccacacaaactcattcgatgaggctctaggtctgcccaccgttaagtcagcccgtatcgctagaaatacccagatcatcattcaggaggagtccggtattcccaaggtggctgacccatggggtgggagctatatgatggagtgtctcacaaacgatgtgtatgacgcagcattgaaactgattaacgaaattgaagaaatgggaggtatggccaaagctgtagcagaagggattcccaagctgcgcatagaagagtgcgccgccagacgccaggcgcgtattgacagtggaagcgaggttatagttggggtgaacaagtaccagcttgagaaggaagacgctgtggaggtgctagctatcgataacacttccgttcgcaaccggcaaatcgaaaaactgaaaaaaattaagagcagtcgtgatcaggctctggccgagagatgtcttgcggccctgaccgagtgcgccgcctccggagatggaaacatcctggccttagccgtggacgcgtcgcgcgcacggtgcacggtgggagagataaccgatgctctcaagaaggtctttggagagcataaggccaacgatcgcatggtatcaggcgcctaccgacaggaattcggagagtccaaagagatcacctctgccataaaacgagttcacaagttcatggagagggagggaaggagaccgaggctccttgtggccaagatggggcaggatggtcatgatcgtggtgctaaagtcatagctaccggattcgctgatttaggtttcgacgttgatatcgggccattatttcagacacccagagaggtcgcccagcaggccgtcgatgcagacgttcacgccgtcggaatttccactcttgccgccgggcacaagaccctcgtgccagagctcattaaagagctgaattcccttgggcggcctgatatcctggtcatgtgcggtggcgtgattcccccccaggactacgagttcctgttcgaggtgggcgtgtcaaacgtgtttggtcctggtactaggatcccgaaagccgcagttcaggtgttagacgatatagagaagtgtcttgagaagaagcagcagtctgtg

SEQ ID NO: 5639 - DNA, 2250 bp, Artificial Sequence
  derived and/or modified sequence
atgctgagggccaagaaccagctttttctgctttcgccgcattacctgcgccaagtcaaggaaagctccggttcgcgtctgattcagcaacggttgctccaccagcaacagcctcttcatcccgagtgggcagcactcgccaagaaacaacttaagggcaaaaaccctgaagatcttatatggcatactccagaaggaatttcaattaagccgctgtactccaagcgggataccatggatctcccagaagagctgcccggtgtgaaacccttcaccaggggcccgtatccaacgatgtacacttttagaccatggaccatccggcaatacgcaggtttcagcactgtggaggaatcgaacaagttttacaaggacaacattaaggcagggcaacagggtttgtcagtcgcattcgatctcgccacccacaggggatatgatagcgacaaccctagagtgaggggagacgttggtatggcaggcgtcgctattgatactgtggaggataccaagattctgttcgacggaatcccgctggagaaaatgagcgtttcgatgaccatgaacggagccgtaatccctgtgctcgcaaatttcatcgtcactggtgaagagcagggtgtgcccaaagagaaactgactgggaccattcaaaatgatattctgaaggaattcatggtgaggaacacctacatattcccaccggagccaagcatgaagattattgcagacattttcgaatacaccgcaaagcacatgcccaagtttaactccatttccatttcaggataccatatgcaggaagcaggtgcagatgcgattcttgaactggcctacactctcgcagacggactggagtactcgaggactggcctccaggcaggactcactattgatgagtttgctcctcgactgagctttttctggggaattgggatgaacttctacatggaaattgcaaagatgcgtgcaggcaggcgcctgtgggcacatttgatcgagaagatgtttcaaccaaaaaactcgaagagccttctcctgcgtgcccattgtcaaacctctggatggtcccttaccgaacaagatccatataacaacatcgtgcgcaccgcaatcgaagcaatggcggccgtctttggtggaacccagtcacttcataccaattcgtttgacgaggcactggggcttccaactgtgaaatccgccagaattgcccggaacactcagattatcattcaagaggagtccggaattcccaaggtggctgatccgtggggaggtagctatatgatggagtgtctcactaacgatgtgtacgacgctgcacttaagctcattaatgaaattgaagagatggggggtatggcaaaggcagtggccgaaggaatccccaaattgcgcattgaagaatgcgcagcgcgccggcaagcacggatcgattctgggtccgaagtcattgtgggggtcaacaagtaccaactcgagaaggaggacgcagtggaagtgcttgccattgataacacgtcggtgcggaacaggcaaatcgaaaagttgaagaagataaagtccagccgggaccaggccctcgcagagagatgtctggccgctctgactgaatgtgcggcaagcggagacgggaacattctcgcactggcagtggacgcctccagagcacgctgtaccgtgggtgaaattaccgacgcactcaagaaagtgttcggagagcacaaggcaaatgacagaatggtgtcaggagcatacagacaggaatttggcgaatccaaagaaatcacgtcagcaattaagagagtgcacaagtttatggaacgagaaggacgaaggccacggttgcttgtggcaaaaatgggtcaagacggccacgatcgcggcgcaaaagtgattgctactggctttgccgatcttggatttgacgtggacataggcccgctgtttcaaacgccccgcgaagtggcacagcaagcggttgatgccgacgtgcacgcggtcggcatcagcacccttgcagcaggtcataagactctggtgccagaattgatcaaagagcttaattcgctcggccgtcctgacattctcgtgatgtgtggtggagtgatccctccccaagactacgaattcctgttcgaagtcggagtttccaatgtctttgggcctgggaccaggatcccaaaggcagcggtgcaggtgctggacgacattgaaaagtgtctcgaaaagaaacaacaatcggtc

SEQ ID NO: 5640 - DNA, 2250 bp, Artificial Sequence
  derived and/or modified sequence
atgttgcgagctaagaatcagctgttcctcttaagcccccactacctgcgccaagttaaggaatcctcaggctcacgactgatccagcagcgtctcctgcatcagcagcaacctcttcaccctgagtgggcagctcttgctaagaaacagctgaaagggaaaaatccagaggatctgatctggcatacccctgaaggaatatccatcaaaccactatattcaaagcgggacacaatggatctgcctgaagagctgccaggtgtgaaaccgtttacccgcgggccgtatcccactatgtacaccttccgtccttggaccatccgccagtatgccgggttttctactgtcgaggagagcaataaattctataaagacaatatcaaggcaggacagcaggggctgtccgtcgcctttgatctggctactcaccgggggtatgacagtgacaaccccagggtgcgcggcgatgtcggaatggccggcgtggctatcgacactgtcgaagacacaaaaattctgtttgatggcattcctttggaaaagatgagcgtaagtatgactatgaacggcgccgtgattcccgttctggccaattttatcgtaacgggggaagagcagggtgtgccaaaggaaaaactcaccggtacaattcaaaacgatatactgaaagagtttatggtcaggaatacatatatctttcctcctgaaccctctatgaagatcatagccgatatattcgagtacacagcgaaacacatgcctaaatttaactccatctcaatatctggctaccacatgcaggaggcaggagctgatgccattctagagttggcctacacactagcggacggtctggagtacagtaggacgggactgcaggccggtctgacgattgacgagtttgccccccggttgtccttcttttggggtattggcatgaatttttacatggagatagccaagatgcgggctggacgaaggctgtgggcccacctgatcgaaaagatgtttcagccaaaaaactcaaaatccctgttactcagagctcattgccagacctctgggtggagtcttacagagcaggatccctacaacaacattgtgcgaacagcgattgaagcaatggcagccgtgtttggaggcacgcagtccctgcacacaaacagcttcgatgaggctctcggcctccccacagtgaaaagtgcgagaattgctcgcaacacacagatcattattcaggaagagtcaggaatccccaaggtggcggatccctgggggggctcctatatgatggagtgtctgacaaacgatgtctatgatgccgccctcaagctgattaacgagatcgaggaaatggggggaatggccaaagcagtcgcagaagggatacctaagctacggatcgaggaatgcgccgctcgacgccaagcacggatagactccgggagtgaagtaatcgtgggcgtgaacaagtatcagttggaaaaagaggacgccgtcgaagtgttggccattgataatacaagcgtgagaaatcgacagatagagaagctcaagaaaatcaaatcatcccgggatcaagcgctggcagaaaggtgtctcgcggccctcaccgaatgcgccgccagcggggacggaaacatcctggccctggccgtcgatgcctcacgagctcgttgcaccgttggagagattacagatgcgctgaagaaagtgttcggggagcacaaggccaatgatcggatggtgtcgggagcttaccgacaggagtttggcgaaagcaaagagattacctctgccatcaaacgggttcataaatttatggagcgggaggggcggaggccacgtctactagtcgctaaaatgggtcaggacgggcacgacagaggggctaaagtgatagcaacaggcttcgccgacctgggtttcgacgtcgacatcggccccctttttcagacaccccgggaggttgcgcaacaggccgtcgacgcagacgtccatgctgtgggcatctcaaccttagctgccggacataaaacactcgtgccagagctcatcaaagagctcaatagtctcggacgaccagatattctcgttatgtgtgggggcgtgatccccccccaggattacgagtttctctttgaggtgggcgtgagcaatgtgttcgggcctggtactagaatcccaaaggccgctgtgcaggttttagatgacatcgaaaagtgtttggagaagaaacaacagagcgtt

SEQ ID NO: 5641 - DNA, 2250 bp, Artificial Sequence
  derived and/or modified sequence
atgctacgggccaagaatcagcttttcttgctttcaccgcattatttacgtcaagttaaggagagctctgggtcccgtttaatccagcagaggttgctgcatcaacagcaacctttacaccctgaatgggcagctttagctaagaagcaactgaagggtaaaaacccagaggatctgatctggcacacgccagaaggaatcagcattaaaccgttatactccaaacgggacaccatggatctgccagaggaacttccaggggttaagccttttactagagggccatatccgactatgtacacctttagaccatggaccattaggcaatacgctggtttttcgacagtagaagaaagtaacaaattttacaaagataatattaaggctgggcaacaaggtctcagcgtggccttcgatttggccacacaccgtggttatgattccgataaccctagagttcgtggcgatgtcggaatggctggtgttgcaatagacaccgtcgaagacacaaaaattttgtttgacggtattccattagagaagatgtccgtgtctatgaccatgaacggagcagttattcctgtccttgctaacttcattgtcactggtgaagagcaaggagttcctaaagaaaaacttaccggtaccattcaaaacgatatcctcaaagaatttatggttcgaaacacctatatcttcccacctgagcccagcatgaagatcatcgctgatatatttgagtataccgctaaacacatgcctaaatttaactcaatctctatatctgggtatcatatgcaagaagcaggtgccgatgctatactcgagttggcctatactttggccgacggacttgaatactctcgtactggactccaggccggactcactatagatgagttcgctcctcgtctctccttcttttggggaataggaatgaatttttatatggaaatcgctaagatgcgggctgggcggagactttgggctcacttgatcgaaaagatgtttcaacctaagaatagtaagagcctacttctcagagctcactgtcaaacatcgggttggtccctaactgaacaagatccatacaataacatcgttaggacagcaatagaagctatggcagcagtttttggtggaactcaatctctccatacaaatagctttgatgaggccttaggcctccccactgttaaatctgctcgtatcgctagaaacactcaaattataattcaagaagaatcgggaataccaaaagttgcagacccttggggaggttcttacatgatggagtgccttaccaacgatgtatacgatgctgccctcaagctaatcaatgaaattgaggaaatgggaggtatggctaaggcagttgccgagggtattccaaaattgcgaatagaagaatgcgcagcccggaggcaagctcgtattgatagcggcagtgaggtaattgtcggcgttaataagtatcagctagaaaaggaagatgcggttgaagtcctcgccatagataacacctcggtccgtaataggcagattgaaaaactgaagaaaattaagtcgtcaagagaccaggctttggccgagagatgtcttgcggctttgacagaatgtgctgctagtggtgatggtaatattttagctctagcagtcgatgcatccagagcaagatgcactgtcggagaaataaccgatgctctgaaaaaggtcttcggggagcacaaggcaaacgatcgaatggtcagcggagcatatagacaagagtttggggaatcaaaagaaattacttcagctatcaaacgagtgcataagtttatggaaagggaagggaggcggccacgtcttctcgttgccaaaatgggccaggacggacacgacagaggagccaaggtgattgctacaggctttgctgatttgggctttgacgtagatatcggtccactgtttcagactcctcgtgaagttgctcaacaagcagttgatgcggatgtgcatgcggtcgggattagcactcttgctgcaggacacaagacactcgtaccggagctcattaaggagttgaattccttgggtaggccggatatactagtcatgtgcggtggtgtcatcccaccccaggactatgaatttctgtttgaagttggggttagtaacgtctttggacccggtaccagaattcctaaggcggcggttcaggtgttagatgacatagaaaagtgcctagaaaagaagcaacagagtgtt

SEQ ID NO: 5642 - DNA, 2250 bp, Artificial Sequence
  derived and/or modified sequence
atgcttagagcaaagaatcagttgttcttgctctcgcctcattacctgcgccaggtgaaagaatcgtccggttcgcggctgattcagcaacgactgctgcatcaacagcaacctctgcacccagaatgggctgccttggcaaaaaagcaactgaaaggcaaaaaccctgaagatcttatctggcacactcctgagggaatttcgatcaagcccctttacagcaagagggataccatggatctccctgaagagctgcctggagtgaaaccctttacccgagggccgtatcctactatgtacacctttcggccatggactatcaggcaatacgctgggtttagtactgtggaagaatcgaacaagttttacaaggataacataaaggcaggtcagcagggactttcggtggcatttgatcttgcaacccacaggggttacgattcagataatcctagagtccggggggatgtgggaatggcaggcgtcgccatcgacaccgtggaagatacgaagatactttttgacggcataccgttggaaaagatgtctgtgtccatgaccatgaacggagccgtcattccggtcctcgcaaactttatagtcaccggagaggagcaaggagttcccaaggagaagctcactggaactattcaaaacgatatcttgaaggagttcatggtgcgcaacacttacatcttccctcccgagccatcaatgaagatcatagccgatatctttgaatacaccgcaaagcatatgccgaaattcaactcaatctcaatttccggttaccacatgcaagaagcgggagccgatgcaattcttgagcttgcctacaccctggcagatggccttgaatacagccggactggtctgcaagcgggactgactatcgacgagtttgcaccacgactgagcttcttttggggaattggaatgaatttctacatggagatcgcaaagatgagagcaggacgacgtctgtgggcacatcttattgaaaagatgttccagcctaaaaactcaaagtcgctgctgctcagagctcattgtcaaacctccggatggtcccttactgaacaagatccgtacaacaacatcgtgagaacggcgatagaagcgatggcagctgtgtttggcggaactcaatcgctccacaccaactcatttgatgaagcattgggacttccgactgtcaagtcggctcgcattgctagaaatactcagattatcatccaagaagaaagcggcatccctaaggtggcagatccatggggtggatcatacatgatggagtgccttaccaacgacgtgtacgacgccgcactgaaattgattaatgaaattgaagagatgggaggtatggcaaaggcagtggccgaaggcattccaaagctccggatcgaagagtgtgcagcacggaggcaagcacgcatcgattcggggtcggaagtgatcgtgggggtcaacaagtaccagcttgaaaaggaagatgcagtcgaagtgctggcaattgataacaccagcgtgcgaaacagacagattgaaaaactcaagaagatcaaatcttcacgcgaccaggcccttgcagagagatgtttggcggcccttacggaatgtgccgcctcgggggacggcaatatccttgcactcgcagttgacgcctcgcgggcccgatgcaccgtcggagaaattactgatgcactcaagaaggtgtttggagaacacaaggccaatgacagaatggtcagtggtgcatataggcaagagtttggtgaatcgaaagaaattacctccgcaatcaagcgcgtgcacaaattcatggaaagagaggggagacggccccgcctgctcgtggcaaaaatgggtcaggatggacatgacagaggagcaaaggtgattgctaccggatttgcagaccttggatttgatgtggatattggccctttgtttcagaccccacgcgaagtggcccagcaggcagttgatgcagacgtgcatgccgttggcattagcacgctcgcggccgggcacaaaacccttgtgcccgagctgattaaggagttgaattcgttgggaaggcctgatatccttgtgatgtgcggtggcgttattccacctcaagactacgagttcctgtttgaagtgggagtatcaaatgtattcgggcccggaacccggataccaaaggcagcagtccaggtccttgatgacatcgaaaagtgtctcgaaaagaaacaacaatcagtg

SEQ ID NO: 5643 - DNA, 2250 bp, Artificial Sequence
  derived and/or modified sequence
atgctcagagcaaagaaccagctgtttctcctttccccgcattatctgagacaggtcaaagaaagctcggggagccgcctcatccagcagaggctcctccaccagcaacagccactgcatcctgaatgggcggccctggcgaaaaagcagctgaagggcaaaaatccggaagatctcatctggcacactcccgagggtatcagcattaagcctctctactcaaaaagggatactatggacctgccagaagagctccccggagtgaaacctttcaccagaggaccttacccgaccatgtacaccttccgcccgtggaccattagacagtacgccggatttagcaccgtcgaagaatcaaacaagttctacaaggacaatatcaaggccggtcagcagggcctgtccgtggcattcgacctcgcgactcaccgtggatacgactcggacaacccaagggtccgcggcgacgtcgggatggccggcgtcgccatcgacaccgtggaggacactaagattctgtttgatggtatcccactggagaaaatgagcgtgtccatgactatgaacggcgcagtgatcccggtcctggcaaactttatcgtgaccggggaggaacagggtgtgccaaaggaaaaactcaccggaactatccaaaacgacattctcaaagagttcatggtgcgaaatacctacatcttcccgccggaaccttcaatgaagatcatcgctgacattttcgaatacacggccaagcacatgccgaagttcaattcgatctcaatttcgggatatcatatgcaggaggctggtgcggacgccatcctggagctggcgtacactctggccgacggcctggaatactcgagaaccggcctccaagccggcctgaccatagacgagtttgccccacgcctgtcgttcttctggggaattggcatgaacttctacatggaaatcgccaaaatgagggcaggccgccggctgtgggcccatctgattgagaagatgttccaaccgaaaaacagcaagtcccttcttctgagagctcactgtcagacctccggatggtccctcactgaacaagacccttacaacaacatcgtgcggaccgccatcgaagccatggcggcggtgttcggcggaactcagtcgctgcacaccaattcttttgatgaggcactgggacttccgaccgtgaagtcagcaaggattgctagaaacactcagatcattatccaagaagaaagcggtatcccaaaggtggccgatccatggggaggcagctacatgatggagtgcctgaccaacgacgtgtacgatgccgctcttaagctcatcaatgaaatcgaagaaatggggggtatggccaaagctgtggccgaaggcatcccgaaacttcgcatcgaagagtgcgccgcgagacggcaggctaggatcgattcgggatcagaggtgattgtcggagtgaacaagtaccagctcgaaaaggaggacgccgtggaggtcctggcgatcgataatacctcggtgagaaaccgccaaattgagaagctcaaaaagatcaagtcgtcccgggaccaggcgctggcagaacgctgcctggctgctttgactgaatgcgccgcgtccggagatgggaatatcctggccctggcggtggatgcgtcgcgagcccgctgcactgtcggtgaaatcactgatgcgctgaagaaagtctttggcgagcacaaggccaacgaccgcatggtgtcaggagcctaccgtcaagagttcggggaatccaaggaaatcacctcggccatcaagagggtgcacaaattcatggagcgggaagggagacgcccgcgactcctggtcgcaaaaatgggacaggacggacatgatagaggggccaaagtgatcgcaaccggattcgccgacctcggcttcgatgtggacatcggaccgttgtttcagactccgcgcgaggtggcccagcaagcggtggacgccgacgtgcacgccgtgggaatctcgactctggcggctgggcataagacccttgtccccgagctgatcaaggagctgaactcgctgggtcgccctgatattctcgtgatgtgcggaggtgtcatacctccgcaggactacgagtttctcttcgaggtcggcgtgtcgaacgtgttcggcccgggaactcgcatcccgaaggctgctgtgcaagtgctggatgatatcgagaaatgcctcgaaaagaagcagcagtcggtt

SEQ ID NO: 5644 - DNA, 2250 bp, Artificial Sequence
  derived and/or modified sequence
atgctgcgcgcaaagaatcagttgttcctgctctcgccgcactacctgcgacaggtaaaggaatcaagcggaagccgcctcattcaacagcggcttctccaccagcagcagccactccacccagagtgggcagcgttggcgaagaaacaactgaagggaaagaacccggaggacctgatctggcacaccccagaaggaatctcgatcaagccgctgtactcgaagagagatactatggatctgccagaagagctgccaggcgtcaagccgttcaccaggggcccgtacccgactatgtacacctttcgcccttggaccatcagacagtatgcgggcttctcaactgtggaagaaagcaacaagttctacaaagacaatatcaaggccggacagcaaggactttcggtggccttcgatttggccacccatcgcgggtacgattcggataatcctcgtgtcaggggtgacgtcggaatggccggagtcgctatcgacaccgtcgaggacactaagatcctgttcgacggaatcccgttggaaaagatgtccgtgtcaatgactatgaatggagcggtcatcccagtgctggcaaacttcatcgtcaccggagaagaacaaggtgtcccaaaggagaaacttactgggactatccagaacgacatcctgaaggaattcatggtgcgcaacacttacattttcccacccgaaccatccatgaaaatcatcgcggacatttttgaatacactgccaagcatatgccaaaattcaactcgatttcgatctccggataccacatgcaagaagccggcgcagatgctatcctggaactcgcttatacccttgccgatggattggaatactcccgcaccgggctccaagcaggactgaccattgatgagttcgctccgagactcagctttttctggggcattggcatgaacttctacatggagatcgcgaagatgagggcaggacgcaggctgtgggctcatctcattgaaaagatgttccaaccaaagaattcgaaatccctgctgttgcgagcgcactgtcagactagcggatggtcgctgacggaacaagacccgtacaacaacatcgtcagaaccgccatcgaggcaatggcggccgtgttcggggggactcagtcgctccacaccaattcattcgatgaggccctcggactgccgactgtgaagtccgcccggattgcgcggaatactcagatcatcatccaagaggaatcaggcatccctaaggttgccgacccctggggtggatcctacatgatggagtgtcttaccaatgatgtgtatgacgctgcactgaaactgatcaacgaaatcgaagaaatgggtggcatggcaaaagcggtggccgaggggattccgaagctccgaattgaagagtgcgctgctcggcgccaagctcggattgattcgggatccgaggtgatcgtgggagtcaacaagtaccaactggagaaggaggacgcagtggaagttctggcaatcgacaacacttcagtccgcaaccgacaaattgagaagctcaagaaaatcaaatcctcacgggaccaggcgctggccgagagatgcctggccgcactcaccgaatgcgcagctagcggagatggaaacatcctcgccctcgcggtggacgccagtcgcgcgcgttgcaccgtgggagaaatcaccgatgctctgaagaaggtgtttggagaacataaggccaatgacaggatggtgtcaggggcgtaccgccaggagtttggagaatcgaaagagatcacctccgcgatcaagagggtccacaagttcatggagcgcgagggcagaaggccgaggctgctcgtcgctaagatgggacaagacggccatgaccggggcgcaaaggtcatcgctaccggattcgcggacctcggatttgacgtggatattggtcctctcttccagacgccgcgcgaggtcgcccaacaggcggtggatgcagatgtgcacgccgtcggaatctccacgctcgccgctggccataagaccctggtcccagagctgatcaaggaactgaacagtctggggcgccctgatatcctcgtgatgtgcggaggagtgattccacctcaggattacgaatttctgttcgaggtgggagtctcaaacgtgttcggaccgggaaccagaatcccgaaggcagctgtccaggtgttggatgatatcgaaaagtgtttggaaaagaagcagcaatccgtc

SEQ ID NO: 5645 - DNA, 2250 bp, Artificial Sequence
  derived and/or modified sequence
atgttacgagcgaaaaatcaactatttctattatcgccgcattatttacgtcaagttaaagaatcgtcgggttcgcgattaatacaacaacgtttactacatcaacaacaaccgctacatccggaatgggcggcgctagcgaaaaaacaattaaaaggtaaaaatccggaagatttaatatggcatacgccggaaggtatatcgataaaaccgctatattcgaaacgagatacgatggatttaccggaagaactaccgggtgttaaaccgtttacgcgtggtccgtatccgacgatgtatacgtttcgaccgtggacgatacgacaatatgcgggtttttcgacggtagaagaatcgaataaattttataaagataatataaaagcgggtcaacaaggtctatcggtagcgtttgatttagcgacgcatcgaggttatgattcggataatccgcgagtacgaggtgatgttggtatggcgggtgtagcgatagatacggtagaagatacgaaaatactatttgatggtataccgttagaaaaaatgtcggtatcgatgacgatgaatggtgcggttataccggtattagcgaattttatagtaacgggtgaagaacaaggtgtaccgaaagaaaaactaacgggtacgatacaaaatgatatattaaaagaatttatggttcgaaatacgtatatatttccgccggaaccgtcgatgaaaataatagcggatatatttgaatatacggcgaaacatatgccgaaatttaattcgatatcgatatcgggttatcatatgcaagaagcgggtgcggatgcgatattagaactagcgtatacgttagcggatggtttagaatattcgcgaacgggtctacaagcgggtttaacgatagatgaatttgcgccgcgattatcgtttttttggggtataggtatgaatttttatatggaaatagcgaaaatgcgtgcgggtcgtcgtttatgggcgcatctaatagaaaaaatgtttcaaccgaaaaattcgaaatcgttactactacgtgcgcattgtcaaacgtcgggttggtcgctaacggaacaagatccgtataataatatagttcgaacggcgatagaagcgatggcggcggtatttggtggtacgcaatcgctacatacgaattcgtttgatgaagcgctaggtttaccgacggtaaaatcggcgcgtatagcgcgaaatacgcaaataataatacaagaagaatcgggtataccgaaagttgcggatccgtggggtggttcgtatatgatggaatgtctaacgaatgatgtttatgatgcggcgctaaaactaataaatgaaatagaagaaatgggtggtatggcgaaagcggttgcggaaggtataccgaaattacgtatagaagaatgtgcggcgcgtcgtcaagcgcgaatagattcgggttcggaagtaatagtaggtgtaaataaatatcaactagaaaaagaagatgcggtagaagtattagcgatagataatacgtcggtacgtaatcgtcaaatagaaaaattaaaaaaaataaaatcgtcgcgagatcaagcgttagcggaacgttgtctagcggcgttaacggaatgtgcggcgtcgggtgatggtaatatactagcgttagcggttgatgcgtcgcgtgcgcgttgtacggttggtgaaataacggatgcgttaaaaaaagtttttggtgaacataaagcgaatgatcgtatggtttcgggtgcgtatcgacaagaatttggtgaatcgaaagaaataacgtcggcgataaaacgagttcataaatttatggaacgagaaggtcgacgaccgcgtctactagtagcgaaaatgggtcaagatggtcatgatcgtggtgcgaaagttatagcgacgggttttgcggatttaggttttgatgtagatataggtccgttatttcaaacgccgcgtgaagttgcgcaacaagcggtagatgcggatgtacatgcggtaggtatatcgacgttagcggcgggtcataaaacgttagttccggaattaataaaagaactaaattcgttaggtcgtccggatatattagttatgtgtggtggtgttataccgccgcaagattatgaatttctatttgaagtaggtgtttcgaatgtatttggtccgggtacgcgtataccgaaagcggcggttcaagtattagatgatatagaaaaatgtttagaaaaaaaacaacaatcggta

SEQ ID NO: 5646 - DNA, 2250 bp, Artificial Sequence
  derived and/or modified sequence
atgctgagggccaagaatcaactgtttcttctaagccctcactatcttaggcaggtgaaagaaagctctggaagccgattaatccaacaaagattgctgcaccagcagcaaccactgcacccagaatgggcggccctggctaaaaagcagcttaaaggcaagaatcctgaagatctcatctggcatacacccgagggtatcagcatcaagcctctctacagcaaaagggacacaatggatcttcccgaagaactgcccggggtcaagcctttcacccgcggcccctaccccaccatgtacactttccgaccatggacaattaggcagtatgccggctttagcactgtggaggaatcaaacaagttttacaaagacaacatcaaagcaggccaacaaggactctccgtcgccttcgaccttgcaactcatcggggatacgatagcgataatccgcgcgtcagaggcgatgtgggcatggcaggcgtggcaatcgacaccgtggaggataccaagatcctcttcgatggcatacctcttgaaaagatgtcagtatcaatgaccatgaatggggcagtaattcccgtgcttgccaacttcatcgttaccggcgaggaacagggggtcccaaaagagaagctcactggcaccattcagaatgacattttaaaggaatttatggtgaggaacacttacatattcccccccgagccaagtatgaaaattatcgccgacatcttcgagtatactgctaaacatatgcccaaattcaacagcatcagtatctcggggtatcatatgcaggaggcgggggctgacgctatcttggagctcgcatataccttagcggacggactcgagtactctaggacaggactgcaggctggtctcactatcgacgaatttgcaccccgccttagtttcttctggggaatcggaatgaacttctatatggagatagccaaaatgagggcaggtagacgcctctgggcccatcttatcgaaaagatgtttcaaccaaaaaactctaagtcactgctcttaagagcccactgccagacatcaggatggtccctgaccgagcaggatccttataataatatcgtcaggaccgctatagaagctatggctgcggttttcggcggaactcagagcttgcatactaacagctttgatgaagcacttggtcttccaacagttaagagcgcgcgcatcgcgaggaacacacagatcattatccaggaggaatccggaattcctaaagttgctgacccttggggtggctcttatatgatggagtgcctgactaatgatgtctacgatgctgctctgaaattgatcaatgagatcgaagaaatgggaggcatggcaaaggcggtagcggagggaattccaaagctcaggatcgaagaatgcgcagcgaggcgccaggccagaatcgatagcggcagcgaggtcatcgtcggtgttaacaaataccagcttgagaaggaggacgctgttgaggtgctggctattgacaatactagtgtgcgcaaccgccagatcgagaaacttaagaagatcaagtcctctcgcgatcaagccctggccgaaaggtgcctcgctgcactgaccgagtgcgctgccagtggagacggcaatattcttgctcttgcagtagatgctagcagagcacgatgcactgtgggtgaaattaccgacgcgctgaagaaagtattcggcgagcataaggcaaacgacaggatggtgagcggagcctaccggcaagaatttggagagagtaaggagatcaccagcgcaataaagcgtgtacacaaatttatggaacgtgaggggagacggcccagacttctggtggctaaaatgggccaggatggccacgatagaggggccaaggtcatcgctaccggttttgccgacctcggcttcgatgtggatataggacctctgttccagacaccaagagaagtggctcagcaagctgttgacgcagatgtgcatgccgtaggcatctctactctcgcagccgggcataaaaccctcgtcccagagctcattaaagaactgaactcactgggtaggccagatatactcgtcatgtgcgggggagtgatcccaccccaagactatgagtttctctttgaggtgggtgtatccaatgttttcggtcctgggacaagaatccccaaagctgccgtccaggttttagacgacattgagaagtgtcttgaaaagaaacaacaatctgtg

SEQ ID NO: 5647 - DNA, 2250 bp, Artificial Sequence
  derived and/or modified sequence
atgcttagagctaagaatcaattatttttattatctccacattatttacgacaagttaaggaatcatctgggtcaagattaattcaacaaagattattacaccaacaacaaccattacatccagaatgggcagcattagccaaaaaacaacttaaaggaaaaaatccagaagatttaatatggcatacaccagaaggaatttcaattaaaccattatattctaaaagagatactatggatcttccagaagaattacctggagtaaaaccattcactagaggtccatatcctactatgtatactttcagaccttggacaattagacaatatgcaggattttcaactgtagaggaatcaaataaattctataaagataatataaaagcaggacaacaaggactaagtgttgcattcgacttagctacacatagaggatatgatagtgataatccaagagttagaggtgacgttggtatggcaggagtagcaattgatactgttgaagatactaaaatattatttgatggaatacctcttgaaaaaatgtctgtttcaatgactatgaatggagctgttattccagttttagctaatttcattgttacaggtgaagaacaaggagttccaaaggaaaagcttactggaactattcagaatgatattttaaaggagtttatggttagaaatacctatatatttccacctgaaccatcaatgaaaattattgccgatatttttgaatatactgctaagcatatgccaaaattcaattctatttcaattagtggatatcatatgcaagaagctggagctgatgctattcttgaattagcatacacactcgctgatggacttgaatattcaagaaccggtttacaagcaggattaacaattgatgaatttgcaccaagattgtcttttttctggggaattggaatgaatttttatatggaaattgcaaaaatgagagcaggacgtcgattgtgggctcatttaattgaaaaaatgttccaaccaaagaattctaaatctcttcttttaagagctcattgccaaacatcaggatggtctttaactgaacaagatccatataataacattgtaagaacagctatagaagctatggcagcagtatttggaggtacacaatctcttcatacaaattcttttgatgaagcattgggattacctaccgtaaaatcagcaagaattgctagaaatactcagattattattcaagaagaatcaggaattccaaaagttgctgatccatggggaggatcttatatgatggaatgtttaacaaatgatgtttatgatgcagctcttaaacttattaacgaaattgaagaaatgggaggtatggcaaaggctgtggcagaaggaattcctaaacttagaattgaagaatgtgcagccagaagacaagcaagaatcgatagtggatcagaagtaattgttggagttaacaaatatcaattagaaaaggaagatgctgtagaagtattagcaattgataatacaagtgtaagaaatagacaaattgagaagttaaaaaaaattaagtcatcaagagatcaagccttagctgaaagatgtctagcagcattaactgaatgtgccgcatcaggagatgggaatatccttgctttagcagttgatgcttcacgtgctagatgtactgtaggtgaaattacagatgctcttaaaaaagtatttggggaacataaagctaatgatagaatggtttcaggagcttatcgtcaagaattcggagaaagtaaagaaattacaagtgccattaaaagagttcataaatttatggaaagagaaggaagaagaccaagacttttagttgctaaaatgggacaagatggtcatgatagaggagcaaaagtaattgcaacaggtttcgctgatttaggatttgatgtagatattggacctctttttcaaacaccaagagaagtagctcaacaggctgtagatgctgatgtacatgcagttggtatttcaactttagctgctggacacaaaactcttgttccagaattaattaaggaattaaattcattaggaagacctgatattttagtgatgtgtggtggagtcattccaccacaggattatgaattcttattcgaagtaggagtatcaaatgtttttggacctggaacaagaattccaaaggcagccgtacaagttttagatgatatagaaaaatgtcttgaaaaaaaacaacagtcagtt

SEQ ID NO: 5648 - DNA, 2250 bp, Artificial Sequence
  derived and/or modified sequence
atgttgagagctaaaaatcagttgtttctattaagccctcactaccttcgccaggtgaaggaatcctcaggcagcagactaattcagcaacgactactgcatcagcagcagccacttcatccagagtgggctgccctagccaagaagcaattaaaagggaagaaccccgaggacctgatttggcatactccagaggggatctccattaagccgctgtattccaagcgagacactatggacctcccggaggagctcccaggagtgaagccatttacccgaggcccataccccactatgtacacatttaggccttggactatccgtcagtacgccgggttctccacagtcgaggaatctaacaagttttataaggataacattaaagcgggccagcagggtctgagtgttgctttcgatctggcaacccacagggggtatgacagcgacaatccgagagtgaggggagacgtaggcatggctggcgttgccattgacaccgtcgaggacactaaaatcctgttcgacgggatccccctggagaagatgagcgtgtccatgaccatgaatggagcggttattcctgtattggccaactttatcgttactggcgaggaacaaggcgtgcctaaagaaaagctaacaggcacaattcagaacgatattttgaaggagttcatggtcagaaatacttacatcttccctcctgagcctagcatgaagatcattgccgacatatttgaatatacggcaaagcatatgccaaaatttaactccataagtattagtggatatcacatgcaggaggctggggcagatgctattctagaattagcctatactttggcagacggcctggagtactcacgcacagggctgcaagccggactgaccattgatgagtttgcccccaggttgagttttttttgggggatcggtatgaacttctatatggaaattgcgaagatgcgtgccgggcgacgcttgtgggcccacttaatcgaaaaaatgtttcagcccaagaattctaagagtctgctgctcagagcccactgtcagacctctggctggtccctgactgaacaggatccctacaacaacattgtgagaacggctatcgaggccatggccgccgtttttggcgggacccagagtttgcacactaattcctttgatgaagccttgggtctgccaactgtcaaaagtgcgcgaatagcccgcaatacccaaatcatcattcaggaggagagcggaattcctaaggttgccgacccttggggtggtagctacatgatggaatgtctgaccaacgatgtgtatgacgctgcccttaagctgatcaacgaaattgaagaaatgggcggaatggctaaggctgtcgcagagggcatcccaaagctccgtatagaggaatgtgctgccaggcggcaggcccggatagatagcggaagtgaggtgatcgtgggggtgaataagtaccaattagagaaggaagacgcagtggaggtacttgctattgacaataccagtgtcaggaacaggcagattgaaaaactgaaaaaaattaaatccagtagggatcaggctctagccgaacgctgcctggccgcactgaccgaatgcgcagcctcaggggacggaaatatccttgccctagccgtcgacgcctcaagggccaggtgtacagtcggcgagatcacggatgctttgaagaaagtattcggagagcacaaggcaaacgacagaatggtgtcgggcgcttatagacaagaatttggagaaagtaaagagattacttcagcaattaagcgggtccacaaatttatggagcgggaagggcgaaggccccgccttcttgtggctaaaatgggccaagacgggcacgaccgcggcgcaaaagtgattgccactggattcgccgatctgggctttgatgtggatatcggacctctgtttcagactcctagagaagtcgcacagcaggccgtcgatgcagacgtgcatgctgtcggaatcagcacactggctgcaggacataagaccctggtgccagaactgattaaggagctgaattccctggggcgcccagacatcctcgtaatgtgcggtggggtgatcccgccccaggattatgagttcttgttcgaagtaggcgtctcaaatgtcttcgggcctgggacgcggattcccaaagcagccgtgcaggtcctggacgacatcgagaagtgtctcgaaaaaaagcagcagagcgta

SEQ ID NO: 5649 - DNA, 2250 bp, Artificial Sequence
  derived and/or modified sequence
atgttgcgtgcaaaaaaccaactttttctcctctcccctcattatctgaggcaggtgaaggaatcgtccggatcccgacttattcagcaaaggctgcttcaccagcagcagccccttcaccctgaatgggcagctcttgcaaagaagcaactgaagggcaaaaacccagaggacctgatatggcacacccccgaaggaatctctattaagccgctgtacagcaagcgagatactatggatctcccagaggaactgccgggggtgaagcctttcacccgcgggccttaccctaccatgtacacttttaggccctggaccatacgtcaatatgctgggttcagcaccgtggaggaatccaataagttttacaaggataacattaaagcaggacagcaaggtctttctgttgcatttgatctggccactcacagaggttacgattcggacaatcctcgggtcaggggcgacgtgggaatggcaggtgtggcaatcgataccgtggaagatactaaaatcctttttgatggcataccccttgaaaagatgtccgtgtccatgactatgaatggagccgtcattcctgtgctggcaaactttatagtgactggtgaagagcaaggagtgcctaaggagaagctgaccggtactattcaaaatgacatccttaaggagttcatggtgcgcaacacctacatctttccaccagaaccctccatgaagattatcgcagacattttcgaatacactgccaaacatatgcccaagttcaactccatttcgattagcggataccatatgcaagaagcaggcgcggatgcaattctggagctggcatacactctcgccgatggtcttgaatactcaaggaccggcctccaagccggactgactatcgatgaatttgctccacgtctctcatttttctggggtattgggatgaacttttacatggaaattgcaaaaatgcgggcgggtcggaggctttgggcacatctcatcgagaagatgtttcagccaaagaattcgaagtcgctcctgctgagagcacattgtcaaacttcgggatggtcgctgaccgaacaggatccctacaataacattgtgcgcaccgcaattgaagcaatggcagcggtgtttggaggtacccaatccctccatactaattctttcgatgaagcactgggactgcccactgtcaaatccgcacgcatcgcccggaacacccaaatcatcatacaggaggagtccggaatccctaaggtggccgatccttggggaggatcatacatgatggagtgccttacgaatgacgtttacgacgccgcacttaagctcattaacgagattgaggagatgggagggatggctaaggcagtggcagaaggcattcctaagctccggatagaggagtgtgccgcccgtcgtcaagcgaggatcgactccggatcggaagtgatcgtcggagtgaacaagtaccaacttgagaaagaagatgcggtggaagtgcttgcaattgacaacacttccgtccgaaatagacagatcgaaaagttgaaaaagattaagtcatccagagatcaagcattggcagaacggtgtctggcggcgctgactgaatgtgcagctagcggcgatggtaacatcctggcgctggctgtggacgcatcgagagctcggtgtaccgtcggagaaattactgatgcactgaaaaaagtgttcggagagcacaaagccaacgatcgaatggtgtctggtgcctacagacaagagttcggagagtccaaggagattacctcggccattaagcgagtgcataagtttatggagagggaaggacgccgaccacgactccttgtcgccaagatgggtcaggatgggcatgatcgcggtgccaaagtcatcgcaactggttttgcagatctgggctttgatgtggatatcggcccactgttccagacgccccgtgaagtggcccagcaagcagtggatgcagatgtccacgcagtggggatttcaacccttgcggcgggacataaaacccttgtgcccgaactgattaaggaactgaatagccttggccggccagacattcttgtgatgtgcggaggggtgattccacctcaagactacgaattcctgtttgaagtcggagttagcaacgtgttcggccctggcacccgcatccctaaagctgcagttcaagttctcgatgatatcgagaaatgtctcgaaaagaagcagcaaagcgtg

SEQ ID NO: 5650 - DNA, 2250 bp, Artificial Sequence
  derived and/or modified sequence
atgctgcgcgctaagaaccagcttttcttactttccccccattacctgcgtcaggtgaaagaaagcagcggcagcaggctgatccagcaacgattgctacaccagcaacagccccttcatcctgaatgggccgctctggcaaaaaagcagctgaagggcaaaaatccagaggacctgatctggcacacacccgaagggatcagcatcaagcccttatactcaaaacgcgacacaatggatttgccggaagaattacccggtgtgaaaccttttacacggggcccctatcccaccatgtatacgtttaggccctggacgatacgacaatacgcaggtttctcaactgtcgaagaaagcaataagttttacaaagacaacattaaagccggacagcagggacttagcgtcgctttcgatctagccacacaccggggatacgacagcgataaccctcgggtccgcggcgacgttggaatggccggcgtcgccattgataccgtggaggacaccaagatattattcgacggcatcccgctcgagaaaatgagcgtttccatgacaatgaatggggccgtgattccagtactcgcaaacttcattgttacgggtgaggagcagggcgtacccaaggaaaaactgaccgggaccattcagaacgacatcctaaaggagtttatggtgcgcaatacatacatatttcctccggagccctccatgaagattatagcagatatctttgagtacaccgcgaaacacatgcccaagttcaactcaattagcatttctgggtaccatatgcaagaggccggggctgatgccattctggagctggcatatactttagctgacggcctggaatattctaggaccggcctccaagccggcctaacaatcgacgaattcgccccacgcttgagtttcttttggggcatcgggatgaacttctacatggaaatagctaaaatgcgggctggaagacggctgtgggcccaccttatagagaagatgtttcaacctaaaaacagcaagtctttactgctgagggcgcactgtcagacctccggatggagtctgacagagcaggacccctataataatatcgtccggactgcgattgaagccatggccgccgtatttggaggcactcaaagcctccacacaaattcctttgacgaggcactcgggctgcccactgtgaagtccgctagaatagcacgaaacacccagattataatccaggaggagagcggcatcccgaaggtagccgatccctggggaggttcatacatgatggagtgtctgactaacgacgtatacgatgcagcactgaagttgataaacgagattgaggagatgggagggatggccaaggcggtggcagagggtatacctaagctgcgaattgaggagtgtgccgcccgaagacaggcacggattgatagcgggtccgaagttattgtaggggtgaacaaataccagctcgaaaaggaggacgccgtcgaggtgctggctattgataatacaagtgtgcgcaatagacagattgagaaattaaaaaagatcaagagcagcagggaccaggcactggcagaaagatgcctcgccgcactcactgagtgtgcggcgagtggagatggtaatatactggcgctcgccgtggacgcttcacgagcccggtgtacagtgggcgagatcaccgacgctctgaagaaagtgttcggtgaacacaaagccaatgatcgcatggtctccggagcatacaggcaagaattcggagagagcaaggagatcacctcagcaatcaaacgggttcataaatttatggagagagagggacgccgtcctagattacttgttgccaaaatgggccaggacggacacgacagaggcgctaaggtgatcgccacagggtttgcagatctgggctttgacgtcgacattggacctctattccaaacgccgagggaggtggcccagcaggcagtggatgctgacgtgcacgctgttggcatcagtactttggccgcaggacacaagacactggtgcccgaactaatcaaggaactcaattctttgggcaggcccgacatcctagtcatgtgcggtggagtcatcccaccccaggactacgagttcctgttcgaagtgggggtctctaacgtttttggtccgggcacacgtattcccaaggcggctgtccaggtgctggatgatattgaaaagtgcctcgagaaaaagcagcagtcagtt

SEQ ID NO: 5651 - DNA, 2250 bp, Artificial Sequence
  derived and/or modified sequence
atgttgcgagccaagaaccaactctttctgttgtctccccactatctaagacaggtgaaagagtcttccggcagcaggctaattcagcaaaggctgcttcaccagcagcagccactgcaccccgaatgggcggccctagctaagaagcagctcaaaggtaaaaacccagaggatctgatttggcacactccagaagggattagcatcaagccgctctactccaaacgtgatacaatggacctgcctgaggaactgcctggtgttaagccctttacacgtggcccatatcctaccatgtacaccttcaggccctggacgattcgtcagtatgctgggttcagtacagtggaagaaagcaacaagttctataaagacaacatcaaggctggacagcagggactgtcagtcgcctttgatttggccacacacagggggtatgattctgataacccccgggtacgaggagacgtgggtatggctggggtagcgatcgacaccgtggaagataccaagatcctttttgacgggattcccttggagaagatgtccgtctccatgaccatgaatggagcggtaattcctgtcttagctaactttatcgtgactggtgaggagcagggagttcctaaggagaagttgaccggcacaatacagaacgacatcctgaaagaattcatggtcaggaacacatacatcttcccacctgaacccagcatgaagatcatagcggacatttttgagtacacagccaagcatatgcccaagttcaattccatctcgatctctggctaccatatgcaggaggctggcgccgacgccatactggagctggcttatacactggccgacgggttagagtattcacggacgggcctgcaggccggcttaaccattgatgaattcgcaccacgcttgtcgtttttttggggtatcggaatgaatttctatatggagatagccaaaatgcgggcgggaaggaggttgtgggcccacctgattgagaaaatgttccagcccaagaatagcaagtctttgctactgcgagcacactgccaaaccagtgggtggtcgctgacagagcaggatccctataacaatatagtgagaaccgctattgaagccatggccgccgtcttcgggggaacgcagagtctgcacacaaattcctttgacgaagccctgggcctgcctacggtcaagtccgctcgaatcgcccggaacactcaaatcatcattcaggaagagagtggaatcccaaaagtcgccgacccatggggaggttcttacatgatggaatgtttgaccaatgatgtgtatgatgcagccttgaaactaattaatgagatcgaggaaatgggaggcatggcaaaggccgtagcagaaggcattcctaaacttcgtatagaggagtgtgccgctagaaggcaggcgcgcatagattccgggagcgaggttattgtgggcgtcaacaagtatcagctggagaaggaggatgccgtggaagttctggcgattgacaatacaagtgtcagaaataggcagatcgagaagctgaaaaaaatcaagtctagtagggaccaggccctcgctgaacggtgcttggctgcactcacagaatgcgccgcctccggtgacggcaacatcctggcactggccgtagacgcgtcacgagctagatgtactgtaggggagataaccgatgcgctcaagaaagtcttcggagagcacaaggcaaacgatcggatggtaagcggggcctataggcaggagtttggcgaatccaaggagattacgagcgctattaagagagtgcacaaattcatggagcgcgagggccggaggccccggcttttggtggccaaaatgggacaagacgggcacgacaggggggcaaaggtcatcgcgacaggtttcgccgacttaggctttgatgttgatataggacccctatttcaaacaccgagggaggtcgctcagcaggcggtggatgctgacgtgcacgcagtgggcatctcaaccttagccgccggacacaagactcttgtccctgaactgataaaagaactaaactcacttggccgaccagatatcctggtcatgtgcgggggtgtaatcccaccacaggactacgagttcttgttcgaggtgggcgttagtaatgtatttggcccaggcacacggatccctaaagccgcagttcaggtgttggatgacatcgaaaagtgcttggaaaaaaaacagcagagtgtg

SEQ ID NO: 5652 - DNA, 2250 bp, Artificial Sequence
  derived and/or modified sequence
atgctgcgggcaaagaaccagctgtttctgctgtcacctcactacttgagacaagtgaaggaatcctcgggcagcagactgattcagcagcggttgcttcaccaacaacagccactgcatcctgaatgggcagctctggcaaaaaagcagctgaaaggaaagaaccctgaagatctcatctggcatactccagaagggatctccatcaaaccgctgtactcgaagcgggacaccatggatttgcccgaggagttgccaggagtcaaaccattcaccaggggtccctacccaaccatgtacaccttcagaccatggactatcaggcaatacgccggattctcaacggtggaggagagcaataagttctacaaggataacattaaggcaggacaacagggtctttcggttgcgtttgatctcgcaactcaccggggctacgactccgataatccgcgcgtcaggggagacgtgggcatggccggagtcgcgatcgatactgtggaggataccaaaatacttttcgatggaatccctcttgagaagatgtcagtgtccatgaccatgaacggagcagtcattcctgtgctggcaaactttattgtgactggtgaagaacagggtgttccaaaggagaaacttacgggcactattcaaaacgacatacttaaggaattcatggtgagaaacacctacatttttccccccgagccttccatgaagattattgcagacatattcgaatacaccgcgaagcacatgccgaagtttaactcgatttcgatttcgggctaccacatgcaagaagcaggtgcagatgcgattcttgaattggcatacaccctggcagatggacttgagtactcgcggacggggctgcaagcagggcttactatcgacgaatttgccccccggctctcattcttttggggcattggaatgaacttctacatggaaattgcaaagatgcgggcgggcaggcggctttgggcgcaccttatcgaaaagatgttccagcctaagaatagcaagtcactgctcctccgggcacattgtcaaacgagcggttggagccttactgagcaagatccttacaacaatattgtccgaactgcgattgaagcgatggcagcggtgttcggagggacgcagagcctgcacaccaacagctttgatgaagcgctgggacttccaaccgtgaagtctgcacgtatcgctcgcaacacccaaatcatcatacaggaagagtccggtattccaaaggtcgcagatccttggggagggagctacatgatggaatgtcttaccaatgatgtctacgatgcagccctgaaactcattaacgaaattgaagaaatgggcggaatggccaaggccgtcgccgaaggaatcccgaaactccgcatagaggaatgcgctgcacgcagacaagcacgcattgactcaggttccgaggtcattgtgggtgtgaataagtaccaacttgaaaaggaagatgctgtggaagtgcttgcaattgacaacacgtcggtccgaaatagacaaatcgagaaactcaagaaaatcaagtcgtccagggaccaggcgctcgcagaaagatgcctggccgccctgaccgaatgtgcggcatccggagatggcaacattcttgcactggcagtggatgcttcgagagcacgctgcactgtgggtgaaatcaccgatgcacttaagaaagtctttggagaacacaaagcaaatgatagaatggtcagtggtgcctacagacaagagttcggtgaaagcaaagaaattacctcagcaattaagagagtccacaagttcatggagagagagggacgccgacctcgccttctggtcgcaaaaatgggacaggatggtcatgatagaggcgcaaaggttatcgcaactggcttcgcggatttggggtttgacgtggatattggtccactttttcaaaccccacgggaagtggcccaacaggcagtcgatgcagatgtgcatgcagtgggcatctcaacccttgctgctggacataagactctggtcccagaactcatcaaagagcttaactcgcttggcagacccgatattcttgtgatgtgcggaggcgtgattccaccccaagactacgaatttcttttcgaagtgggtgtcagcaacgtctttggtccgggtaccagaattcctaaagcagccgtgcaggtcttggacgacatcgaaaaatgccttgagaaaaagcagcaatctgtc

SEQ ID NO: 5653 - DNA, 2250 bp, Artificial Sequence
  derived and/or modified sequence
atgttgagggccaagaaccagttgttcctgttgtcacctcattacctgcggcaggtgaaagaatcctcgggaagccggcttattcaacagaggcttctgcatcaacaacagcccctgcatccagagtgggcagccctggccaaaaaacaactcaaagggaaaaaccccgaagatctgatctggcacacccctgaaggaatatctattaagccattgtactcaaaaagagacaccatggatcttcctgaagaactcccaggagtgaagccatttacccgaggcccctatccaaccatgtatacctttcgcccttggaccataagacagtacgcaggtttttcaactgtcgaggagtcgaacaagttttacaaggataacattaaggcgggtcaacaaggactctcagtggcatttgatcttgctacccatagaggttacgattcagacaaccctagagtgaggggagatgtgggaatggcaggagtagcgatcgacactgttgaggataccaagattctcttcgatggaatccccctcgagaagatgtccgtgagcatgactatgaacggtgcggtgattcctgtcctcgcaaactttatcgtgacgggagaagaacaaggggtcccaaaggaaaaacttactgggacgattcagaacgacatcctcaaagagtttatggtccgcaacacttacattttcccacctgaaccttccatgaagattatagcagatatctttgaatacaccgcgaagcacatgccgaagtttaacagcattagcatatcgggataccacatgcaggaagccggagcagacgcgattcttgaactggcatacacccttgccgatggcctggagtactcaagaactgggcttcaggctggtctgaccatcgatgaattcgcaccgcgactgtcctttttctggggaatcggtatgaatttctacatggaaattgcaaaaatgcgcgccggacggcgactttgggcgcatcttattgagaagatgtttcagccaaagaactccaagtcgctgctcctgcgtgcacattgtcagacctcagggtggtcccttaccgaacaagatccttacaacaatattgtgcgcactgccatcgaagcaatggcagctgtgttcggaggaacccagagcctgcataccaattcttttgatgaagccctgggtttgccgaccgtcaagtcggcccgcattgcacggaacactcaaatcatcatacaagaggagtcgggtattcctaaggtggcagatccttggggagggtcctacatgatggagtgtcttactaatgatgtgtacgacgcagctctgaagctcattaacgaaatcgaggagatgggaggaatggccaaggccgtcgcagagggtatccccaaacttaggatcgaagaatgtgcagcaagacgacaagcacgaatagactccgggtcggaagtgatcgttggagtgaataagtatcaactcgaaaaagaggacgcagtggaagtgctggccattgacaatacttctgtgaggaacagacaaatcgaaaaacttaagaagattaagtcgtccagagatcaagcgctcgccgaaaggtgtctggccgcacttaccgaatgcgcagcgtcgggcgacggaaacatactggcactcgccgtggacgcctcaagagcaaggtgcactgtcggtgagattaccgatgccctgaagaaggtctttggtgagcacaaggcaaacgatagaatggtcagcggagcataccgacaagagtttggggaatcaaaagaaatcacttcggcaatcaaacgcgtccataagtttatggaaagggaagggcggcgcccacggctccttgtcgcaaagatggggcaggacggccatgaccgaggcgcgaaggtgatcgcgaccggatttgcggacctggggtttgatgtcgatatcggaccgctttttcaaaccccgagggaggtcgcccaacaagcagtggatgcggacgtccatgcagtgggcatttcaacccttgcagcgggacataagacgctggtgccggaactgataaaggagcttaattccttgggacgccccgacattcttgtcatgtgtgggggcgtcatcccaccacaagattacgagttcctgtttgaggtgggtgtgtccaacgtgtttggccccggaacccgcatccccaaggcagcggtgcaagtcctcgatgatatcgagaagtgcttggagaagaagcaacagtcggtg

SEQ ID NO: 5654 - DNA, 2250 bp, Artificial Sequence
  derived and/or modified sequence
atgctgcgcgcaaaaaaccagctgttcctgctctcaccacactacctcagacaggtcaaggagtccagcgggagccggttgatacagcagcgccttttgcaccagcagcagccgctccaccctgagtgggctgctctggccaaaaagcagctgaaaggcaagaaccccgaggatctgatttggcatacgccagaaggaatcagcataaaacccctttactccaaacgcgacaccatggacctgccggaggagttgcctggcgtaaagccattcaccagaggcccttaccccaccatgtacactttcagaccctggaccatccggcaatacgccggattctctacagtagaggagtccaataagttctataaggacaatatcaaggctggacagcagggcttgtccgtggcatttgacctcgcaacccaccggggatacgacagtgacaaccctcgagtgaggggagatgtgggaatggcaggggtggcaattgatacagtggaggacacgaagatcctgtttgatggaattcctctggagaagatgtccgtcagcatgaccatgaacggagcggtcatcccagttttggctaacttcatcgtgacaggcgaagaacagggggtgccgaaagagaagctgacgggcaccattcagaatgatatcctcaaggagtttatggtgagaaatacttacattttcccaccagagccctcaatgaagatcatcgccgacatatttgagtataccgctaagcacatgcctaaattcaactctatttcaatctcaggataccatatgcaggaggcaggggcagacgctattctcgaactggcatacactctggccgacggcctcgaatacagcagaactgggctgcaggcaggattgacgatcgatgaattcgcccctcggctctccttcttttggggcattggtatgaacttttacatggaaatcgcgaagatgagagctggccgccgcctctgggcgcatcttattgagaagatgttccagcctaagaatagcaagagcctgttgctgcgcgcccattgccagacctctggatggagtctgactgagcaagacccctacaataatattgtacgcactgctattgaagctatggcagcagtctttggcgggacacagagcctccacaccaatagtttcgatgaggccctgggcctgcctactgtcaagagtgccagaatcgcccgaaatacccagatcatcattcaggaagaatctggtattccgaaggtggcagacccctggggaggatcctacatgatggaatgcttgactaacgacgtatacgacgccgccctgaaactgatcaacgaaatcgaggaaatgggtggtatggcaaaagccgtggccgaggggatacccaagttgagaattgaggagtgcgcagccagaaggcaagcccgaatcgacagcggaagcgaggtcatcgtcggagtgaataagtaccagttggagaaggaggatgcagtggaagtacttgctatcgataacacctcagttcgcaaccggcaaattgagaagctcaagaagataaaatcatctcgggatcaggccctggctgagaggtgtctggccgccctgacagaatgtgctgcgtcaggcgacggcaatattctggctctggctgtggacgctagccgcgctagatgcacagtgggtgagatcactgatgccctcaagaaagttttcggcgagcataaggctaacgaccgcatggtcagtggtgcttataggcaggagtttggtgagtccaaggaaattacatctgcaataaaaagggttcacaaatttatggaacgcgaagggcgacggcctcgacttctggtggccaagatggggcaggacggacatgataggggcgcgaaggttatcgctacgggcttcgcagacctgggatttgacgtggacatcgggcccctgtttcagacaccccgggaggtagcacaacaggcagtcgacgctgacgtacacgccgtcggcatctcaaccctggccgcaggtcataagacgctcgttcctgaactgatcaaggagcttaatagcttgggaaggcctgacatactcgtgatgtgtggaggggtcatacctccccaggattacgaattcttgtttgaggtcggcgtatccaacgtgttcggccccggcacccggatacccaaggccgctgtacaggttcttgacgatattgagaaatgcctggagaagaagcagcagtctgta

SEQ ID NO: 5655 - DNA, 2250 bp, Artificial Sequence
  derived and/or modified sequence
atgttgagagctaaaaaccagctcttccttctttccccgcattacctgagacaggtgaaagagtcaagtggctcacgcctcatccagcagcgcctgctccaccaacagcagccacttcaccccgagtgggccgccctggccaaaaagcaacttaaaggaaagaaccctgaagatttgatctggcacacacccgagggcataagtattaaaccactttatagcaaaagggacacaatggacctgcctgaggagcttcccggcgtgaagccattcactagaggtccctatcctaccatgtacaccttcagaccctggacgatcagacagtacgcaggcttttcaactgttgaagagtctaacaagttctataaggataacatcaaagccggccagcaaggtctttccgtggcattcgatctggcaactcaccgcggctatgattccgataaccccagggtgcgcggcgacgtaggaatggccggagtggcaattgacacagtcgaggacaccaaaatactgtttgacggcatcccactggagaagatgtcagtgagcatgacgatgaatggagccgtgattcccgtactggccaacttcattgttacaggagaggagcagggcgtccccaaagagaagctgaccggcactatccagaacgacatcctcaaggagtttatggtgagaaatacttatatttttccgcctgagccaagtatgaagataatcgctgacatattcgagtacacagcgaagcacatgcctaagttcaattctatctcaatcagtggttaccacatgcaagaagccggagctgacgccattttggaactcgcatacacgctcgctgatggactggaatactctaggacaggtcttcaggcaggcttgacaatcgatgagttcgcaccaagactgtctttcttttggggtattggtatgaacttttacatggagatcgccaaaatgcgcgctggcagaaggttgtgggctcacctgattgagaaaatgttccagcccaagaactcaaagtctcttcttctgagagctcactgccagacaagcggctggtctctcacggagcaagacccttataacaacatcgtcaggaccgcaattgaagccatggctgctgtattcggtggcactcagagcctccacacgaactcattcgatgaggccctgggcctcccaaccgtgaagagcgctcgcatcgccagaaacacccagatcattatccaggaggagtccggtatacctaaggtggcggacccatggggcggttcctatatgatggagtgtcttacaaacgatgtttatgacgccgccctcaagctgattaacgagattgaggaaatgggaggaatggcaaaggctgtcgctgagggcatacctaagttgagaatcgaagaatgcgccgctaggaggcaggcgaggatcgactctggatcagaagtgatcgtgggcgttaataagtaccagctggagaaagaggatgccgtcgaagtgctggccattgacaacacaagcgtgaggaatcgccagatcgaaaaactgaaaaagattaaatcctctagggaccaagcccttgccgaaaggtgccttgcggccttgaccgagtgtgccgcgagtggcgacggtaacattctggccctggccgtggacgcaagtagggccagatgcactgtgggtgaaatcaccgatgctttgaagaaggttttcggagagcacaaggcaaacgatagaatggtgagcggtgcctacaggcaggaattcggtgagagcaaggagattaccagcgcgatcaaaagggtgcataaattcatggagagagagggcagaagaccgaggttgctggtggctaagatgggccaggatggacacgacagaggcgccaaagttattgccaccggctttgctgatcttggtttcgatgttgatatcggcccattgtttcaaactccaagggaggtcgcccagcaagctgtcgacgctgacgttcacgctgtcggcatcagcacattggccgccggccataagaccttggtgcccgagttgattaaagagctgaacagcctgggaaggcccgacatcttggtcatgtgcggcggtgtcataccaccgcaggactatgagttcctgttcgaagttggagtcagtaatgtgtttggaccaggtacacgcattcccaaagccgcagtccaggttctggatgatatagagaagtgtttggagaaaaaacagcagtctgtg

SEQ ID NO: 5656 - DNA, 2250 bp, Artificial Sequence
  derived and/or modified sequence
atgctgcgcgcgaaaaaccagctgttcctgttgagcccgcactacctgcggcaagtgaaggaaagctctggatcccggctcatccagcaacgcctgctgcatcaacagcagccgctgcacccggaatgggccgcactggcaaagaaacagctcaaaggtaaaaacccagaagatttgatttggcatactccagaagggattagcatcaaaccgctgtactcaaagagggacaccatggacctgccagaggaactgcctggggtgaagccattcacccgtgggccttacccgaccatgtacacctttaggccgtggactatccgacaatacgctggctttagcaccgtagaggaatcaaataagttctataaagacaacatcaaagctggacagcaaggcctcagcgtcgctttcgatctggccactcatcggggatacgactcggacaacccaagagtccgcggagatgtgggaatggcaggagtggccatcgacactgtcgaagataccaaaattctgttcgacgggatcccattggagaagatgtcagtgtccatgaccatgaacggagccgtcataccagtcctggcgaatttcatcgtgactggagaggaacaaggcgtgccgaaagaaaagctgaccgggaccatccagaatgacatcctcaaggaattcatggtgcggaatacgtacatcttccctcctgagccctcaatgaagatcattgcagatatcttcgagtacaccgcgaaacacatgccgaagttcaattcgatctcaatttccggataccatatgcaagaggctggtgctgacgccatcctggagctggcatacactctcgcggacggattggagtactcccgaaccggactgcaggctgggctgaccatcgacgaattcgccccacggctctcgttcttttggggaatcggcatgaacttctacatggaaatcgccaagatgagggcagggcggaggttgtgggcccacctgatcgaaaagatgttccagccgaagaactctaagagcctgttgctgcgcgcgcattgccagaccagcggttggtccttgactgaacaagacccttacaacaatatcgtgcgcaccgcaatcgaggccatggcggccgtctttggcggcacccaatcgctccacactaactccttcgacgaggctcttggactgccgactgtcaagtcggctcggatcgcgcggaacacccagatcatcatccaggaggaatccggtattcccaaggttgcagatccgtggggtggatcctacatgatggaatgcctgactaatgacgtctacgacgcggccttgaaactgatcaatgaaatcgaggaaatgggtggcatggcgaaagccgtggcagaagggatcccgaagttgaggatcgaggaatgcgcggcgcgcagacaggcgcgcatcgattcgggatcagaagtcatcgtgggagtgaataagtaccagctcgagaaagaggacgcagtcgaagtgctcgcaattgataacacttcggtccggaaccggcagatcgaaaaactgaagaagatcaagtcgtcgagggaccaggctctggcagagcggtgtttggcggctttgaccgagtgtgcagcgtcgggcgatggcaacatcctggcgctggctgtcgacgcctcgcgcgcccggtgcactgtgggggaaattaccgacgctctgaaaaaggttttcggtgaacacaaggcgaacgataggatggtgtcgggggcgtaccggcaagaattcggagagtcgaaggagatcactagtgcgattaagagagtgcacaagttcatggaacgggagggacggcgccctcgcctcctggtggcgaaaatgggccaggacggacatgacaggggtgcaaaagtcatcgcaaccggctttgctgacctgggattcgatgtggacatcggaccattgttccagactccgcgcgaggtggcccagcaagcggtcgatgccgacgtgcacgcggtcggaatttcaacgctcgcggccggccacaagacgctggtgcctgaattgataaaggagctgaactcactcgggcgaccggatattctcgtgatgtgcggaggagtgatcccgccccaggattacgaatttctgtttgaggtcggcgtgagcaacgtgttcggacctggaaccaggatcccaaaggccgctgtgcaggtgctcgatgacattgagaaatgccttgaaaagaagcagcaaagcgtg

SEQ ID NO: 5657 - DNA, 2250 bp, Artificial Sequence
  derived and/or modified sequence
atgctgagagcaaaaaatcagctgttcctgctttcaccccattatctgcggcaggttaaagaaagttctggaagtaggctcatccagcagcgcctgcttcatcagcagcagcctcttcatccagagtgggccgctctggccaaaaaacagctgaaagggaaaaatccagaagaccttatatggcacactccggaagggatctctataaagcctctctactccaaacgggatacaatggatttgcctgaagaacttccaggagtgaaaccctttactcgaggaccttacccaactatgtacacttttcggccttggactattagacagtacgccgggttcagtacagtggaggagtcaaacaaattctataaagataatatcaaagccggacaacaggggctatcggttgctttcgatctggcaactcaccgaggatacgacagtgataatccccgcgtgcggggagatgtaggaatggccggagtcgcaatagatacagtcgaagatacaaaaatcctctttgatgggattccactcgaaaaaatgtccgtatccatgacaatgaatggagcagttatacctgtgctcgccaatttcattgtcactggagaggaacagggggtgccaaaagaaaaactcacagggactatccagaatgacatactcaaagaatttatggtacgtaatacatatatctttccacccgagcccagtatgaaaatcattgctgacatattcgaatatactgctaaacacatgccaaagtttaattctatctcaatctcaggataccatatgcaggaagcgggggccgatgccatcctcgaactcgcttatacacttgccgatgggctagaatactctaggacagggttgcaggccgggctaactatcgacgaatttgcaccacgcctcagttttttttggggaattggaatgaatttctatatggaaattgctaaaatgagggcaggacgtagactttgggcacacctcatagaaaaaatgttccagccaaaaaactccaaatcactgctcctcagggcacattgtcagactagtgggtggtctctgactgaacaggatccctataataatatcgtacgcactgctatcgaggcaatggccgcagtgttcggaggaactcagtctctccacacaaactcatttgatgaagcccttgggctgccaactgtgaaatccgcccgcatcgcaaggaatacacagataataatccaggaagaaagtgggatacccaaagtcgctgacccatgggggggatcctatatgatggagtgcctgactaacgacgtttatgatgcagccctgaaactgatcaatgaaatcgaagaaatgggagggatggccaaggccgtagccgaagggatccccaaactgcgcatcgaagaatgtgccgcacggcgacaggctaggatagattctggatcagaagttatcgtaggagtgaacaaatatcagctagaaaaagaagatgccgtggaggtgcttgccatcgataatacttctgtcaggaataggcagatagaaaagctaaaaaaaatcaaaagtagtagggatcaggcacttgccgagaggtgtttagcagctctcactgaatgcgcagctagtggagatggaaacattctcgctctggctgtggatgcttcccgagctaggtgtacggtgggagaaatcacagatgcactcaaaaaagttttcggagagcataaagctaacgatcggatggtgtcgggggcttacaggcaggaattcggggaatccaaagaaataacttctgcaatcaagagggtccataaattcatggaaagggaagggaggagacctaggctgctggtagcgaaaatggggcaggatggacatgatcggggggccaaagtcattgcaacaggatttgcagatctgggattcgacgttgatatagggcctctctttcagactcccagggaggtggcccagcaggccgtcgatgctgatgtgcacgccgtggggatatcaacacttgctgcagggcacaaaacacttgtcccagagctcataaaggaacttaactctctcggacggcccgatatactcgtaatgtgtggaggggttataccccctcaagattacgagtttctcttcgaagtaggagtgtcaaatgtgtttgggcctgggactagaatccccaaagctgccgttcaggtgcttgatgacattgagaaatgcctggaaaaaaagcagcagtcagtg

SEQ ID NO: 5658 - DNA, 2250 bp, Artificial Sequence
  derived and/or modified sequence
atgctccgggccaaaaatcaactttttctcctgtctccccactacctgcggcaagtgaaggaaagcagcggttcacggcttatccagcagcgcctccttcatcagcagcagccgctgcacccagaatgggccgcactcgcgaagaaacaactgaagggcaagaatccagaagatctcatctggcacactccggaaggaattagtatcaagccactctactccaagcgtgacactatggatctgccggaggagctgccgggcgtcaagccgttcacccgaggaccttaccctaccatgtacaccttcagaccatggaccatacgccagtatgccggtttctccactgtcgaagaatcgaacaaattctacaaagataacatcaaagctggccagcagggcctcagcgtggcattcgatctcgcaacccacagaggatacgactccgacaatcccagagttcggggggatgtggggatggccggagtggccatcgacaccgtggaagatactaagatcctgttcgatggaattccgttggagaagatgagcgtctcaatgactatgaacggcgctgtgatccctgtcctcgccaacttcatcgtgactggagaggagcagggggtgccgaaggagaaactcaccgggaccatccagaatgatatccttaaggaattcatggtgagaaatacttatatcttcccgccggagccatcgatgaagattatcgctgacatctttgaatacacggcgaaacatatgccgaaattcaactcgatctcgatcagcggttaccacatgcaggaagccggagcggacgctattctggagttggcctataccctggcagacggactggaatactccagaactggcctgcaggcgggcctgaccatcgacgagttcgctccgcggctgagcttcttttggggaatagggatgaacttttacatggaaatcgctaaaatgcgggcgggacgccgcctttgggcccacctgatcgaaaagatgttccagccgaaaaactcgaagtcgttgctgctcagggcgcattgccaaacttcggggtggtccctgacggagcaagacccctacaacaacatcgtgcgcactgccattgaagctatggcggccgtgtttgggggtacgcagtcgctccataccaactcattcgatgaagcgctggggctcccaactgtgaagtcggctcggatcgcgagaaacactcagatcatcattcaagaggagtcgggaattccgaaagtggccgacccttggggaggtagctatatgatggaatgccttactaacgacgtgtacgatgcagctctgaaactgatcaacgaaatcgaggaaatgggaggcatggccaaggccgtggccgaagggatccctaaactcaggatcgaggaatgtgcggcaagacggcaggctagaatcgactcgggatcggaggtcatcgtgggcgtgaataagtaccaactggaaaaggaggatgccgtcgaggtcctggcaatcgacaacacttcagtgcggaatagacagatcgagaagctgaaaaagatcaagtcatcgcgggatcaggcgctggctgagaggtgcctggcggcgctgactgagtgtgctgcgtccggagacggcaacattctcgccctcgcggtggatgcttcacgcgcccgctgcactgtgggtgaaatcactgatgccctcaagaaggtctttggagagcacaaggcaaacgacagaatggtgtcaggcgcctaccggcaagaattcggagaatcaaaagaaatcacttccgcaatcaagcgcgtccataagtttatggagcgtgaaggacgccgcccacgcctcctggtggcgaagatgggacaggacggtcacgaccggggggcaaaagtgattgcgacgggattcgccgacctgggattcgacgtggacatcggtccgctgttccagaccccacgagaagtggcacagcaggcggtggacgctgacgtgcatgctgtgggaatctctaccctcgcggcgggccataaaacgctcgtgccggagctcattaaagagttgaattcgctggggaggccggacatccttgttatgtgtggcggcgtgattccgccgcaggattacgaattcttgttcgaggtgggtgtctccaacgtctttgggccgggaacccgcatcccgaaggctgccgtgcaggtgttggacgatatcgagaagtgcctggagaaaaaacaacaatcggtc

SEQ ID NO: 5659 - DNA, 2250 bp, Artificial Sequence
  derived and/or modified sequence
atgcttagagctaagaatcaactgtttcttctttcccctcactaccttaggcaggtgaaggaaagctcaggatccagacttattcaacaacgccttctgcatcaacaacagcctcttcatcctgagtgggctgctctggcgaagaagcagcttaaaggaaagaacccagaagatcttatatggcacactccagagggaatctcgattaaaccactgtactccaagagagatacgatggatctgcctgaagagctgccaggcgtcaagccttttacgagaggtccataccctactatgtacacgttccgtccttggaccatccgacagtacgcgggatttagcaccgtggaagagtcgaataagttttacaaagataacataaaagccggtcaacagggcctgtctgtggcatttgatctggcaacccaccggggttatgattcggataacccccgggtgaggggtgacgtcggcatggcgggggtggcgatagataccgtggaggataccaagatactgttcgatggtatcccacttgagaagatgtccgtgagcatgaccatgaacggcgccgtcattccggtccttgcgaactttattgtgactggcgaagaacaaggtgtcccaaaagagaagttgaccggcaccattcaaaatgacattcttaaggaattcatggtgagaaacacgtacattttccctcccgaaccaagcatgaagataatagcagacattttcgaatacactgcgaagcacatgcctaaattcaacagcatctccatctcgggatatcacatgcaggaagccggggcagatgccatcctcgaactggcatacactcttgcagacggattggagtactcgcggactggcctgcaagctggactcactatagacgagttcgcgccaagactgtctttcttctgggggatcggaatgaacttttacatggagatcgctaaaatgcgcgcaggaagaaggctttgggcacaccttatagagaagatgtttcaaccaaagaacagcaagtcgctgttgctgcgggcacactgccagacctcaggatggtcactgactgaacaggacccatataacaacattgtgcgcacggccatcgaagcaatggcagcagtgtttggcggcacgcaatctctgcacaccaactcgtttgacgaagcgctcggccttcctaccgtgaaaagcgctaggattgcccgtaacacccagatcattatccaagaggaatccggtattccaaaggtcgcagacccatggggcggttcctacatgatggagtgtctcaccaatgatgtgtacgacgcagcactgaaattgatcaacgaaatcgaggaaatgggaggtatggcaaaggctgtggcagaagggatcccaaagctgcggatcgaggagtgtgccgctcgcagacaggcgcgcattgattcgggatcagaagtcatcgtcggagtcaataagtaccaactggaaaaagaggatgccgtggaagtgctggctattgacaatactagcgtgagaaatcgccaaatcgagaagctgaaaaagattaagtcctcacgtgatcaagcgcttgcagaaagatgccttgcggcactgactgaatgtgcagcgtcgggggatggaaacatactggcacttgcagtcgatgcatcccgtgcgcggtgtaccgtgggagaaatcaccgatgcactgaagaaggtttttggagagcataaggcaaacgaccggatggtttcaggcgcctaccgccaggaatttggagaaagcaaagaaattactagcgccattaagagggtgcacaaattcatggagagagagggtaggcgccctcggcttctggtcgccaagatggggcaagatggccatgatagaggtgcgaaagtgatcgcgaccggttttgccgacctcggtttcgatgtggatatcggaccactttttcagactccaagagaagtggcccagcaggcagtggatgccgacgtccatgctgtcgggatctctaccctggcagcaggacataagaccctcgtccccgaacttatcaaggaattgaattccctgggacgccctgatatcctcgtgatgtgtggaggcgtgatacccccacaggattacgaatttctcttcgaagtcggggtgtcgaatgtattcggtccaggaactaggatccccaaagcggcggtgcaagtgttggatgatattgagaagtgtctggaaaagaagcagcagtcggtg

SEQ ID NO: 5660 - DNA, 2250 bp, Artificial Sequence
  derived and/or modified sequence
atgctgcgggcaaaaaatcagctgttcctcctttcaccgcattacctgaggcaagtgaaggagtccagtgggtctagacttattcagcaacgactgctgcaccagcagcagcctctgcatccggagtgggccgcattagctaaaaagcagctgaaaggcaaaaacccagaggaccttatttggcacaccccagagggtatctccataaagcccctgtacagcaagagagatactatggatttgccggaggaactccctggcgtgaaaccatttacccggggcccgtacccaacgatgtatacgttcagaccttggaccatcagacagtatgcggggttctccactgtcgaagaatctaacaaattctataaggataatatcaaggcggggcagcagggacttagtgtcgcattcgacttggctacccaccgtggatatgatagcgataatcccagagtcaggggtgatgttgggatggcgggtgtcgccatagataccgtagaagatacgaagatattatttgacggaatccctctggagaagatgtccgtcagtatgactatgaatggggccgtgatccccgtgctggctaacttcatcgtaacgggtgaggaacagggggtaccaaaggagaagttgacaggcactatccaaaacgatatccttaaagagttcatggtccggaatacctacatatttcccccggaaccttctatgaagattatcgcagacatctttgagtatactgcaaagcacatgcccaagtttaatagcatttcaatcagtggctatcatatgcaggaagcgggcgccgacgccattctagagcttgcctacactctggcagatggcctggagtattccaggactggactgcaagccggacttacaatagacgagtttgcccccaggctgtctttcttctggggcattggcatgaacttctacatggaaatcgctaaaatgcgcgctggtcggcgcttgtgggctcatctcatagagaaaatgttccagcccaagaattcaaagtcccttctgcttcgcgctcactgccagaccagcggatggtccctgaccgaacaggacccatataacaatatcgtccgaaccgctattgaggctatggccgcagtgtttggcgggacccagtccctgcataccaactcgttcgacgaggcactgggcctgccaaccgtgaaatccgccaggattgcccggaatacacagattattatccaggaggagtccggaatccccaaggtcgccgatccctggggcggatcctacatgatggagtgtctgactaacgatgtgtacgatgcagccctgaagctgataaacgaaatcgaggaaatgggtggtatggcaaaggcggtcgccgagggtattcccaaactccgcattgaggagtgcgcagccaggaggcaggctcggatcgattctggctctgaagtaattgtgggcgtgaacaaatatcagctcgagaaggaggatgccgtggaagtgctcgcaattgataacacttctgttcggaacaggcagatagaaaagctgaaaaaaattaaatcttctcgggatcaggctctcgccgaacgctgcttagctgccttaaccgagtgcgctgcctctggggacggcaacattttggcgctcgctgtcgatgcctctagagctcgctgtactgtcggcgagataaccgatgcattaaagaaggtttttggggaacataaggccaacgacaggatggtttccggcgcctatcgacaggaatttggggagtcgaaagaaattacatctgcaattaagcgggtgcataagttcatggaacgtgaggggcgccgtccacggttgctagtagcaaagatggggcaggacggccacgacagaggggcaaaggtaattgccacgggtttcgccgacctcgggttcgatgtggacatcggaccactgtttcaaacgccccgagaggtcgcccagcaggctgtcgacgcggacgttcacgccgtcgggatctctacactggcggcgggtcacaagactctagtgcccgagctgattaaagaactgaactcgctagggcggccagacatcctggtcatgtgcggcggcgtcatccctccgcaggactacgaattcctgttcgaggtgggggtttctaacgttttcggtcccggcactcgcatcccaaaagccgcagtccaggtgctcgatgacatcgagaagtgtctggaaaagaagcagcagtctgtt

SEQ ID NO: 5661 - DNA, 2250 bp, Artificial Sequence
  derived and/or modified sequence
atgctgagagcgaaaaaccagctttttctgctgtcacctcactacctcaggcaagtgaaggaaagctccggtagccgtcttattcagcaacgcctcctgcatcagcaacagcctctgcatcccgaatgggcagcacttgccaagaagcaactgaaggggaagaacccggaggacctgatatggcacacccctgaagggatctcgataaaacccctgtacagcaagcgagataccatggacctcccagaagaactgcctggggtgaaaccatttactcgcggcccataccctaccatgtacacgtttagaccatggaccattaggcagtacgcagggttttccaccgtagaagaatctaataagttctacaaggacaacattaaagcaggacagcaaggactcagcgtggcattcgacctggcaactcatcgcggatacgattcggacaacccacgggtgagaggggatgtaggtatggctggagtggcgattgacacggtggaagatactaagattctcttcgatggaatcccacttgagaaaatgtcagtctcgatgactatgaacggagcagtgattcctgtcctcgcaaactttatagtaaccggcgaggaacaaggagtgccgaaagaaaagttgaccggaaccattcaaaacgatatactgaaagaattcatggtcagaaacacttacatttttccacccgagccatcaatgaaaatcatcgcagatatcttcgaatacaccgcaaagcatatgccgaagtttaactcgatctccatttccggttatcatatgcaagaggcgggggcggatgcaatccttgaacttgcatacactttggccgatggactcgagtactcacggaccggactgcaggcaggactgaccatcgacgaatttgcacccagactttcgttcttctggggaattgggatgaatttctacatggagatcgccaagatgagagcaggccggagactttgggcacaccttattgaaaagatgtttcagccaaagaactccaagagcctgctgctgcgagcacactgtcaaacttccggttggtcccttacggaacaggacccctataacaatatcgtgcggactgcaatagaggcaatggcggcggttttcggtggcacccaatccctccataccaattcgtttgacgaggcgcttgggctgcctactgtgaaaagcgcaaggatcgctcgaaacactcaaatcattatccaggaagagtcaggtattccaaaggttgccgacccgtggggaggttcctacatgatggaatgcctgactaacgatgtttacgatgcagccctcaaactcattaatgaaatcgaagaaatgggcggtatggcaaaggcagtggcagagggcattcctaaactccggattgaagagtgcgcggcacgtaggcaggcccgcatagattcggggagcgaagtcattgtaggtgtgaataagtaccagctggaaaaagaggatgccgttgaagtgctcgcaattgataatacgagcgtcagaaatcgccaaattgagaaactgaagaagattaagtcatcgagggatcaggcactggcagagcggtgtctggcagcccttaccgagtgtgcggcctctggtgacggaaacatacttgcgcttgctgtggacgcatcgagagcacgatgtactgtgggagaaattaccgatgcccttaagaaggtctttggtgagcacaaggctaacgataggatggtttcgggcgcctacagacaagaatttggcgaatcaaaagaaattaccagtgctataaagagggtgcataagtttatggagcgtgaaggtcgtcgacctcggctgctggtggccaaaatgggacaagatggtcatgacaggggtgctaaggtcatagcaactggatttgctgatctggggtttgacgtggatatcggaccccttttccagacgcctcgggaagtggcacaacaggccgtggacgctgatgtccatgccgtgggcatctctactctcgcagctgggcacaaaacgctcgtgcccgagctcattaaggaattgaactcgttgggtagaccggatattctggtcatgtgcggaggcgtcattccgcctcaagactacgagtttttgttcgaagtgggagtctcaaatgtgttcggccctggaacccgcataccaaaggcggcagtccaagtccttgatgatatcgaaaagtgtcttgaaaagaagcaacagtcggtg

SEQ ID NO: 5662 - DNA, 2250 bp, Artificial Sequence
  derived and/or modified sequence
atgttgcgtgctaagaaccagctatttctgctgtcgccacactacctgcggcaggtcaaggaatctagtggaagtcggttgatccagcagcgacttctgcatcagcaacagccgttacaccctgagtgggcggccctcgctaagaaacagttgaagggcaagaacccggaggatctaatctggcatacaccagagggtatctcaattaagccactgtactcaaagcgtgacactatggacctgccggaggagctacctggtgtcaagccgttcacacgtggcccttatcctaccatgtatacttttcgtccgtggacaattagacaatacgccgggttctccacagtggaagagtctaataaattctacaaagacaatatcaaggccggtcagcagggactctccgtcgcgtttgatcttgccacacaccgcggatatgacagtgataacccgagggtgaggggagatgttggcatggcaggggtggcaatagatacggttgaggacacaaagatcttattcgatgggattcctttagagaaaatgtctgtcagcatgaccatgaatggcgcggtcattcccgtcttagccaatttcatagtcacgggtgaagagcagggagtgccgaaggaaaaactgacgggcacaatccagaacgatattctgaaggagttcatggtcagaaacacttacatcttccctccagagccatcgatgaaaattattgccgatattttcgagtatactgcaaagcatatgccaaaatttaactccattagcatttccggatatcacatgcaggaagctggggctgacgcgatcctagagcttgcgtatacattggccgatggacttgaatattctaggacaggactacaggctggtttgaccatcgacgaattcgcgccacgattgagctttttttggggtattggtatgaacttttatatggaaatcgccaagatgcgagcaggaaggcgcctttgggcacaccttatagagaagatgttccagcccaaaaacagtaagtcgttgctgttgcgggctcattgtcagacatctggctggtcgcttacagaacaggacccctacaataacattgttcgaactgccatcgaggctatggccgcagtattcggcggcacacagtcccttcataccaactcctttgacgaagcccttggtctccccaccgtgaaaagcgctaggatcgcacgaaatacacagattattatccaagaagagagcgggatccccaaagtcgcggacccttgggggggctcttatatgatggaatgcttgacgaatgacgtgtacgatgcggcgctcaagctgattaatgagatcgaggaaatgggaggtatggctaaggccgtggctgagggcatccccaagctacgaattgaggaatgcgctgcccgtaggcaggcacgaattgactccggatcagaagtaatcgtaggtgtcaacaaatatcaactagagaaggaagatgccgtggaggtactagccatcgataatacctccgttcggaatagacagattgagaagcttaaaaagatcaagtcgtcaagagatcaggccctcgctgaacggtgtctggcggccctgaccgaatgtgccgcttcaggcgatggtaacatcttagccctcgctgttgacgctagtcgggctaggtgtactgttggtgaaatcaccgacgctctaaagaaggttttcggtgagcacaaagcgaacgacagaatggtgtcgggagcatatcgtcaggaattcggcgaatcgaaggagattacttcggctatcaaaagggttcacaagtttatggagcgtgaaggccgccgaccaagactccttgtggccaaaatgggccaggatggacatgatcgaggtgctaaggtcatagcgacgggtttcgcagatctgggcttcgatgtagacattggaccgttgttccaaacgcctcgggaggtcgcccaacaggctgtcgacgcagacgtccacgcggttggtatcagtacactggcggccggtcacaagactctagtacctgagttgataaaagaactgaattctttgggtcgccccgacatcctcgtgatgtgtggaggagtcatccccccccaggactatgagttcctgttcgaagtcggtgtaagtaacgttttcggtcctggtactcgaatccccaaggctgccgtccaggttctcgatgatattgaaaagtgtctggaaaaaaaacagcaatccgtg

SEQ ID NO: 5663 - DNA, 2250 bp, Artificial Sequence
  derived and/or modified sequence
atgttaagagcaaaaaaccaattgttcctcctgtcaccgcactacctcagacaggtgaaagagagcagcgggtctaggctgatccagcaacggctcttacaccagcagcagcctttgcacccagaatgggccgcactggccaaaaagcagttaaaaggaaaaaatcctgaagatttaatttggcatacaccagagggaataagcattaagcctctctacagcaaaagggatactatggatctcccagaggagctccccggggtaaagccattcaccaggggtccttaccccacgatgtacacattccgtccctggacaatcaggcaatatgccggattcagcaccgtcgaggagagcaataaattctataaggataacatcaaggctggccagcaggggctgtctgtggccttcgatctagcaacacacaggggctacgacagcgataacccaagagtgaggggagacgttgggatggcgggcgtcgctatagatacagtagaggacaccaagattctatttgacggaatcccattggagaagatgtccgtttctatgacgatgaatggcgccgtcatccctgtcttggccaacttcattgttacaggagaggagcagggggtccccaaagagaagttgacgggcaccatccagaacgatatcctgaaggaattcatggtgcgaaacacatatatcttccccccagaaccttccatgaagatcattgcagacatcttcgagtataccgcaaaacatatgcccaagttcaattccatcagcatcagcggctatcacatgcaagaggccggcgctgacgccattctggagttggcatatacactggctgacggtcttgaatattcgagaacaggacttcaggctgggctcactatcgacgagttcgcccccagactctcctttttctggggcatagggatgaatttttacatggaaatagccaagatgcgagcgggcaggagactgtgggcgcatctgattgaaaaaatgtttcagccaaagaacagcaagagcctcctgctgagggcacattgccagacctctggctggtcacttacagaacaagacccctacaacaatatagtcagaaccgccatagaagctatggccgctgtgttcggaggcactcagtcccttcacaccaactctttcgacgaggcccttgggctccccactgtcaaatccgctcgtatcgctagaaatactcagatcatcatccaagaggaatccgggatccctaaagtcgcagacccctggggagggtcttacatgatggaatgtctcacaaacgatgtgtacgacgctgctctgaaactcattaacgagatcgaggagatgggaggaatggccaaggcagtggccgagggaataccaaagctacgaatcgaagaatgtgccgcccgccgacaagcccgcatagactcgggatctgaagtgattgtgggggtcaataagtaccagctcgaaaaggaggatgccgtcgaagtcctcgctattgacaacacctccgtgcgtaatcgccaaattgagaaattgaaaaaaatcaaatcatccagggaccaggcactagctgagcggtgcctggccgccctgaccgaatgtgccgcaagcggcgacggaaacatcctggcccttgcagtggatgcttcccgggcacggtgtacggtcggagaaatcaccgacgccctcaagaaggtgtttggtgaacataaggctaacgataggatggtatctggagcatacagacaggagtttggagagtccaaggagataacttctgcaataaagcgggtgcacaagtttatggagagggaggggcggcgacccaggctcctggtggcgaagatgggtcaggacggacatgatagaggggcaaaggttatcgccaccggtttcgccgacttgggatttgacgtggatatcggacctttgttccagaccccaagagaagtcgcccagcaggctgttgacgctgatgtccacgctgtgggtatttcaaccctggcagccggccacaagactttggtccccgagcttatcaaggagcttaatagtctcgggaggcccgacatcttagtgatgtgcggaggtgtgatccccccgcaggattacgagttcctgtttgaggtaggtgtgtccaacgtgttcggacctggcacacggatccccaaggctgccgtgcaggtcctggatgatatagagaaatgcctagaaaagaagcaacagtccgtg

SEQ ID NO: 5664 - DNA, 2250 bp, Artificial Sequence
  derived and/or modified sequence
atgcttcgagctaaaaatcagctattcctattgtctccgcactatctccgtcaagttaaagaatcatcaggatctcgtctcatccagcaacgattattgcatcaacaacaaccactccatccggaatgggctgctctggcaaaaaaacagctcaaaggaaagaatccggaagatctgatttggcatacaccagaaggcatttcgataaagccgctctattccaaaagagacacaatggacctaccagaggaactaccaggtgttaagccatttactagaggaccatacccaactatgtatactttccgtccgtggactattagacaatatgcaggattttcgacagtcgaagaatcgaacaaattctacaaagataatataaaagcgggtcaacagggattgagtgttgcttttgatcttgctacccacagagggtatgactcagataatcctagagtccgaggagacgtaggaatggccggagttgcgatcgacactgttgaggatacaaagattctttttgatggaattccattggaaaaaatgtctgtctccatgacaatgaatggagcagttattccggttctagcgaattttatagttacaggcgaggaacaaggcgttcctaaggagaaattgaccgggaccattcaaaacgatatattgaaggaattcatggttcgtaatacatatattttcccgccggagccttctatgaagatcatcgcagacatttttgaatacaccgctaagcacatgcctaaatttaattccatctctatttcgggatatcacatgcaagaagccggagccgatgccattctggaacttgcttatacacttgctgacggccttgaatactctagaacgggtctccaagctggacttacaatcgatgaatttgcaccgcgtctctcttttttttggggaattgggatgaatttctatatggaaatcgcaaaaatgcgggcaggcagacggctctgggcacacctaatagagaaaatgttccaaccaaaaaattcgaagtcattgctactgcgtgcgcattgccaaacttcaggatggtcgcttacggagcaggacccatataataacattgttagaacagcgattgaagctatggctgctgtttttggtggcacacagtctctgcacaccaactcatttgacgaagcgcttggattgcctacagttaagagcgcacgcattgcaaggaatacccaaattatcattcaagaggaaagcggcattccaaaagttgcagatccgtggggtgggtcgtatatgatggaatgcttaactaatgacgtttacgatgcagctctcaaactgattaatgagattgaggagatgggaggaatggctaaggcagtggccgaagggatcccgaaactcagaattgaagagtgtgcagctcgtagacaagccagaatcgattcaggatctgaggtcatcgttggagtcaataaatatcagttggagaaggaagatgcggttgaggtactagctattgataatactagcgtgcgaaatcggcaaatagaaaagctaaaaaagatcaaatcatcgagagaccaggctctcgccgaaagatgcttggcagctcttaccgaatgcgccgcttctggagatggaaacattctggcattagcggtagatgcttcgagagctcgatgtactgttggcgagatcacggatgcgttgaagaaggtgttcggggaacataaggctaatgatcgtatggtttcaggcgcataccgccaggagttcggagaatccaaggaaattacttctgcaataaaacgggtgcataagttcatggaaagagagggaagaaggccacgtctactggttgcgaaaatgggacaagatggacatgatcgaggtgccaaagtaattgcaaccggattcgcggatttgggatttgatgtcgatattggaccgctgttccaaactcctagagaagttgcgcaacaggcggtcgatgctgatgttcatgcagtgggtattagtactctcgcagccggacataaaacactagttccagaactcattaaggaattgaatagtctgggacgacccgacatccttgtgatgtgcggaggtgttatcccaccgcaggactatgaattcctttttgaggtaggcgtatctaatgtttttggaccgggaactcggatcccgaaagcagcggtgcaagttttggatgacattgagaagtgtttagagaagaaacaacagtccgtg

SEQ ID NO: 5665 - DNA, 2250 bp, Artificial Sequence
  derived and/or modified sequence
atgctgagagcaaaaaaccaacttttcctgctgtctccgcactacctccggcaggtgaaggaatcgtccggatcgagactcatccaacagcgcctgttgcatcagcaacaaccactccatccggagtgggccgcactcgccaaaaaacaacttaaaggcaagaatccagaggatcttatctggcacaccccggagggtatcagtattaagccgctgtactcgaagcgggacactatggatctcccagaggagctcccgggggtgaagcctttcacccggggcccttacccaactatgtataccttccggccgtggaccatccggcaatacgccggatttagcactgtggaggaatccaacaagttctacaaggacaacatcaaagcgggccaacagggactgtcagtggcgtttgaccttgccactcatagaggatacgatagcgacaacccgagagtgaggggggatgtgggaatggccggcgtcgcgatcgacaccgtggaagatactaagattctgtttgacggtatcccgttggaaaagatgagtgtgtcaatgactatgaatggagctgtgatccccgttttggccaatttcatcgtcactggggaagaacagggagttcccaaggaaaagctgaccggtaccatccagaatgatatcctgaaagaattcatggtgcggaacacttacatcttcccccctgagccatcgatgaagatcatagccgacatctttgaatacaccgcgaagcatatgccgaagttcaacagcatctcgatctccgggtaccacatgcaagaagcgggtgcggatgcgatcctggagctcgcctataccctggctgacggactggaatactcgaggaccggactccaggccggtctgacgatcgacgagtttgctccgcggctgtctttcttttggggcatcggcatgaacttttacatggagatcgccaaaatgcgcgccggacgccggctctgggctcacctgatcgaaaagatgttccagccaaagaattcaaaatctctgctgttgcgagcacactgtcagacctcaggatggtccctgaccgaacaggacccgtacaacaacatcgtcaggactgccatcgaggccatggcagctgttttcggcggcactcagtccctgcataccaactcgttcgacgaggcgctcggactgccaaccgtaaaatcggctcgcattgcccgtaacacccagatcatcatccaagaagaaagcggaatcccgaaggtcgccgatccgtggggaggctcctacatgatggaatgtctgactaacgacgtgtacgatgcggcgctcaagctcatcaatgaaatagaagagatgggcgggatggccaaggcagtggcagaaggcatccctaagctgagaatcgaggaatgcgctgcacgcaggcaggcgcgaattgacagcggatcagaggtcatagtgggcgttaacaaatatcagctggagaaggaggacgctgtcgaggtgctggctattgataacactagcgtgcgaaatagacaaattgagaagttgaagaaaatcaagtcgagtcgtgaccaggcactcgccgagcgctgcctggccgccctgactgaatgcgctgcctcgggagatggaaatatcctcgcactggcggtcgacgcctcgcgggccagatgcaccgtgggcgagattactgacgcgctcaagaaggtgttcggagaacataaggcgaacgaccgcatggtgtccggtgcgtaccgccaagaattcggagagtcgaaagaaataacgtcagccattaagcgggtccacaagtttatggagcgcgaagggcggcggcctagactgctggtggcaaagatggggcaggatggacacgaccggggagccaaggtgatcgccaccgggttcgcggatcttggcttcgacgtggacataggcccgctcttccaaacgccgcgtgaggtggcacagcaggccgtggacgccgacgtgcacgcggtcggaatttcgaccctggcggctggacacaaaacgctcgtcccggagcttatcaaagagctcaactccttggggcggcctgatatcttggtgatgtgcgggggtgtgatccctccccaagattacgaattcctgttcgaagtgggagtctccaatgtattcggtcccggaactcgcatcccgaaggctgccgttcaggtcctggatgacatcgaaaagtgcctcgaaaagaaacagcagagcgtg

SEQ ID NO: 5666 - DNA, 2250 bp, Artificial Sequence
  derived and/or modified sequence
atgcttcgggcgaagaatcagctgttcctgctgtctccgcactacctgcgtcaggtaaaggaatcatccggttcgagactcatccagcagcggctcctgcaccagcagcaaccactgcaccctgaatgggctgccctggccaagaagcagctgaaaggaaagaacccggaagatcttatctggcacaccccggaagggatcagcatcaagcctctgtactcgaaacgcgatactatggatctgccggaagagttgccgggagtcaaaccgtttacccgggggccatacccgaccatgtacactttccggccgtggactattagacagtacgccgggttttccacggtcgaggaatcgaacaagttctacaaggataacatcaaagccggccagcaagggttgtcggtcgcgttcgacctcgccacccatagagggtatgactcggataatcctagagtcagaggagatgtcggtatggccggcgtggcgatcgacactgtcgaggacacgaaaattttgttcgacggaatcccactggaaaaaatgagcgtttcaatgaccatgaacggggccgtgatccccgttttggcaaatttcatcgtgaccggtgaggaacagggagtgcccaaggaaaagctgactggcaccatccaaaacgacatcctcaaggagttcatggtgaggaatacgtacatcttcccgcccgaaccatccatgaagatcattgctgatatcttcgaatacaccgctaagcatatgccaaagttcaacagcatcagcatctccggttaccacatgcaggaagcaggagcagacgcgatcctggaactggcctacactcttgccgacggactggagtattctaggactggactccaagcgggcctgactatcgacgagttcgctccgcggctcagcttcttctggggcattggaatgaacttctacatggaaatcgccaagatgcgggccggacgcaggctgtgggcccatctcatcgaaaagatgtttcagccgaagaacagcaaatcactccttctgcgggcacattgccaaacctcaggctggtccctcactgagcaggacccatacaacaacatcgtgcggactgccatcgaggcaatggcagcagttttcggcggtactcagtcactgcacaccaattcgtttgatgaggcgttgggactccctaccgtgaagtccgctcgcattgctcgcaacacccagatcattatccaggaggagagcggaatcccgaaggtggccgacccttggggcgggagttacatgatggagtgcctcaccaatgatgtgtacgatgcagcactcaagctgatcaacgaaattgaagaaatgggcggcatggcgaaagctgtggcggaaggcatcccgaagctccggatcgaagaatgcgctgccaggcgccaggcgcgaatcgactcgggatccgaagtgatcgtgggagtgaacaagtaccagctggagaaggaggatgctgtcgaggtgctggcaatcgacaataccagcgtgcgcaaccggcaaatcgagaaactgaaaaagatcaagtcctcccgggaccaagccctggcagagcgctgtctggccgcactgactgaatgcgcggcatcgggagacggcaacatactcgccctggcggtggatgcgtcgagagcgagatgcactgtcggcgagatcaccgacgctttgaagaaggtctttggagaacataaagcgaatgacagaatggtgtcaggggcctaccgccaagagtttggagagtccaaggaaatcacctcggccattaaacgcgtccacaaattcatggaacgagagggacgccgccctcggctccttgtcgctaagatgggccaggacggacacgatcgcggagccaaagtgatcgccactggatttgcggacctgggtttcgacgtggatattggtccgctgttccaaaccccgagagaagtggcccaacaggccgtggatgccgacgtgcacgctgtcggaatctcgactctggcggccggacataagaccctcgtgcctgagttgatcaaggagcttaactcactgggaaggccagacattttggtgatgtgtggaggtgtcataccaccccaagactacgaattccttttcgaagtgggggtgagcaatgtgtttggacccggaacgcgcatcccaaaggccgcagtgcaggtgctcgacgatatcgaaaagtgcctggagaagaaacaacaatccgtc

SEQ ID NO: 5667 - DNA, 2250 bp, Artificial Sequence
  derived and/or modified sequence
atgctaagagctaaaaaccaactatttctacttagcccgcattacttgcgtcaagtaaaagaaagttcagggtctcgtcttatccaacaaaggttgttacatcagcagcaacctctacatccggaatgggccgcgctggccaaaaagcagctgaagggtaagaatcctgaagatctgatctggcatacgccggaaggaatttctatcaaaccactctatagcaaacgcgatacgatggatttaccagaagaactcccgggcgttaaaccgttcacgagaggaccgtacccgacaatgtatacattcagaccctggactattcggcagtacgccggctttagcactgtcgaagaatcaaataagttttacaaagacaatattaaggctggacaacaaggtcttagcgtcgcgtttgacctggcgactcatcgtggatatgactctgataacccgcgggtgcgcggagatgtcgggatggccggtgtggcaatcgatacagtcgaagacacaaaaattctgtttgacggcattccactggagaaaatgtccgtttcgatgacgatgaatggagcggtaataccggtgttggcgaatttcattgtgacgggtgaagaacaaggagtccccaaggagaaactaactggaacaattcaaaatgatatcctaaaagagtttatggtgcggaatacatacatttttcctcctgaaccgtcgatgaaaattatcgctgacatttttgaatacacagctaaacatatgccgaagtttaactcaatctcaatcagcgggtatcatatgcaagaagcgggtgcagacgcgatactcgaactagcgtatacactggctgatgggttggaatacagtcgcaccggactacaagctggtttaacaatcgacgaatttgcacctagactttcttttttttgggggataggtatgaatttctatatggaaatagcaaagatgagagctggtcggcgactgtgggcgcatctgatcgaaaaaatgtttcaaccgaaaaattctaaaagcttgttgttaagagcacactgtcagacaagtggctggtctctcacggagcaagatccgtacaacaatatcgtgcgaacggctattgaggctatggcggcagtatttggtggtacacagagcttacatacgaattcctttgacgaagctctaggactgccgacggttaaaagcgcgcggattgctcgtaatacacagatcatcattcaggaagaaagcggcatcccgaaagtcgcggatccctggggcggtagttatatgatggaatgcttgacgaatgatgtttatgacgcggcacttaaattgattaatgaaatagaagaaatggggggcatggcgaaagcggtcgccgaaggaataccgaaactcagaattgaagagtgtgctgcgcgccgtcaggcgcgtatcgatagtggatccgaggtgattgtcggagtaaacaagtaccaattagaaaaagaagatgctgtagaagtgcttgcgattgataatacttcagttcgcaaccgtcaaatcgaaaagttaaaaaaaataaagagctcaagagaccaagcattagcggagagatgtctggcagctcttacagagtgcgctgcgtcaggagatggaaacattcttgcattagcggtggatgctagccgcgctcgatgtacagttggagaaatcacagacgcgttgaaaaaagtctttggagaacataaagctaacgacagaatggtttctggggcctatcggcaagagtttggtgagtctaaggagataacatcagccattaaacgcgtacataaatttatggaacgggaaggccgtaggccgaggttacttgtagcaaaaatgggccaagatggccatgataggggagccaaagttatagccacgggctttgccgatttaggattcgatgttgacatcggacctctttttcagacacccagagaagtcgcccaacaggcggtggatgcggatgtccacgcagttggaatctctacgcttgcagcaggacataaaactttggtccctgagcttatcaaggaactgaattcacttggcaggccggacattcttgtgatgtgtggtggagttattccgccgcaagactatgagtttctttttgaggttggcgtttcaaatgtatttgggccgggtacccgtattccgaaggctgctgtgcaagtgttagacgatatcgaaaagtgtcttgagaaaaaacaacaatctgtg

SEQ ID NO: 5668 - DNA, 2250 bp, Artificial Sequence
  derived and/or modified sequence
atgctgcgagcgaagaatcagctgttcttgctgtcaccgcattaccttaggcaggtgaaggaatcctcgggatcaagactcatccagcaaaggctcctgcaccaacagcaaccgctgcacccggaatgggcggcccttgcgaagaagcaactcaagggtaagaatcccgaagatctgatctggcatactcctgaaggcatctcgatcaagccgctgtactccaagagagatacgatggatctgccggaagagctcccgggcgttaagccattcacccgcggaccgtatccgaccatgtacaccttccgcccttggaccattcgccaatacgccgggttctcgactgtcgaagagagcaataagttctacaaggacaacattaaagcgggccaacagggactctcggtggcgttcgatctggctacccacagaggctacgattcggacaacccgagagtccgcggtgatgtgggcatggccggggtggctatcgacaccgtggaggacaccaagatcctgttcgacggaattccgctcgagaagatgtcagtcagcatgactatgaacggagctgtcatccccgtgttggcaaactttatagtgactggagaggagcagggcgtccccaaggagaaactgactgggactatccaaaatgacatccttaaggagttcatggtgaggaacacctacattttcccgccggaaccttccatgaaaatcattgccgacatcttcgaatataccgcaaagcacatgccgaaattcaattctattagcatctccggataccacatgcaggaggccggggcagatgcaatcctcgagctggcctacactttggccgatggccttgagtacagccgcactggactgcaggcgggactcacgatagatgaattcgcgcctcggctttccttcttctggggaattggtatgaacttttacatggagatcgccaagatgcgcgccggacggagactctgggcccacctgatcgaaaagatgttccagccgaagaactccaaatcgttgcttctgagagcccattgtcagacctcagggtggtcgttgaccgaacaggatccttataacaacatcgtgcgcactgcaatcgaagctatggccgcagtctttggcggcactcagtcgttgcacaccaattccttcgacgaggccctgggcctcccgaccgtgaagagcgctcgcattgcgagaaacactcaaatcatcatccaggaagagtcgggcatcccgaaggtggccgatccttggggtggaagctacatgatggaatgtctgactaacgacgtctacgacgccgccctcaaactcatcaacgagatcgaagaaatgggcggaatggcaaaggcggtcgcggagggtatcccgaagctgcggattgaagagtgcgccgcacggcggcaggcaagaatcgacagcggatccgaagtgatcgtgggtgtcaataagtaccagttggaaaaggaggacgccgtggaggtgctggccatcgataacacgtcagtcaggaaccggcagatcgaaaagctgaagaaaatcaaatcctcgcgggaccaagcactcgccgaacgctgcctggctgctctgaccgagtgcgcggcctcgggggatggaaacattctggcactggccgtcgatgcctcgcgggcccgctgcacggtgggcgagattactgacgccctgaagaaggtgtttggcgaacacaaggctaacgatcgcatggtatcgggagcctaccggcaggaattcggcgagagcaaagaaattacctcggccatcaagcgggtccacaagttcatggaacgcgagggtcgccggccgcgcctgctggtggcgaagatggggcaggacggacacgatagaggcgcaaaagtgatcgccacgggattcgcggatctggggttcgacgtggatattggcccgctgtttcagaccccccgcgaagtcgcacaacaagcggtggatgccgatgtgcacgccgtgggaatctccactctggccgcaggacataagactctggtgcctgagctgatcaaggaattgaattcactgggacggccggacatcctcgtgatgtgcgggggagtgataccgccccaggattacgagttcttgttcgaagttggcgtttccaacgtgttcggccccggcacccgcattccaaaggctgcggtgcaagtgctggacgatatcgaaaagtgcctggaaaagaagcaacaatcggtc

SEQ ID NO: 5669 - DNA, 2250 bp, Artificial Sequence
  derived and/or modified sequence
atgctcagagcgaagaatcagctattcctgctctcacctcactatctgaggcaggtcaaggagagctcggggagtaggcttatccagcagcgcctcctacatcaacaacagcctctccatcctgagtgggctgctctggccaagaaacagcttaaaggcaaaaatcctgaggatctgatttggcataccccagagggcatttctattaaacccctgtacagcaagagggacaccatggatttgcccgaagaacttccaggtgtgaagccttttacaagagggccatacccaaccatgtacaccttccgaccctggaccattcgacagtacgctggattttctactgtggaagaatccaataagttttacaaagacaacataaaagcaggtcagcagggtctgtctgtcgctttcgacttggcgacacaccgggggtacgattcggacaaccctagggtgaggggagacgtcggcatggctggcgtcgccatagacactgttgaagacacaaagatcttgttcgatggaataccacttgagaaaatgagtgtcagcatgactatgaacggtgcagtgatacctgttttggccaactttatcgttaccggcgaggagcagggagtaccgaaggagaagctcacaggtacaattcagaacgacatcctcaaggagttcatggtgagaaatacttatatatttccccctgagccgtccatgaaaattatagccgacatcttcgaatacaccgcgaagcacatgccaaagtttaactccatctcgatctctgggtaccacatgcaggaggccggcgcagacgctattcttgaactcgcctataccctcgccgatggcctggaatatagtcgcacgggcttacaggctggtctcaccattgacgaatttgcgccaaggctcagtttcttttggggcatcggtatgaatttctatatggagatcgcaaagatgcgggccgggcggcgcctctgggcccacctgatagaaaagatgtttcagcccaaaaatagcaagagcttactcttaagggcccactgtcagacctctggctggtccttaactgaacaggacccttacaacaacatcgtgagaactgcaatcgaagctatggcggcagtatttggcggaacccagtctttgcacactaacagcttcgatgaggccctgggccttcccactgtcaagtctgcaagaatcgcaagaaatacccagatcatcatccaggaggagtcgggtattccaaaggtcgcggacccttggggcggatcctacatgatggagtgcctgaccaatgatgtgtacgacgccgccttgaagcttatcaacgagatcgaagagatggggggaatggccaaagcagtggccgaagggattcccaagctcaggatcgaggaatgtgccgctaggagacaggcccggatcgattcagggtctgaggtaattgtcggcgtgaataagtatcagctggaaaaggaggatgccgtggaagtgctggctattgacaacacatccgttagaaaccgtcagatcgaaaagctgaaaaagattaaatcaagcagagaccaggcgttagcggagagatgcctcgctgctttgacagagtgtgcagcttccggcgacgggaatattttagccctggctgtggatgcttctagggctaggtgcaccgtcggagagatcactgacgcactgaagaaggttttcggcgagcacaaagcaaacgataggatggtgtccggcgcgtataggcaagagttcggggaatcaaaggagattacaagcgcgattaaaagggtgcacaagtttatggaacgagaaggccggcggcccagattactggttgctaagatgggtcaggatgggcatgaccgcggggctaaggttattgccaccggctttgcagatcttggctttgatgttgatattggaccactgttccaaaccccccgggaggtagcccagcaggccgtcgacgccgacgtgcatgcggttggcatctccactctagcggcagggcacaagactctggtgcctgaactgatcaaagagctaaacagccttggccgacctgatattctagtaatgtgtggcggagttatccccccccaggactatgaattcctgtttgaggtgggtgtgagtaatgtgtttggcccgggtacccgcatcccgaaagccgccgtccaagtgttagatgatatcgagaaatgcctggaaaagaagcagcagtccgtt

SEQ ID NO: 5670 - DNA, 2250 bp, Artificial Sequence
  derived and/or modified sequence
atgttgagagcaaagaatcaactgtttttgctctcgccgcactatctccgccaggtgaaagagagctcggggtcacgcctcatccagcaaaggctcctccatcagcagcaaccgttgcatcctgaatgggcggccctggccaagaagcaactgaaggggaaaaacccagaggatcttatctggcacactccagagggcatctctattaagccgctctacagcaaacgcgacactatggatctgcccgaagaacttcctggagtgaagcccttcacccggggaccctacccgaccatgtacacgttccgcccctggaccatacggcagtacgccggcttcagcaccgtcgaagaatctaacaaattctacaaggacaacattaaggcaggccaacaaggtctgtccgtcgcgttcgacctggcaactcatcggggctatgattccgacaatcctcgagtccgcggtgacgtgggaatggcgggcgtcgctattgatactgtggaagatactaagatcctgttcgatgggattccgctggagaaaatgtctgtcagcatgaccatgaacggagcagtgatcccagtgcttgccaacttcatcgtgactggagaagaacagggagtgccaaaggaaaagctcaccggtactatccagaatgatatcctcaaagagttcatggtccggaatacctacatcttcccgccggagccgtcgatgaagataattgccgacattttcgagtacaccgccaaacatatgccaaagtttaacagcatatcgatcagcgggtaccacatgcaggaagcaggagcggacgctatcttggaactggcgtacacccttgccgacggactggaatattcccgcaccggactgcaggccgggctcaccatcgatgaattcgcccctcggcttagcttcttctggggtatcggcatgaatttctacatggaaatcgcgaagatgagagccgggcgccggctgtgggcgcacctcatcgaaaagatgttccagccaaaaaactcaaagtcactcctcctccgcgcccactgtcagacctcaggctggtcgcttacggaacaggacccgtacaacaatatcgtgaggaccgcgatcgaggcaatggccgcggtgtttggaggaacgcagtcgctgcacaccaactcatttgatgaggcactgggtctgccgacggtgaagagcgcaagaatcgcccgcaacactcagatcatcatccaagaggaatcggggatcccgaaggttgcagatccttggggtggatcctacatgatggagtgtttgacgaatgacgtctacgacgcggccctgaagctgatcaacgaaatcgaagagatgggtggaatggccaaggcggtggctgagggaattccgaagctgaggatcgaggagtgcgcagccaggcggcaagccagaattgactccgggtccgaggtgatcgtgggcgtcaacaagtaccagctcgagaaggaggatgcggttgaagtcctggctatcgataacacctcagtcagaaatagacagatcgagaaactcaaaaagatcaaatcctcacgggaccaagccctggctgaaagatgtctcgccgcgctcactgagtgcgcggcatcgggcgacggtaatatcctggcactggccgtcgacgcatcgagggccagatgcactgtcggcgaaataaccgatgctctgaagaaagtgttcggagaacataaagccaatgaccgtatggtgtcaggtgcttacagacaagagtttggagagagcaaggaaatcacctcggcgatcaagcgcgtgcataagttcatggaacgcgaggggcgcaggccacggctgctcgtggccaaaatgggccaagacggacatgaccgtggagcaaaagtgatcgcgaccggcttcgcagacttgggatttgatgtggacatcggtcctctttttcagactccgcgcgaagtggcgcagcaggcggtggatgccgacgtgcacgctgtgggaatctccacccttgcagctggccacaaaactctggtgccagaactgattaaggaactgaattcgctgggccgcccagatatcctggtgatgtgcggaggagtgatccctccgcaagactacgagttcctgttcgaggttggagtgtccaacgtgtttggaccaggaacgagaatcccgaaggccgccgtccaggtcctcgacgacattgagaagtgtctggaaaagaagcaacagtccgtg

SEQ ID NO: 5671 - DNA, 2250 bp, Artificial Sequence
  derived and/or modified sequence
atgcttagggcgaagaaccagctcttcctgctgtccccacattacttgcgccaggtaaaggaatcaagcggttcccgcctgatccagcagcgactgttgcaccaacagcagcccctgcacccggaatgggccgccctcgccaagaaacagctaaagggcaaaaatccagaagatctaatctggcatactcccgaaggaatttcaattaagcccctatattccaagcgcgataccatggacctgccagaagagctgcctggggtcaaaccgttcactcgcggcccctacccaaccatgtacactttccgcccatggaccataaggcagtacgccgggttctctaccgttgaggagtccaacaaattttacaaagataatattaaggcagggcagcaaggtttgagcgtcgctttcgacctcgctacacaccgggggtatgacagcgataaccctagagtccgcggtgatgtgggaatggcgggtgtcgccatcgataccgtcgaagatacaaaaattctttttgacggcatccccctggaaaaaatgagcgttagcatgaccatgaacggggctgtaatcccagtgctggcgaactttattgtaaccggcgaagagcagggagtgcccaaggagaagctcactggcactatccagaatgacatcttgaaagaatttatggtgcgaaacacatacattttcccaccggagccaagtatgaagattatcgcagacattttcgagtacactgctaaacatatgcccaaatttaactctatctctatatcaggataccacatgcaagaagcgggcgctgacgccatactcgaattggcgtatacgttggcagatggactggagtacagcagaactggcttacaggctggcttgactattgacgaatttgcacctaggctctcatttttttggggtatcggtatgaacttctacatggagattgccaagatgcgagctggccgcagattgtgggcacacctgattgagaagatgttccagcctaaaaacagtaagagtttactcttacgggcccactgtcaaacgtccggttggtccctcaccgaacaggatccatacaacaacatcgtcaggactgccattgaggccatggccgcggtcttcggcggtacacagtccctgcatactaattccttcgacgaagcgctcggtctgcccacagtgaaatcagccaggattgccagaaacacccagataatcattcaggaggagagcggcattccaaaagtggccgatccttggggtgggtcttacatgatggaatgtctcaccaatgatgtgtatgacgccgcattaaagctcatcaacgagatagaggagatggggggaatggcaaaggctgtggccgaaggcatacctaagcttcggatcgaggagtgtgctgcgcggaggcaggctcggattgacagcggatctgaggtgatagtgggagtaaacaaataccagctggagaaagaggacgccgtggaggtgctggccatcgataatactagcgtgagaaacagacaaatcgagaaactcaagaaaataaagagtagcagagatcaggcactcgccgagagatgtttggcagcccttactgagtgtgccgcaagcggcgatgggaacatcctggctttggccgtagatgcctctagggcaaggtgtactgtgggagagattaccgatgcactgaagaaggtgtttggcgagcacaaagcaaatgatcgcatggtgtctggggcctataggcaagagttcggggaatctaaagagatcacaagcgcaattaaacgcgttcataaattcatggaacgagaaggtagaaggccacgcctgctggtcgctaagatgggacaggacgggcacgacagaggggcgaaagtcatagccacagggttcgcagacctcggctttgacgtcgacatcggaccactgtttcagacgccgagagaagtggctcaacaagccgtcgacgcagatgttcatgccgttgggatctctacgttggccgcggggcacaagaccctggttcccgaactgatcaaggaattgaattctcttggtcggccagacatcttggttatgtgtggcggcgtaatcccaccccaagactatgaattcttgttcgaggtgggcgtctcaaacgtgttcggtcctgggacaagaatacccaaagctgccgtccaggttctagatgatatcgaaaagtgccttgagaaaaagcagcagtctgtt

SEQ ID NO: 5672 - DNA, 2250 bp, Artificial Sequence
  derived and/or modified sequence
atgctgcgcgcgaagaaccagctcttcctgctgtcccctcattacctcagacaggtcaaagagtcctcgggctcaaggctgatccagcagcggctgctccatcagcaacaacccctccaccctgaatgggccgcgctggccaagaagcaactgaagggaaaaaacccggaagatttgatctggcacaccccggaaggaatctcaatcaaacctctgtattctaaacgggacactatggacttgccggaagaactgccaggggtcaagccttttactcggggaccctacccaaccatgtacacttttaggccgtggaccatacgccaatacgccggcttcagcaccgtggaggaatccaacaaattctacaaggacaatatcaaggcgggacagcagggattgtccgtggcgttcgacctggccacccacagaggatacgactcggataatccaagagtgagaggcgacgtggggatggctggtgtggcaatcgacactgtggaggacaccaagatccttttcgacggaattccccttgaaaagatgtcggtgagcatgactatgaacggagcggtgatcccggtgctcgccaacttcatcgtcacgggcgaggagcaaggagtgcccaaggagaagctgactggcaccatccaaaatgacatcttgaaagaattcatggtccgaaacacctacatcttcccgccagaaccttccatgaagatcatcgcggacattttcgaatacactgccaagcacatgccgaagttcaacagcatctcaatctctggctaccatatgcaggaggcaggagcagacgcaatcttggaactggcttacacgctcgctgacggattggagtattcgcgcactggactgcaagcgggattgacgattgatgagttcgccccgcgcctctcctttttctggggcattgggatgaatttctacatggagattgctaagatgcgggccggtcgccggctctgggcccacctgatcgaaaagatgttccagccgaaaaactcaaagtcgctcttgctccgcgcccactgtcagacttccggatggtccctcaccgagcaagacccttacaacaatatcgtgcggaccgcaatcgaggcaatggccgcggtgttcggtgggacccaatcactgcatactaattcttttgacgaggcactcgggctcccgactgtgaagtcagcccggatagcgcgaaacactcagatcatcatccaggaagaatcgggcattccaaaggtggcggatccgtggggagggtcctacatgatggagtgcttgactaacgacgtgtacgacgctgcgctgaagctgatcaacgagattgaagagatgggagggatggcgaaggcggtggccgaaggaattcctaagctgaggatcgaagaatgtgcagctagacggcaggctcgcatcgattcgggaagcgaagtgatagtcggagtcaacaaataccagctggagaaggaggacgctgtggaagtgctcgcaatcgataatacctccgtgcgcaataggcagatcgagaagctgaagaagatcaagtcctcgcgcgatcaggcgctggctgagaggtgcctggcagcgctcaccgaatgcgcggcgtccggcgacgggaacatcctggcgctggcagtggacgccagccgagcgcgctgcaccgtcggagagatcactgacgcactgaaaaaagttttcggcgaacacaaggctaacgatagaatggtgtcaggagcctaccggcaggaatttggagagtccaaggagatcacttcggccatcaaaagagtgcacaagtttatggagcgggaaggtagacggcctcggcttctggtggcaaagatgggacaggatggacatgatcggggggcaaaggtgatcgctaccggcttcgcggatctcggattcgacgtcgatatcggcccactgttccagaccccaagagaagtggcccaacaagccgtggatgccgatgtgcacgctgtcgggatcagcactctggccgcaggccacaagacccttgtgccagaactgatcaaggaactgaattctctgggacgcccagatatcctggtgatgtgcggcggagtcatcccaccgcaggattatgaattcttgttcgaagtgggagtctccaacgtgttcggacccggaactcgcatccctaaagcggcggttcaagtgctcgacgatatcgagaagtgcctcgagaaaaagcagcaatcggtc

SEQ ID NO: 5673 - DNA, 2250 bp, Artificial Sequence
  derived and/or modified sequence
atgctgcgggctaagaatcagttgttccttctgtcgcctcattacctcagacaggtgaaggagtcaagcggcagtcgcctgatccagcagcgtctgctgcaccagcagcaaccgctgcaccccgaatgggcagctctagcgaagaaacaacttaagggaaaaaaccccgaggacctgatttggcacacgcccgagggaatctcaatcaagcctttatactcaaagcgcgatacaatggacttgcctgaagagcttcccggtgtcaagccgttcacccggggaccctacccaaccatgtacaccttccgaccctggaccatacggcaatacgctggcttttctactgtggaggagtccaacaaattctacaaagacaatattaaggcaggccaacaaggtttgtcggtcgcctttgacttagctacccatagaggatacgattcggacaaccctagagtaaggggggatgttggtatggcaggcgtggcaatcgataccgtggaagacaccaagattctgtttgatggaatcccactggaaaaaatgagcgtaagcatgacaatgaatggcgctgtgatccctgtcctggcaaactttatcgtgacaggggaggaacaaggcgtgcccaaggagaaactgacgggcaccatacaaaatgatatcctgaaagagtttatggtccgcaatacatatatcttcccccctgagccttccatgaaaatcattgcagatatcttcgagtacacagctaaacatatgccaaaatttaactcaatctccatcagcggataccacatgcaagaagcaggcgcagatgctatactggaattagcgtataccctggccgatggactggagtatagtcggaccgggctgcaggctggactcaccatagatgaatttgcgcctcgtctctcattcttctggggcattgggatgaacttttacatggaaatcgctaagatgagagccggtagaaggctgtgggcacatctgattgagaagatgttccaaccaaagaatagcaaatctttgctgttgagagcacactgccaaactagcggatggtcacttaccgaacaagacccgtataacaacatcgtaagaaccgcaattgaggctatggcagcagtctttgggggcacccagagtctgcataccaactccttcgatgaggcccttggcctgccaaccgttaagagcgctaggatcgctaggaacacgcaaatcattatccaggaggaaagcggcatcccaaaagttgcggatccatggggtggctcctatatgatggaatgtcttaccaacgacgtgtacgatgctgcgctgaagcttattaacgaaattgaagagatgggaggaatggcgaaagcggtcgccgaggggatccctaagctgaggatcgaagagtgcgctgcacgacgacaggctcgaatcgacagcggatctgaggttattgtgggagtgaacaaatatcagctggaaaaagaagacgctgtcgaggtgctggctatcgacaatacctccgtgagaaatagacagatcgagaagctgaaaaagatcaagagcagcagagaccaggcattggccgagagatgccttgcggcgctgactgaatgtgctgcttccggcgatggtaatattctcgcccttgcggtggacgctagcagagcaaggtgtaccgtgggagaaatcactgacgccctgaagaaggtcttcggggagcataaggccaacgatagaatggtcagcggagcctacaggcaagagtttggagaatctaaggaaatcacatcagctattaaaagagtgcataagttcatggaacgcgagggcagaaggccacgcttactggttgctaagatgggtcaggatggccacgaccgcggtgcaaaagtgattgctaccggatttgccgatttgggctttgatgtcgatatcgggcccctatttcagacacctcgggaagtagctcagcaggctgtcgacgccgacgtccacgccgtgggcatcagcacccttgctgctggccacaagacactggttcccgaactgatcaaggaactcaatagcctgggacgcccagatatcttagtgatgtgcgggggagtcattcccccccaggactatgaattccttttcgaggttggagtctcaaacgtttttggacccggcactagaatccccaaagccgctgtgcaagttctcgacgatatcgagaaatgtctggaaaagaagcaacaaagtgta

SEQ ID NO: 5674 - DNA, 2250 bp, Artificial Sequence
  derived and/or modified sequence
atgctacgagctaaaaaccaactgttcctgctgtccccccactaccttaggcaggtgaaggaatcttctgggagtcgcctgatacagcagcgcctactccatcagcagcagccattacaccccgagtgggccgctctcgctaaaaagcagcttaaaggtaagaaccccgaggacctgatttggcacacacccgaaggaatttccatcaagcctctgtactctaagagggataccatggatttgccagaggagcttccaggggtgaagcctttcacgcgggggccatacccaaccatgtatactttccggccctggacgatacgccaatatgccggattctcaaccgtggaagagtctaacaaattctataaggataatattaaggcgggacagcaggggctgtcagtggctttcgatcttgcaacccatcgaggttacgatagcgacaacccacgcgtgcggggcgatgtgggcatggcaggggtggctattgacactgtcgaggacacgaaaattcttttcgatggcatcccgcttgagaagatgtccgtgtccatgacaatgaatggcgctgtgatccctgtcttagcaaactttatagtcacgggtgaggaacagggagtgcctaaggaaaagcttacaggcaccattcaaaacgatatcttgaaggagtttatggttcggaatacctatatcttccctcctgaaccatcaatgaaaataatagccgacatcttcgagtatactgctaagcatatgcccaaattcaactctatcagtatcagcggataccacatgcaggaagccggtgccgacgctattctggagctggcctacactctggctgatggactggagtacagcaggaccggtctgcaggccgggctgacgatcgacgagttcgctccgagactgtccttcttctggggtatcgggatgaacttctacatggagatagcaaaaatgcgggctggtagacggctgtgggcccatcttatcgagaagatgtttcagcctaagaactctaagtctttattacttcgagcccattgtcagacttcaggatggtctctgacagagcaggatccttacaataatattgtccgcaccgcgatcgaggctatggccgccgtgttcggcgggactcagagcctacacacaaactccttcgacgaagctctaggcctacctacggtaaagtcagccagaatcgcccggaatacccaaatcatcatccaggaggagtccggcatccccaaggttgccgacccttggggaggatcttatatgatggaatgcctgactaatgatgtgtatgacgcagccctaaagctgatcaatgagatcgaggaaatgggagggatggccaaagccgtggccgaaggaattccaaaactgcgcatagaagagtgtgcagcacgtagacaagctcggatcgactccggctctgaggtgatagtaggagtgaataagtaccagctggagaaagaggacgctgtggaagtcctggcaattgataacacctctgtgcgcaaccgtcaaatcgagaagctgaagaaaattaagagttctagggatcaagcgttggccgagcgctgcctcgctgccctgaccgaatgcgctgcctctggcgatgggaatattctcgcactggcagtggatgccagtcgagcccgatgtacagttggtgagatcaccgatgctctcaagaaggtattcggggagcataaggccaatgacaggatggttagcggagcttaccgccaagagtttggggagtccaaagagatcacttctgccatcaaaagagtgcacaagtttatggaacgagaggggaggcggccacgactcttggtcgcgaagatgggacaggatggacatgatagaggggccaaagtgatagccactggctttgctgacctgggctttgacgtcgacatcgggccgctgttccagactccaagggaggttgcacagcaggctgtagacgctgacgtgcacgccgtgggcattagcactctggcggccggccataaaactctggtgcccgaactcattaaagaactgaattctttagggagacctgatatcctggtcatgtgcggaggagtaattcccccgcaagactatgaattccttttcgaagtgggtgtcagcaacgtgttcggacccggcacccgtattcctaaagctgccgtgcaagtgctcgatgatatcgagaagtgcctggaaaagaaacagcagagcgtt

SEQ ID NO: 5675 - DNA, 2250 bp, Artificial Sequence
  derived and/or modified sequence
atgctgagggcaaagaatcagctgtttctgttgagccctcactatctgcggcaggtgaaagaaagtagtggcagccgacttatccagcaacgactcctccaccagcaacagcctctgcatcctgaatgggcagccctggctaagaagcagcttaaagggaagaaccctgaggatctgatctggcatacacctgaggggatctctattaaacccctctactccaaacgggatacaatggacctgccagaagaactgccgggcgtgaagccatttactcggggcccttaccccactatgtatacgttccggccttggactataaggcagtacgccggcttcagtactgtggaagagtcaaacaagttttataaggataacattaaggcgggtcagcagggactcagcgtagcatttgacctggctacgcatcggggatacgactctgacaaccctcgggtgaggggcgacgtgggtatggcgggtgtggccattgacactgtcgaggacaccaaaatcctcttcgacgggataccactggagaaaatgtctgtttcaatgacaatgaacggagcggtgatccccgttctggccaacttcatcgttacaggcgaggaacagggcgtgcctaaagagaaattgacagggactattcagaacgatattctgaaagaattcatggttcgcaacacctacatcttccctcccgagccctcaatgaagattatcgcagatatttttgaatatacagccaagcatatgccgaagtttaactctatttctattagcggctaccacatgcaagaggccggagcggacgcaattttggagctggcatacacactggctgatggactcgagtattcacgaacaggccttcaggcaggtctcacaatcgatgaatttgcccctaggctgtcattcttctggggcatcgggatgaacttttatatggaaattgcgaaaatgcgcgccgggcgaagactttgggctcacttgattgagaagatgttccaaccaaaaaactccaaatctctgcttcttagagctcattgccagacttccggatggagtctgaccgaacaggatccttataataatattgtacggactgcaattgaggccatggccgccgtgtttggtggaacacagtctctccacactaactctttcgacgaggctttgggccttccaacggtgaagtcagcccggatcgcaagaaacacccagatcattatccaggaggagtctggcatccccaaagtggccgacccctgggggggatcttacatgatggagtgtctgaccaatgacgtctacgatgccgccctcaagctgatcaatgagatcgaggaaatgggcggtatggccaaagccgtggccgaaggaattcccaagcttcgaatcgaagagtgcgccgctcggcggcaggcccggatagatagcggctccgaagtcatagtgggagtgaataaataccaactggagaaggaggacgccgtggaggtgctggcaattgacaacaccagtgtcaggaatcgacagatcgaaaagttgaaaaaaatcaaatcttcccgagatcaggctctggcagaaaggtgtcttgctgcactcacagaatgtgccgcctctggcgatgggaacattctggccctcgccgttgacgcctctcgcgccaggtgcactgtaggtgagattaccgatgccctgaagaaggtatttggggagcataaagcgaatgatcggatggtgagcggagcctaccgccaggagttcggagaaagcaaagagatcacaagcgccattaagcgcgtgcataagttcatggagcgggaggggcgccgacctcggctgctggtggccaaaatgggtcaggatggtcacgacagaggagcaaaggtaattgcaactggctttgcggatctgggctttgacgtagacattggtcctctcttccagacacctcgagaagtggcccaacaggcggttgacgcggatgtgcacgcggtgggcatcagcacactcgctgcagggcataagactctcgtgcctgagttgatcaaggaactgaactcactgggacggccagacatcctggtcatgtgcggaggcgtcattccgccacaagactacgagttcctgttcgaggtgggcgtaagcaatgtctttggccctggaaccagaatcccgaaggccgctgtgcaggtgctcgatgatatcgaaaaatgtctcgagaagaaacagcagtctgta

SEQ ID NO: 5676 - DNA, 2250 bp, Artificial Sequence
  derived and/or modified sequence
atgctgagagctaaaaaccagctatttctgctgtctccccactatcttaggcaggttaaagaatcttctgggtctagactgatacagcagcggttgttgcatcagcagcagccattacatcccgaatgggccgccctagcaaaaaaacaacttaagggaaaaaatcccgaggatctgatttggcacacacctgaaggaatcagtatcaaacctctctatagtaaacgggatacaatggatcttcccgaggaactgccaggagtaaagccatttactagaggaccatatcccactatgtatacatttcggccttggactattcggcagtatgcagggttctctacagtagaagaaagtaacaaattctataaagataatatcaaagccggacagcagggactgagtgtagctttcgatttagccactcatcgcggatatgactcagataacccaagggttaggggggatgtggggatggccggggtcgccatcgatactgtcgaggatactaaaatacttttcgatggaatccccctcgaaaaaatgtctgtgagtatgacgatgaacggagctgtcatacctgtcctggcgaattttatagtgacaggggaagagcagggggtgccaaaagaaaaattgacaggaacaatacagaacgatattttgaaggagttcatggtccgcaatacatatatattcccccctgaaccctctatgaaaatcatcgccgatatcttcgaatacacagcaaagcatatgccaaaattcaatagtatctctatttctggatatcatatgcaggaagctggggcagatgcgatcctcgaactagcttatactctagctgatgggctggaatacagtagaacagggctccaggctggactgactatcgatgaattcgctccacgactatccttcttctggggaatagggatgaacttttacatggaaatagcaaaaatgcgcgctgggcgacgcttatgggcccacctcattgaaaaaatgtttcagcctaaaaactctaaatccctcctactgagagctcattgccagacaagtgggtggagtcttacagaacaggatccatacaataacattgtgcggacagccatagaagctatggccgcagtattcggggggacacaaagtctgcacacaaattctttcgacgaagcccttggactccctacagtgaagagtgctagaatcgccaggaatacgcagattataatccaagaagaaagtggaattcctaaagtggccgacccctgggggggatcctacatgatggaatgcctcactaatgacgtctatgatgccgctttgaaactcattaatgaaattgaagaaatggggggaatggcaaaggctgttgctgaaggaattccaaaactccgaatagaagaatgtgctgcacgacgccaggcacggatagattcagggtccgaggtgatcgttggggtcaacaaatatcagctggaaaaagaagatgccgtggaggtcctcgccatagataatacatctgtgcgcaatcgacaaatagaaaaactaaaaaaaatcaaatcatctagagatcaggcactagctgagaggtgcttagcggctcttactgaatgtgcggcatctggggatgggaacatcctcgctctcgcagtagatgcttctcgcgctcgctgtacagtaggggagattacagatgctttaaaaaaagtgttcggggaacataaagcgaatgatcgcatggtatctggagcatataggcaggaatttggggaatctaaagaaataactagtgctataaagcgggtgcacaaattcatggaacgggaggggagacgacctcggctccttgtggccaaaatgggacaggatggacacgatagaggggccaaagttatcgccacaggattcgcggatttgggattcgatgtggatatcgggccactgtttcagacacctcgggaagtggcccaacaggctgtggatgcagacgttcacgccgtggggatcagtactctcgctgcaggacacaaaacactggtgcctgagctaatcaaagaacttaattccttggggcgtcctgatattctggtgatgtgcggaggagtgatcccaccccaggattatgaattccttttcgaggttggagttagtaatgtgttcgggccagggactcggatacctaaggccgccgttcaggtgttagatgatatagagaagtgccttgaaaagaaacagcagagtgta

SEQ ID NO: 5677 - DNA, 2250 bp, Artificial Sequence
  derived and/or modified sequence
atgctgcgggcaaagaaccagctttttctcctgtcccctcactacctgagacaggttaaggaaagtagcggctctcggctgatccagcaacgcctcctgcaccaacagcaaccgttgcatcctgagtgggctgcgctggccaagaagcagttaaaaggcaagaacccagaggacctcatctggcacacacccgagggaatctcaatcaagcctctctattctaaacgggacaccatggacttgcctgaggagttgcctggcgtcaaacctttcacacgcgggccttacccaaccatgtataccttccgcccctggacgattcggcagtatgccggcttcagcacagtggaagaatcgaacaagttttacaaggacaatataaaggccggtcagcaaggcctgagcgtggcattcgacctcgccacacacagagggtacgactcggacaatcccagggtgcggggggatgtcggcatggccggggtagctatcgacaccgtggaggacactaagatccttttcgatggcataccactggagaagatgagtgtgagcatgactatgaatggggctgtgattcccgtgctggccaactttattgtgacaggggaggaacagggtgtacccaaagaaaagctcaccgggactatacaaaacgatattcttaaggagtttatggttagaaacacgtacatctttcctccagaacccagtatgaagatcatcgccgacatctttgaatataccgcaaagcatatgcccaagttcaatagcattagcatcagcggataccacatgcaagaggcaggagctgacgctatcctggaactggcttataccttggcggacggtctagaatactcgagaaccgggctgcaggccggtctgacaatcgacgagtttgccccaaggctgtctttcttttgggggatcggcatgaatttttacatggagattgccaagatgcgagcagggcgcagattgtgggcgcacctgattgagaagatgttccagccaaagaactccaagtctctgttgcttcgggcacactgtcagactagcgggtggtcccttacagagcaggatccgtacaacaatattgtgcgtactgctatcgaggccatggcagctgtgttcgggggcacacaatcattgcataccaattcatttgatgaggccttgggtctgcctacagtaaagagcgctagaattgcacgcaatacacagatcatcatccaggaggaatcagggattcccaaagtggcagatccttggggggggagctatatgatggaatgcctcacaaacgatgtgtatgatgcagcattgaaactcattaacgagatagaggagatgggaggcatggccaaagccgttgctgaaggtatccctaagcttaggatcgaggagtgtgccgccaggaggcaggctcgcatcgatagtggaagcgaggtgattgtgggagtgaacaaatatcaactggaaaaggaggatgcagttgaggtgctagccatagataatacctcagttcgcaaccggcagattgagaaactcaaaaagataaagtcgagccgagaccaggcgttggcggagaggtgccttgcagcactcactgagtgtgcggcgtccggtgacggtaacattctggctctggctgtggatgccagtagagcaaggtgcacagtgggcgaaatcacagacgctctcaagaaggtgtttggagagcacaaagccaatgatagaatggttagcggggcgtaccgccaggaattcggggagtcaaaagagattacaagcgctattaagcgcgtgcacaagttcatggagcgggaggggaggagaccccgattactggtggcaaaaatgggccaagatgggcatgacaggggagccaaagtcatcgccacggggttcgcagaccttggctttgatgtggatatcggtcctctgtttcaaacaccacgcgaggtggcccagcaggctgtggatgctgacgtgcatgccgtaggaatcagcacattggccgccggacacaagaccctggtccctgagctgatcaaggaactgaatagcttgggaaggccggacattctagtcatgtgcggaggcgtgatccccccccaggactacgaattcctctttgaggtgggcgtttccaatgttttcggacccggaacacgaatcccaaaagctgcagtccaggttctggacgatatcgagaagtgtctggagaagaaacagcagagcgtg

SEQ ID NO: 5678 - DNA, 2250 bp, Artificial Sequence
  derived and/or modified sequence
atgctcagggcgaaaaaccaactgtttcttctcagcccccattacctcagacaagtgaaagagtcatcaggctcgagattgatccaacagcgactgctccatcagcagcagcctctgcatcctgagtgggcggcccttgcgaaaaaacagctgaagggaaagaacccagaagatcttatctggcatacgcctgagggtatttcgattaaacctctttactctaagagggatacgatggatctgcctgaagagcttccaggtgtgaagccatttaccagaggaccctacccgaccatgtacacttttagaccatggactattagacaatacgcaggtttctccacggtggaagagtcgaataagttttacaaagataacataaaggcgggacagcaaggcctttcggtcgcctttgatctggcaacgcaccgaggttatgattccgataaccctagagtgcggggcgacgtgggcatggcaggagtggcaatagataccgtggaggataccaaaattctgttcgacgggatcccgcttgaaaagatgtctgtgtccatgactatgaacggcgctgtcatccctgtgcttgccaatttcatcgtcaccggtgaagaacaaggagtccctaaggagaaactcactggaactatacagaacgatattctgaaggagttcatggtgaggaatacgtacattttccctccagagcctagcatgaagattattgctgatatctttgagtataccgcgaaacatatgccaaagtttaactcgatatccatatctggataccatatgcaggaagcaggggcagatgcaatccttgaactcgcttacacccttgccgacggattggagtattccaggaccggcctccaagccggcctgacgatagatgagtttgcacctcgtctgtcctttttctggggaattggtatgaacttctacatggaaattgccaagatgagagcaggccggagactgtgggcccatttgattgagaagatgttccaaccaaagaacagcaagtcgttgctcctcagagcacactgccagacttcagggtggagccttaccgagcaggatccgtacaacaacatagtgcgtaccgcaattgaggccatggctgccgtgttcggtggaactcagtcgcttcatacgaactcgttcgacgaagccttgggtctgcctactgtcaaatcggcaagaattgcacgaaacactcagatcataatccaggaggagtcagggattcccaaggtcgccgatccttggggaggttcctacatgatggaatgtctcactaacgatgtctacgatgcagcactcaaactgattaacgaaatcgaagagatgggaggtatggcaaaagccgtggcggaaggaatccctaaacttcgaattgaagaatgcgccgcacgccggcaagctcgcattgattcaggaagcgaggttattgtgggcgtgaataagtaccaacttgagaaggaggatgccgtggaagtgcttgctatagacaatacctccgtccgtaatagacagatcgaaaagctgaaaaagatcaagtcgagccgagatcaggcacttgcagagcgctgtcttgccgccctgaccgaatgtgctgcaagcggagacggcaatatcctggccctggctgtcgatgcatcacgcgcacgctgtaccgtgggagagatcactgacgcacttaagaaggtctttggagaacataaggcaaatgacagaatggtgagcggggcctaccgccaagaattcggtgaatccaaggaaattacctcggcaatcaagcgggtgcataagtttatggagagagaaggaaggcgtcctcggttgctcgtggccaaaatgggccaagatggccatgatagaggggcgaaggtgattgcaacgggttttgcggatcttgggtttgatgtggatattggacctctcttccaaacccctagggaagtcgcacaacaagcagtcgatgccgatgtgcatgccgtcggcatctcaaccctggcagccggtcataaaaccctcgtgccggaactcatcaaggaacttaattcactcgggcgtcccgatattctcgtgatgtgtggaggagtgatacccccacaggattacgagtttctcttcgaagtgggagtgtcaaatgtctttggaccaggtacccggattccaaaggcagctgtccaagtgctggacgatatagagaaatgtctcgaaaagaagcaacaatcagtt

SEQ ID NO: 5679 - DNA, 2250 bp, Artificial Sequence
  derived and/or modified sequence
atgctgcgggctaagaaccaactcttcctgttgtcaccgcactaccttagacaggtcaaagagagctccggctccagactgatccagcagcggctcctgcatcagcagcagccactgcatccagagtgggcagcacttgcaaagaagcaacttaagggcaagaatcccgaagacctcatctggcacacccctgaagggattagcattaaaccgctgtactctaaaagggataccatggacctcccggaggagcttcctggggtgaagccgttcaccagaggcccatacccgactatgtacaccttccggccgtggaccatccgccagtacgccggattctcaactgtcgaagaatcaaataagttttacaaagataacataaaggccggacagcagggtctgagcgtggccttcgatctggcaacccatcggggttacgactcagataaccctcgggtccgcggcgacgtgggaatggctggagtggcgatcgataccgtggaagacaccaagatcctcttcgatggaatccctctggaaaagatgtcggtaagcatgactatgaatggagcggtgatccctgtgctggctaacttcattgtgaccggtgaggaacaaggcgtccctaaagagaagctgactggcactattcagaacgacatcttgaaggaatttatggtccggaatacttacatttttccaccagagccatccatgaagatcatcgcagacatctttgagtataccgcaaagcacatgcctaagtttaactccatctcgatctccggatatcacatgcaggaagcaggagccgacgcaatcctcgaattggcttacaccctggccgacggcctggagtactcgcggacgggtctgcaggccggattgactattgatgagttcgctcctcggctgtcgttcttctggggtatcggaatgaacttttacatggaaattgccaagatgcgggcgggtcggcgcctgtgggcgcatctcatcgaaaagatgtttcaaccgaaaaattcgaaaagcctgctgcttagagctcattgtcagacgtcggggtggagcctgactgagcaggacccgtacaataacatcgtccgcactgcaattgaagccatggcggccgtcttcggagggactcagtcgctgcacaccaactcgttcgacgaggccctggggctgcctaccgtgaagagcgcccgcatcgccagaaatactcagatcattatccaggaagaaagcggaatcccaaaggtggcggatccctggggaggctcgtacatgatggagtgcctgaccaacgacgtctatgatgcggcattgaagctcatcaacgaaatcgaagagatgggcggaatggcgaaggccgtggcagaaggaatcccgaaactccggatcgaagaatgtgcagcgcgccgccaggcgcggatcgactccggaagcgaggtgatcgttggagttaacaagtaccagctggaaaaggaagatgccgttgaggtgctggccatcgacaatactagcgtgcggaatcgccagatcgagaagctgaagaagatcaagtcctcccgcgaccaggccctcgcggagagatgccttgcggcgctgactgagtgcgctgcctcgggagacggtaacattcttgctctggccgtcgacgcctcgcgggcacggtgcactgtgggggaaatcaccgatgctttgaagaaggtcttcggagaacacaaggccaatgaccgcatggtgtctggagcgtaccgccaggagttcggagagtcaaaagaaatcactagcgccatcaagcgcgtccataagttcatggaacgagagggtcggcggccgcggctgttggtggcgaagatgggacaagacggacacgatagaggcgctaaggttatcgctaccggattcgccgacctcgggttcgacgtggatatcggacctctgtttcagaccccgagagaagtggcgcagcaagctgtcgacgcagacgtgcacgcggtcggcatctcgaccctcgctgcaggccacaagactctggtcccagaactgatcaaggagctgaactcactgggacggcctgatatcctcgtgatgtgtgggggcgtgatccctcctcaagattatgaatttctcttcgaagttggagtctccaacgtgttcggtccgggcactcgcatcccgaaggccgccgtgcaggtgctggacgacatcgagaagtgccttgagaagaagcagcaatccgtg

SEQ ID NO: 5680 - DNA, 2250 bp, Artificial Sequence
  derived and/or modified sequence
atgctgagggcaaagaatcaactttttctgctctctccccattacctgcgacaagtgaaggagtcaagcggatcgagacttattcagcagcgtttgctgcaccaacagcagcccctgcacccagagtgggcagcattggcaaagaagcaacttaaggggaaaaatcccgaggatctgatttggcatactcctgagggcattagcataaagcctttgtacagcaagcgggacactatggacctgcctgaggaacttccaggagtgaaacctttcaccagggggccttaccccactatgtacacgttcagaccctggacgatccgtcaatacgcaggattttcgactgttgaagagtcaaacaagttttacaaggacaacataaaagccgggcaacaaggattgtccgtggcgttcgatcttgcaacccataggggttacgatagtgacaatccacgcgtgagaggcgatgtgggcatggcaggagtggccattgacactgtcgaagatacgaagattctgtttgatggaatacctctggagaaaatgtcggtgagcatgactatgaatggcgccgtgattcccgtccttgctaactttatcgtgactggagaagagcagggagtgcctaaagagaagctgacgggaacgatccagaacgacattcttaaggaattcatggtcagaaatacctacatctttcctcctgaaccttccatgaagattatcgcagatatcttcgaatacaccgctaagcatatgccgaagtttaactcaatcagcatatccgggtatcacatgcaggaagcgggagcagatgcaatccttgagcttgcctacaccctggcagacggacttgaatactcccggactggccttcaagccggacttacgattgatgaatttgcaccccggctctcgttcttctggggcattggaatgaatttctacatggaaattgcaaagatgagggcaggtcgcaggctgtgggcccaccttattgagaagatgttccaaccgaagaacagcaagtcactgttgttgagagcacactgtcagactagcggttggtcgcttaccgagcaagatccatacaacaatatcgtgcggaccgcaatcgaagctatggcggcagtgtttggaggtactcagagcctgcacactaacagctttgacgaagcgcttggacttccaaccgtcaagtcagcgcgcatcgcaagaaatacccaaatcataattcaggaagagtcgggcattccaaaggtggccgatccttggggaggaagctatatgatggagtgcctgactaacgatgtctacgatgcagccctcaaactcatcaacgagatcgaggaaatgggtggtatggccaaggccgtcgcagaaggaatcccaaagctgcgaattgaagagtgtgcagcgcgcaggcaagcacgcattgatagcggatcagaagtgatcgtgggagtgaacaagtaccaacttgagaaagaagatgcagtcgaagtgctggcaattgataacacttcggtgcgaaaccgccagattgaaaagctcaagaagatcaaatcctcccgtgaccaagcacttgcagaaagatgcctggcagccttgactgaatgcgcagcatccggtgatgggaacattctggcactcgctgtggatgcgtcgagagctaggtgtactgtgggagaaatcactgatgcactgaaaaaggtgttcggagaacataaggcaaacgatcggatggtgtcgggtgcataccggcaggaatttggcgagagtaaggaaattacctccgctataaagagagtgcacaaattcatggagcgggaaggcaggcgcccaagacttctcgtggcaaagatgggtcaggatggccacgataggggcgcgaaagtcatcgctactggatttgctgatctgggttttgatgttgatattgggccgctctttcaaaccccaagagaagtggcacagcaagcagttgatgcagatgtgcatgctgtcggaatttccaccttggccgccgggcataagacccttgtgccagagcttatcaaggaactgaactcgttgggacgacccgatattctggtgatgtgtggcggcgtgataccacctcaggattacgaatttcttttcgaagtgggtgtgtcgaacgtgttcggacccggcaccagaattcccaaagcggcggtgcaagtgttggacgacattgaaaaatgtctggaaaagaagcaacaatctgtc

SEQ ID NO: 5681 - DNA, 2250 bp, Artificial Sequence
  derived and/or modified sequence
atgctgagagctaagaaccagttgttcctgctcagtccacactatttgcgtcaggtgaaggagtcgtcaggcagcagactcatccagcagaggctgctgcaccagcaacaacctctgcaccccgaatgggctgccctggccaagaagcagcttaaaggcaaaaatccagaagatcttatctggcacacgccggagggcataagtatcaaaccattgtattcaaaaagggatactatggacctgccagaggagctgcccggcgtcaaacccttcactaggggcccgtaccccactatgtatacatttagaccctggactattagacaatacgctggatttagtactgtcgaagagtctaataagttttataaggacaatattaaggcgggacagcagggtctgtctgtggccttcgatcttgcaacccatcgcggctatgatagtgataaccctcgcgttcgcggcgatgtaggcatggctggggtcgctattgatactgtcgaggatacgaagatactgttcgatggtatccctctggagaagatgtccgtttccatgacaatgaatggcgccgtaatccctgtactcgctaacttcatagtgacaggggaagaacagggagtgcccaaagaaaaactgaccgggaccattcagaacgatatcctaaaagagtttatggtcaggaacacttacatctttccaccagaaccgtctatgaagatcattgctgacatttttgaatacactgcgaaacacatgcccaaatttaattcgatcagtatatctgggtatcacatgcaggaagctggcgcagatgcaatcctggagctcgcatatacattggccgatgggttggagtattctagaactggactgcaggccggacttaccatcgacgaattcgctccacggctctcgtttttctggggcatcggtatgaatttctatatggagatcgccaaaatgcgggctggaaggaggctgtgggcccatttgattgagaagatgtttcagccgaaaaacagcaagtctctgttgttgcgggcccactgccagaccagcggctggtctttgacggaacaggatccctacaacaacatcgtccgaactgctatcgaggcaatggctgccgtcttcggaggcacccagagccttcacaccaatagtttcgatgaggccttaggcctgcccactgttaaaagcgctcggatagccagaaatacacagattattattcaggaagagtccggaattcctaaggtggccgatccgtgggggggctcttatatgatggaatgtctcaccaatgacgtctacgatgccgccctgaaactcattaatgagattgaggagatgggcggaatggccaaagctgtggcggaaggaatccctaaactgaggatagaagagtgtgctgctagaaggcaagcccggatcgacagcggttcagaggtcattgtgggtgttaataagtatcaactggagaaagaggacgcagtcgaggtcttggcgattgacaatacctcagttcgaaacagacaaatagagaaactcaaaaagatcaaatccagtcgcgaccaagctctcgctgagcgctgtctggctgcactcaccgaatgtgccgcctccggtgacggtaatatcctggccctggccgttgatgcctcacgagcgcgttgcaccgttggtgagatcactgacgcattgaagaaagtgttcggggaacacaaagccaacgacagaatggtgtccggagcctatagacaggagttcggggagtccaaagaaatcacctcagcaataaaaagagtccacaagttcatggaaagggaaggccggaggccacgactgctagttgcgaaaatgggtcaagacggacatgataggggcgccaaggtaattgccactggttttgccgacctcggatttgatgtcgatatcggtcccctgtttcagaccccgagggaagtcgcccagcaggctgtggacgcggatgtccacgcggtcggaatttctaccctagctgctgggcataagaccttagtccccgagctgatcaaggaattgaatagtctaggcagaccggatattctcgtgatgtgtggcggagttatccccccacaggactatgagttcttgttcgaagttggcgtgtctaacgtctttggcccaggaacaaggatccctaaagctgccgttcaggttctggatgacattgagaaatgccttgaaaagaagcagcagagcgtt

SEQ ID NO: 5682 - DNA, 2250 bp, Artificial Sequence
  derived and/or modified sequence
atgctcagggccaaaaatcaactctttttgctgtctccccactatttgcgtcaagttaaggaatcatccgggtcacgcctcattcagcagcgactcctgcaccaacagcaacctctgcaccccgaatgggccgccctcgctaagaagcagctgaaaggcaagaatccagaagatttgatttggcatactcccgaagggatcagcattaaacccctgtatagtaagcgagatacaatggatcttccggaagaactgccaggcgtcaagcctttcacacgtggtccctaccccaccatgtacacgttccgtccttggacaatcagacaatatgctggattttcgaccgtagaagaatccaacaaattttataaggacaatataaaggcaggacagcagggactgtctgtcgcctttgatctcgcgacgcatagaggctatgactctgacaatcctcgggtacgcggcgacgtcggtatggccggagtggctatagataccgtcgaagacaccaagattctattcgacggaatcccccttgagaaaatgtcagtgagcatgaccatgaatggagctgttatacctgtgctcgcaaattttattgttaccggggaagagcagggagtccctaaggagaaacttactgggacaattcagaacgatatattaaaggagttcatggttcgcaacacgtacatcttcccccctgagccatcaatgaagatcattgccgatatctttgagtatacagccaaacacatgcctaaattcaacagtatctcaattagtggttaccacatgcaggaggctggggccgatgccatcttggagctcgcgtacacactggccgacggcctagaatactctcgcacaggacttcaggctggactgactattgatgaatttgctcctcgtctgtcattcttctgggggattgggatgaatttttatatggagattgccaagatgcgggctgggcgacgactttgggctcacttgattgagaaaatgttccagcctaaaaattccaagtcactgctcttacgagcacactgtcagacttctgggtggtccctgaccgagcaggatccgtataataacatagtgaggactgccatcgaggcgatggctgcggtgttcggaggtacacaaagtctccacacaaattcctttgatgaggccctgggcttgcccacagtgaagtctgccaggatcgcccggaacacccagattattatccaggaggaaagtggcattcctaaggttgctgacccatggggcggaagttacatgatggaatgtctgacaaacgatgtgtatgacgccgctttgaagctcataaacgagatcgaggagatgggagggatggccaaggccgtggccgaggggattcctaagcttcgaatcgaggagtgcgccgcccgacgacaggctaggattgactccggctctgaagtaatagtgggagtaaacaagtaccagctggaaaaagaggatgccgtcgaggtcttggccatagacaatacttcagtgagaaacagacaaatcgagaagttgaaaaaaattaagagtagccgtgaccaggcactcgccgagcgctgcctcgccgcgctcaccgaatgtgctgcttctggcgacggtaacattcttgctttagctgtcgacgcaagccgggcgcgctgcacggtcggggagattacggacgcgttgaagaaggtattcggcgagcacaaggccaacgaccgcatggtttccggagcctaccggcaggagttcggagagagtaaggagatcactagcgcgatcaagcgggtgcataaattcatggagagggaggggaggcgtccacggctgcttgttgccaagatgggtcaggacggccatgataggggagcaaaagtaattgccacaggctttgcggatcttggattcgacgtcgacatcggccccttgttccagacccctcgagaggttgcacagcaggccgtcgatgccgacgtgcacgcagtgggcatctctaccctggcagcgggacacaagacccttgtgcctgagctgatcaaggaattaaattccctcggccgccctgacatcctggtgatgtgcggcggggttatcccaccccaggactatgagtttctattcgaggttggtgtctccaatgtcttcggacctggtactcgcatacccaaggccgccgtccaagtcctagacgacattgaaaaatgtctggaaaaaaagcagcagagtgtg

SEQ ID NO: 5683 - DNA, 2250 bp, Artificial Sequence
  derived and/or modified sequence
atgttgagagcaaaaaaccaactttttctcctcagcccccactatctccgccaggttaaggaatccagcggctcccgcctgatccagcagaggttgctccaccagcagcagccactgcatcctgagtgggctgctctcgccaagaagcaactcaagggcaagaaccctgaggatttgatctggcacaccccagagggtatttccattaagcctttgtacagcaaaagagacactatggatctcccagaagagctgcctggtgtgaagcctttcaccaggggaccctaccccactatgtacacatttaggccatggaccatccgtcaatacgctggcttctccactgtggaggagtccaacaagttttataaggataacatcaaggcaggccaacagggactttctgtggcctttgacttggccactcacaggggctacgatagcgacaaccccagggttaggggtgatgtcggcatggccggcgtcgcaatcgatacagttgaggacaccaagatcctcttcgatggcatcccccttgaaaagatgagcgtgtccatgacaatgaacggcgctgtgattcctgtgctcgcaaatttcattgtgacaggtgaagaacaaggagttcccaaggaaaagctgaccggcaccattcagaacgacatattgaaggagttcatggtgagaaacacctacatcttcccccctgagcctagtatgaaaatcattgctgatatcttcgaatacacagcaaaacacatgcctaagttcaactctatctcaatatccggttaccacatgcaggaggcaggagctgacgccattcttgagttggcttacacccttgctgatggcctggagtactctcgtaccggtctccaggccggattgactattgatgagttcgctcctagattgtccttcttctggggaatcggcatgaacttctacatggagatcgctaagatgcgcgctggaaggcgtctgtgggctcacctcattgaaaagatgttccaacctaaaaattcaaagagcctcctgctgcgcgcacattgccaaacatctggatggtcactgacagaacaggacccttacaacaacattgttagaaccgctatcgaggccatggcagccgtattcggtggaactcaaagcctccataccaactccttcgatgaggccctcggtttgccaaccgtgaagtctgctagaattgccagaaacacccagatcataatccaggaggaaagtggaattcccaaggtcgctgacccctggggcggaagttacatgatggagtgcctgacaaacgatgtgtacgacgctgccctgaagctcattaatgaaatagaggagatgggtggaatggctaaagctgtggccgagggaatcccaaagctccgtattgaggaatgcgctgctcgtcgccaggctcgcatcgattccggcagtgaagtcatagtcggtgtgaataaataccagcttgagaaggaggacgctgtggaggtgttggctattgacaacacaagcgtccgcaaccgccaaattgaaaagctcaagaagattaagagttctagagatcaagccctggccgaacgctgtctggccgccctgaccgaatgcgccgcctcaggtgacggaaacatccttgctttggccgtggatgcttcacgtgctagatgcacagtgggcgagatcactgatgccctcaaaaaggtgtttggcgagcacaaggcaaacgaccgtatggtgtctggagcttaccgtcaggagttcggcgagtcaaaggagatcacttccgctataaagcgcgtgcacaaatttatggagcgtgagggcagaagaccacgcctgctcgtggccaagatgggccaggacggccacgataggggtgctaaggttatcgccactggttttgccgatctcggattcgacgtagatatcggacctctcttccaaactcccagagaggtggcacaacaagccgtagatgctgacgttcacgcagttggaatctccacacttgccgctggacacaagactctggtccctgaactcattaaggagctcaacagtttgggacgtcccgacattctcgtgatgtgcggaggagtcatccctcctcaggactatgagtttctgtttgaggtcggagtaagcaatgtctttggacctggcacacgtattcccaaggccgccgttcaggtgctggatgatatcgagaagtgcctggaaaagaagcagcagtctgtg

SEQ ID NO: 5684 - DNA, 2250 bp, Artificial Sequence
  derived and/or modified sequence
atgctcagggctaaaaatcagctatttctgctatctccccattatctgcggcaggtaaaggagtcctctggcagcaggctgattcaacagcgattgctccatcaacaacagccactccaccctgagtgggcagccctggcaaagaaacagttgaaaggcaagaatcccgaagacctaatctggcacacacctgaaggaatcagtatcaagcctctttacagcaagagggacaccatggatttgcccgaagagctgcctggcgtgaaacccttcactcgggggccttatcccacaatgtacactttcagaccttggaccataagacagtacgcaggcttctctaccgtcgaggagagtaacaagttttacaaggacaacattaaagccggacagcagggacttagcgtggcatttgatttggctacccatcggggatacgactctgataaccctcgggtgcggggtgatgtagggatggctggtgtggctatcgataccgtggaggataccaagatcctctttgatgggatccctctggaaaaaatgtctgtcagtatgaccatgaatggggcagtcattcccgtgttggccaattttatcgtgactggcgaagagcagggagtacctaaagagaagttgacagggaccatccaaaatgacatcttgaaagagtttatggtgagaaacacctacatctttccacccgagccatccatgaagattattgcggatatcttcgaatacaccgcgaaacacatgccgaagttcaatagtataagcataagcggataccatatgcaggaggctggtgccgatgcgatcctggagctggcttacactctcgctgatggcttggaatactcgcggactggactccaagctgggttgacaatagatgagttcgcccctcgcctgtcctttttctggggtatcggtatgaacttctacatggaaattgccaaaatgcgagccgggcgaagattgtgggcgcacctgatagagaagatgttccagccaaaaaatagcaagtcactgctgcttagggcacattgccagacctcggggtggtcactgacagaacaagacccttataacaatatcgtgcggacagcgatagaggccatggctgctgtctttgggggcactcagtctctacatacgaacagctttgatgaggctcttggcctgccgaccgtcaaaagtgccagaatcgctagaaacacccaaatcatcatccaggaagaatcagggattcccaaggttgctgacccatggggaggcagctacatgatggagtgccttaccaacgacgtctacgacgcagcactgaagctgattaacgagattgaagaaatgggaggaatggcgaaggcagtagccgaggggatccctaagctgcggattgaagaatgcgcagccagacgccaggcaagaatagactccggaagtgaagtaatcgtgggagtgaataagtaccaattagaaaaggaggacgccgtggaggtgctcgccatcgacaacacaagcgtccggaacaggcagatcgagaaattgaagaagatcaagagctcccgggatcaggccttagcggaacggtgcttggccgccttgacagagtgcgccgcaagtggggacggtaacattctggctctggccgttgatgcaagcagggctaggtgcacagttggggaaatcacggacgccttgaagaaggtgttcggcgagcataaggcaaatgaccgcatggtctctggagcatataggcaggaatttggagaatccaaggaaatcacatccgccatcaaaagagtgcataagtttatggaacgggagggtcgacgacctcggctattggttgcaaaaatgggacaggatggtcacgatcggggagccaaagtcatagccaccgggttcgctgatttagggtttgatgtcgacatcggccccctttttcagactcctcgcgaggtggcgcaacaggcagtggacgctgacgtgcacgctgtgggcatctccaccttggccgcaggacataaaacactcgtgccggagctcatcaaagaattgaatagcctcggtagaccagatatcttggtgatgtgtgggggggtgattccaccgcaggactatgaatttctcttcgaagttggggtgtcaaatgtgttcggaccgggaacacgcattcccaaagccgctgtccaagtgcttgacgatattgaaaagtgcttagaaaagaaacagcaatctgtg

SEQ ID NO: 5685 - DNA, 2250 bp, Artificial Sequence
  derived and/or modified sequence
atgttgcgcgccaagaatcagttgttcctgctgtcgcctcattacctacgccaagtgaaagaatcctcaggttcgcgcctgatccagcaaagattgctccaccagcaacagcccctgcacccggagtgggccgcccttgctaagaagcaactgaagggaaagaacccggaggacctgatctggcacacgccggaaggcatctccattaaacctctgtattcgaagcgcgacactatggacctgcccgaagaattgccaggagttaagcctttcacccgcggcccgtaccccactatgtacacctttagaccctggaccatccgacagtatgcgggcttcagtacggttgaggagtcgaataagttttacaaggacaatattaaggcaggccagcagggattgtcggtcgcattcgacctcgccacacaccgcggttacgactcggacaatccacgcgtgaggggtgatgtgggcatggccggagtggccatcgatacagtggaggacaccaagatcctgttcgacggcatccccctcgaaaagatgagcgtgagcatgaccatgaacggagctgtcattccggtactggcgaacttcatcgtcaccggtgaggagcagggggtgcccaaagagaagctgacgggtaccatccagaatgacattttaaaggagttcatggtcaggaatacatacattttccccccggagccttcgatgaagatcattgcagacatcttcgaatatacggctaagcacatgcccaaattcaatagcattagcataagtggctatcatatgcaagaggcgggcgcggacgccatattggagttggcttatacattggccgacggactggagtacagtcgcaccgggttgcaagccggactgaccatagatgagttcgcccctcgcttgtcgtttttctggggtattggaatgaacttctatatggagatagccaaaatgcgcgccggccgccgattatgggcccatctaatcgaaaagatgttccagccgaagaactccaaaagcctactgctccgggcccactgccaaaccagcggttggagcttgacagagcaggatccctataataacattgtccgtacagccattgaagccatggcagctgtttttggcggcactcagagtctccacacaaattctttcgacgaggcgctggggttgccaaccgttaagtccgcaaggatcgccaggaatactcagatcattattcaggaggaatcgggcattccgaaagtggcagatccatggggcggatcgtacatgatggagtgtttgactaacgatgtgtatgatgccgccctcaagctgataaatgagatcgaggagatggggggaatggcaaaagccgttgccgagggtattccaaaactgagaatcgaagagtgcgcggctcgacgccaagcccggatcgacagcggttccgaggtgatcgtgggcgtaaataagtaccagcttgagaaagaggatgccgtcgaggtattggccatcgacaacacgtcggtacggaaccgtcaaatcgagaaacttaaaaagatcaaatcatcacgtgatcaagccctcgcggagcgctgcctggccgcacttactgagtgcgcggcgtcaggggacggcaatattttagcactggcggtcgatgccagtcgagctagatgcacagttggcgagattacggatgcgctgaagaaggtgtttggtgagcataaagctaatgatcgcatggtgagcggcgcttatcgccaggagttcggagaatccaaggagatcacgtccgccatcaagcgtgtgcataaatttatggaaagggagggacgccggccgcgattgctggtggccaagatgggtcaggatggccacgataggggtgccaaggttattgctaccggctttgccgatctgggcttcgacgtcgacataggaccactgttccagacccctcgggaagtggcccaacaggctgtggacgccgacgtgcatgcagtggggatttcgaccttggccgcaggacacaagaccctggtacccgagctgatcaaagagttgaacagtttgggaaggcccgatatattggttatgtgtggcggagtaatccccccccaggactatgagttcctttttgaggtaggagtttccaatgtcttcggcccaggcactcgcattcctaaggcagcagtgcaggtgcttgatgacatagagaagtgtctggaaaagaagcagcagtccgtt

SEQ ID NO: 5686 - DNA, 2250 bp, Artificial Sequence
  derived and/or modified sequence
atgcttcgcgccaagaaccaactgtttcttctcagcccacattatctgcgccaagttaaggaatcatccggatcaaggcttatacaacagcgactgctccaccagcaacagccactccatccagagtgggccgcccttgctaagaagcagctcaagggtaagaaccctgaagatttgatctggcatacccctgaaggtatttctattaagccactgtactcgaagcgcgacactatggacctgcctgaagaactccctggggtgaaacccttcactagaggtccttaccccactatgtacacctttagaccgtggaccattagacagtacgcgggtttttccacggtggaagagtccaacaaattctacaaagacaacattaaggcaggacagcaaggcctgagcgtcgcctttgatcttgctactcatagaggatacgatagcgataatccaagggtgcggggcgacgtgggaatggctggagttgccatcgataccgtcgaggatactaagattctctttgatggaatcccacttgaaaagatgtcggtgtccatgaccatgaacggtgcggtgataccagtgctggcaaactttattgtgaccggcgaagaacagggtgtgccgaaggaaaaactcaccggtactattcagaacgacattttgaaagagtttatggtgcgaaatacgtacatcttcccacctgaaccttcgatgaaaatcatcgcagatatcttcgaatacactgccaagcatatgccgaagttcaattcaatctccatatctgggtaccatatgcaagaagcgggtgcagatgccatactcgaactggcctatacgctggcggatggactggaatacagccggaccggccttcaagcaggacttaccattgatgagttcgcacctcgactctcgttcttttggggaataggcatgaacttttacatggaaatcgcaaagatgagagccggcagacgcctgtgggcacatctgatagagaagatgtttcaaccgaagaattcaaaatcgctgttgctgagggcacactgtcagacctccggttggtcgctgactgaacaggatccatataacaacatcgtcaggactgccatcgaagcaatggcagccgtctttggtggaacccagagcctccacaccaattcgttcgatgaggccctcggcctgcctaccgtgaagagcgcaagaattgcacggaacactcagattatcattcaagaggagagcggaattcccaaagtggcagatccgtggggtggttcgtacatgatggagtgtcttaccaacgacgtctacgacgcagcacttaaactgataaatgagattgaagagatggggggcatggcgaaggccgtcgcagagggtattcccaaactcaggatagaagaatgcgcagcacgccgccaagcaagaattgactccggttcggaagtgattgtcggcgtgaacaaataccaacttgagaaagaggatgcagtggaggtgcttgcaattgacaacactagcgtgaggaataggcagatcgagaaactgaagaagattaagtccagccgtgatcaagccttggccgaaaggtgtcttgctgcgctgactgagtgtgccgctagcggtgacggaaatatcctggcgctcgccgtcgacgcctcgagggcgaggtgcactgtgggcgaaatcactgacgcactcaagaaggtgtttggcgagcataaggcaaacgacaggatggtgagcggtgcataccgacaagagtttggtgagtcgaaggaaattacttcagcgattaagcgggtgcacaaattcatggaaagagaaggccgtagacctaggctcctggtggcaaagatgggtcaggacggacatgataggggggcaaaggtcattgccactggatttgcagatctcggatttgatgtggatatcggtccactgtttcagacgccccgggaggtggcacagcaagcagtggacgccgacgtgcacgcagtgggtatttcaacgctggcagcaggacataagactctcgtgccggaactgattaaagaacttaatagcctcggacgccctgatattctggtcatgtgcgggggcgtgattccaccacaggattacgagttccttttcgaggtgggcgtgtcgaacgtgtttggtcccggtaccagaattcccaaggcagcagtccaagtcctggatgacattgagaagtgtctggagaagaaacaacaatcggtc

SEQ ID NO: 5687 - DNA, 2250 bp, Artificial Sequence
  derived and/or modified sequence
atgctgcgcgccaagaatcagctgttcctgctttccccccactacctgaggcaggtgaaagaaagttcgggatcgagattgatccagcagcggctgctgcaccaacagcagccactgcacccggagtgggccgccctggcgaaaaaacagctcaaggggaaaaatccggaggacctgatctggcatactccggaagggatttcgatcaagccgctgtactctaaaagagataccatggacctgccggaggaactccctggagtgaagccgttcacccgggggccctatccgactatgtacaccttcagaccatggactattcggcagtacgccggattcagcactgtcgaagagtcgaataagttctacaaggataacatcaaggcgggccaacagggcctcagcgtggccttcgacctggccactcaccggggctacgactccgataacccgcgggtgcgcggagatgttggaatggccggagtggcaatcgataccgtggaggacactaagatcctcttcgacggtatccccctcgagaaaatgagcgtttcgatgaccatgaacggagccgtgatccctgtgctggcaaatttcattgtgaccggagaggagcagggagtcccgaaagaaaagctcaccgggaccatccaaaacgacatcctgaaagaattcatggtccgcaacacttacatcttcccaccggaaccgagcatgaagattatcgctgatatcttcgagtacaccgcaaagcacatgccaaaattcaattcgatcagcatctcgggataccacatgcaagaggccggtgccgacgcaatccttgaactcgcctacactctggctgatggactggagtattctcgcaccggattgcaggctggcctgaccattgatgaattcgcccctcggctgtcgttcttttggggaatcggtatgaacttctacatggaaatcgctaagatgcgcgccggccggagactctgggcacatctgatcgaaaagatgttccaacccaagaactcgaaatccctgcttcttcgcgcgcactgccagacctcaggatggtcactgactgagcaagatccgtacaacaacatcgtgcgcaccgccatcgaggcgatggccgcagtgttcggaggaacccagtctctgcacacgaactctttcgacgaagcgctcggcttgccaactgtcaagtcggcccgcattgcccgcaacacccagattatcattcaggaagagagcggtattccgaaggtggcggacccatggggcgggagctacatgatggaatgtctgactaatgatgtgtacgacgcggctctgaagctgatcaacgagatcgaagaaatggggggaatggccaaggccgtggctgaaggcatcccgaaacttcggatcgaagagtgcgcggcccgacggcaagcgagaatcgatagcggcagcgaggtcatcgttggagtgaacaaataccagctcgagaaagaagatgcagtcgaagtgctggctattgataatacttcagtgcgaaacaggcaaatcgaaaagctgaagaaaatcaagtcgtcgcgggaccaggcactggcggaaaggtgcctggccgccctgactgaatgcgccgcatcgggtgacggaaacatcctggcgttggccgtggacgcgtcgcgcgcacgctgcactgtgggagagattactgacgcgctgaagaaggtgtttggagaacataaggccaacgaccgtatggtgtccggggcctaccgccaagagttcggggagtcaaaggagatcacctccgctatcaagcgggtgcacaagtttatggagagagaaggacgcagaccgcgcctgctcgtcgcgaagatgggtcaagatggacacgatagaggcgcaaaggtgatcgcgactggattcgccgacttgggattcgacgttgacatcggtcctctgttccagacccctcgggaggtggcccaacaagccgtggatgctgatgtccacgcagtcggcattagcaccctggcagcaggacataagaccctggtgccggaattgatcaaagagttgaattccttgggcagacctgatatcctggtgatgtgcggaggcgtgatcccgccacaggattacgaattcctcttcgaagtgggggtgagcaacgtctttggacctggcactcgcatcccaaaagccgccgtccaggtgctggatgacattgagaagtgcctggaaaagaaacaacagtcggtc

SEQ ID NO: 5688 - DNA, 2250 bp, Artificial Sequence
  derived and/or modified sequence
atgttgcgggccaagaaccagctgttcctcttgagcccccactacctgcgccaggttaaggagagcagcggatccagactgatccagcagcggctcctgcatcagcagcaacccttgcatcccgaatgggcagccctagcaaaaaagcagctcaagggcaagaacccagaagacctgatctggcatacgcccgagggtattagcataaaacccctctattcgaaacgggacaccatggacctcccggaggagttgcccggtgttaagccgttcactagaggcccgtatcccacgatgtacacgttccggccatggaccatccgtcaatacgccggtttcagcaccgtcgaggagagcaacaagttttataaggataacatcaaagccgggcagcaaggcctctcggttgccttcgacctagctacccaccgcggctacgattcggacaacccacgtgtccgtggtgacgtcggtatggccggggtggctatcgataccgttgaggacaccaaaatcttgtttgacggcatccctttggaaaagatgtccgtctccatgacaatgaatggtgccgtcatccccgttctggccaactttatcgtgaccggtgaagaacagggtgtgccgaaggagaaactcaccggtaccatccaaaatgacattctcaaagagttcatggtccgcaacacctacatcttcccccccgagccttccatgaaaatcatcgccgatatttttgagtatactgcaaagcacatgcctaagtttaacagtatctctatctcgggctatcacatgcaggaggccggcgccgacgctattctggagctcgcctataccctcgctgacggcctggaatattctcgcacgggactgcaggctggactgaccatcgacgagttcgcccctcggctcagtttcttctggggtattggcatgaatttctacatggagatcgctaagatgcgcgccggtcggcgcttgtgggctcatctgatcgagaagatgttccagccgaagaactccaagagtcttcttcttagggcccattgccagacctctggttggtccttgaccgagcaggatccttacaacaacattgtgcggaccgccatcgaagcgatggctgccgtgttcggcggtacccagtccttgcacacaaactccttcgatgaagccctgggcctgccgaccgtcaaaagtgcccggatcgccagaaacacgcagattatcattcaggaggaatcgggtatccccaaggttgcggatccttggggtggctcttatatgatggagtgcctgaccaacgatgtgtatgatgctgccctcaagttaatcaacgagatcgaggaaatgggaggtatggccaaggcggttgctgagggtattcccaagctgcgcatcgaagaatgtgccgcacggcgccaggctcgcatcgactcaggcagtgaggtgatagtgggagtgaacaagtaccagcttgaaaaggaggacgccgttgaggtgctcgccattgataacacctcggtccgtaaccgccagatcgagaagctgaagaagatcaagagttcgcgcgaccaagcgctggctgagcgctgtctcgctgctctgaccgagtgtgccgcgtctggcgacgggaatattctcgcattagccgttgatgcctcgcgggcacgttgcacagtgggggagatcaccgacgccttgaagaaggtgttcggcgagcacaaggccaacgaccgcatggtgtctggcgcttaccgccaggagtttggtgagagcaaggaaatcacttccgctattaaacgcgttcacaagttcatggagcgggaaggacgccgcccccgtctgttggtggcaaagatgggtcaggacggtcacgaccgtggtgcgaaagttatcgcaactggcttcgcggatttgggctttgacgtggacatcggcccgctttttcaaacgcctcgcgaggtggcccaacaggctgttgatgctgatgttcacgcggttggtatctccacactcgctgctgggcacaagactctcgtgcctgaactgattaaggagctcaacagccttggacgacccgacatactggtcatgtgcggcggtgtcattccgcctcaagattatgagttcctgttcgaggtcggtgtctccaacgtcttcggccccgggacacgtattcccaaagctgccgttcaggttctggacgatattgagaagtgcctggagaaaaaacagcaatctgtg

SEQ ID NO: 5689 - DNA, 2253 bp, Artificial Sequence
  derived and/or modified sequence
atgctgagagccaagaaccagctgttcctgctgagcccccactacctgagacaggtgaaggagagcagcggcagcagactgatccagcagagactgctgcaccagcagcagcccctgcaccccgagtgggccgccctggccaagaagcagctgaagggcaagaaccccgaggacctgatctggcacacccccgagggcatcagcatcaagcccctgtacagcaagagagacaccatggacctgcccgaggagctgcccggcgtgaagcccttcaccagaggcccctaccccaccatgtacaccttcagaccctggaccatcagacagtacgccggcttcagcaccgtggaggagagcaacaagttctacaaggacaacatcaaggccggccagcagggcctgagcgtggccttcgacctggccacccacagaggctacgacagcgacaaccccagagtgagaggcgacgtgggcatggccggcgtggccatcgacaccgtggaggacaccaagatcctgttcgacggcatccccctggagaagatgagcgtgagcatgaccatgaacggcgccgtgatccccgtgctggccaacttcatcgtgaccggcgaggagcagggcgtgcccaaggagaagctgaccggcaccatccagaacgacatcctgaaggagttcatggtgagaaacacctacatcttcccccccgagcccagcatgaagatcatcgccgacatcttcgagtacaccgccaagcacatgcccaagttcaacagcatcagcatcagcggctaccacatgcaggaggccggcgccgacgccatcctggagctggcctacaccctggccgacggcctggagtacagcagaaccggcctgcaggccggcctgaccatcgacgagttcgcccccagactgagcttcttctggggcatcggcatgaacttctacatggagatcgccaagatgagagccggcagaagactgtgggcccacctgatcgagaagatgttccagcccaagaacagcaagagcctgctgctgagagcccactgccagaccagcggctggagcctgaccgagcaggacccctacaacaacatcgtgagaaccgccatcgaggccatggccgccgtgttcggcggcacccagagcctgcacaccaacagcttcgacgaggccctgggcctgcccaccgtgaagagcgccagaatcgccagaaacacccagatcatcatccaggaggagagcggcatccccaaggtggccgacccctggggcggcagctacatgatggagtgcctgaccaacgacgtgtacgacgccgccctgaagctgatcaacgagatcgaggagatgggcggcatggccaaggccgtggccgagggcatccccaagctgagaatcgaggagtgcgccgccagaagacaggccagaatcgacagcggcagcgaggtgatcgtgggcgtgaacaagtaccagctggagaaggaggacgccgtggaggtgctggccatcgacaacaccagcgtgagaaacagacagatcgagaagctgaagaagatcaagagcagcagagaccaggccctggccgagagatgcctggccgccctgaccgagtgcgccgccagcggcgacggcaacatcctggccctggccgtggacgccagcagagccagatgcaccgtgggcgagatcaccgacgccctgaagaaggtgttcggcgagcacaaggccaacgacagaatggtgagcggcgcctacagacaggagttcggcgagagcaaggagatcaccagcgccatcaagagagtgcacaagttcatggagagagagggcagaagacccagactgctggtggccaagatgggccaggacggccacgacagaggcgccaaggtgatcgccaccggcttcgccgacctgggcttcgacgtggacatcggccccctgttccagacccccagagaggtggcccagcaggccgtggacgccgacgtgcacgccgtgggcatcagcaccctggccgccggccacaagaccctggtgcccgagctgatcaaggagctgaacagcctgggcagacccgacatcctggtgatgtgcggcggcgtgatccccccccaggactacgagttcctgttcgaggtgggcgtgagcaacgtgttcggccccggcaccagaatccccaaggccgccgtgcaggtgctggacgacatcgagaagtgcctggagaagaagcagcagagcgtgtag

SEQ ID NO: 5690 - DNA, 594 bp, Artificial Sequence
  derived and/or modified sequence
accagatacctggccagatgcaccgtgggcgagatcaccgacgccctgaagaaggtgttcggcgagcacaaggccaacgacagaatggtgagcggcgcctacagacaggagttcggcgagagcaaggagatcaccagcgccatcaagagagtgcacaagttcatggagagagagggcagaagacccagactgctggtggccaagatgggccaggacggccacgacagaggcgccaaggtgatcgccaccggcttcgccgacctgggcttcgacgtggacatcggccccctgttccagacccccagagaggtggcccagcaggccgtggacgccgacgtgcacgccgtgggcatcagcaccctggccgccggccacaagaccctggtgcccgagctgatcaaggagctgaacagcctgggcagacccgacatcctggtgatgtgcggcggcgtgatccccccccaggactacgagttcctgttcgaggtgggcgtgagcaacgtgttcggccccggcaccagaatccccaaggccgccgtgcaggtgctggacgacatcgagaagtgcctggagaagaagcagcagagcgtgtag

SEQ ID NO: 5691 - DNA, 2253 bp, Artificial Sequence
  derived and/or modified sequence
atgctgagggcgaagaaccagctatttctcctttccccccattatctcagacaggttaaggaatcgagtggctctagattgattcaacagaggctgcttcatcagcagcagcccttacaccctgaatgggctgcattggcaaagaaacagttaaagggtaagaatcccgaggacctgatctggcacaccccagagggaatcagcatcaagcctctgtattctaaacgggatacgatggacctgcctgaagaactgcccggagtcaaaccttttaccagaggaccataccctaccatgtatacattccgcccttggactattaggcagtacgccggttttagtacagtcgaggagagcaataagttctacaaggacaacattaaggcgggtcagcagggccttagtgttgcctttgacctagccactcatagaggatatgacagtgacaacccacgggtgcggggcgacgtgggtatggccggcgtcgctatcgacaccgtggaagacaccaagattctcttcgacgggatccccttagaaaaaatgagtgtgagtatgacaatgaacggagctgttattccagtgctggccaattttattgttaccggagaagagcagggagtacccaaagagaagcttaccggcactattcagaacgatatccttaaggaatttatggtacgcaacacatacatattccccccagagccctctatgaaaataattgccgatatttttgaatacacagcgaaacacatgcctaagttcaattctataagcatttccggctaccacatgcaagaagctggcgcagatgccatccttgagcttgcctacactctcgccgatggactggagtactctaggacaggccttcaagccggcctcaccatcgatgaatttgcacctagactttcttttttttgggggatcggtatgaatttctacatggaaatcgccaagatgagagctggcagacgcctatgggctcacctaatcgaaaagatgtttcagccgaaaaattccaaaagtttgttactgcgggcacactgccagacctcaggctggtccctcaccgaacaagacccatacaacaatatcgtaagaaccgctatcgaagcaatggccgccgtctttggcggcacacagtcactccacacgaattcattcgatgaggccttaggcctccccacggtcaaaagcgcacgaattgcccgtaacacccagataatcattcaagaggagagcggaatacctaaggtcgcagatccttggggcgggtcttatatgatggaatgtctgactaacgatgtgtatgacgctgctttgaagttaataaatgagatagaagaaatgggcgggatggctaaagccgttgctgaaggaattcccaagttacgaatagaagaatgcgccgccaggaggcaggctcggatagatagcgggtccgaggttattgtaggtgtcaataagtatcagcttgaaaaagaggatgcagtggaggttcttgccattgacaacacatccgtcaggaataggcagatcgaaaagctgaagaagatcaaaagctccagggatcaggccctcgcagagaggtgcctagccgcactgaccgagtgtgctgcgtccggggatggcaatatactcgcactcgccgtggacgcgtctcgcgcacgctgcacagttggcgagattacggatgcactaaagaaggtctttggagaacacaaggcaaatgaccggatggtgtctggggcatataggcaggagttcggcgaatcaaaagaaatcacctctgcgattaagcgggtacataaatttatggaaagagaagggaggagacctcgcctccttgttgccaagatgggacaggatggtcacgacaggggagctaaggtcatcgccactgggtttgcagacctgggttttgatgttgatattggtccactgtttcagacccccagagaggttgctcagcaggccgtcgacgcagacgtgcacgctgtagggatctcgactcttgcagccggccataagaccttggttcccgaactcatcaaagaactgaatagcctgggtcgccccgacatattggtaatgtgtggtggggtgattcccccacaggactacgaatttctgtttgaggtaggagtctccaacgtgtttggcccaggaacccggatcccgaaagcagctgtgcaggtgttagatgacattgagaaatgcctggagaagaaacagcaaagtgtttag

SEQ ID NO: 5692 - DNA, 594 bp, Artificial Sequence
  derived and/or modified sequence
actaggtatctagcccgctgtaccgtcggggagatcacagacgcactgaaaaaagtgttcggtgagcataaggccaatgataggatggtcagcggagcctatagacaggagttcggcgaatcaaaagagatcacatcagccatcaagagggtccacaaatttatggaacgcgagggaaggagaccccggctgctcgtcgcaaaaatgggacaggatggccatgatcgaggggccaaagtgattgccactggttttgctgacctcggatttgacgtggacataggtcctctctttcagacaccacgggaagtcgcacagcaggctgtggacgcagatgtacacgctgttggaatttcgaccctggctgctgggcacaaaacactggtacctgagctgatcaaagagctaaattccctaggaaggccggatatccttgttatgtgcggcggcgtcatcccccctcaggattacgaatttctgtttgaagttggcgtgagcaacgtgtttggccccggaacccggatccccaaagctgcagtccaggtccttgacgatatcgagaagtgcttggaaaagaaacagcaaagtgtatag

SEQ ID NO: 5693 - DNA, 2253 bp, Artificial Sequence
  derived and/or modified sequence
atgctgcgggccaagaaccagctgttcctgctgagcccccactacctgcggcaggtgaaggagagcagcggcagccgcctcatccagcagaggctgctgcaccagcagcagcccctgcaccctgagtgggccgccctggccaagaagcagctgaagggcaagaacccagaagatctcatctggcacaccccagagggcatcagcatcaagcccctgtacagcaagagggacaccatggacctgcctgaggagctgcccggggtgaagcccttcacccggggcccctaccccaccatgtacaccttccggccctggaccatccggcagtatgccggcttcagcacagtggaggagagcaacaagttctacaaggacaacatcaaggccggccagcagggcctgtctgtggcctttgacctggccacccaccggggctatgacagcgacaacccccgggtgagaggagatgtgggcatggccggcgtggccatcgacacagtggaggacaccaagatcctgtttgatggcatccccctggagaagatgtctgtgtccatgaccatgaatggagctgtgattcctgtgctggccaacttcatcgtgactggagaggagcagggcgtgcccaaggagaagctgaccggcaccatccagaatgacatcctgaaggagttcatggtgaggaacacctacatcttccccccagagcccagcatgaagatcatcgctgacatctttgagtacacagccaagcacatgcccaagttcaacagcatcagcatcagcggctaccacatgcaggaggccggggctgatgccatcctggagctggcctacaccctggctgatggcctggagtacagcaggacaggcctgcaggccggcctgaccattgatgaatttgccccccggctgtccttcttctggggcatcggcatgaacttctacatggagatcgccaagatgagagctggccggcggctgtgggcccacctgattgagaagatgttccagcccaagaacagcaagagcctgctgctgcgggcccactgccagaccagcggctggagcctgacagagcaggacccctacaacaacatcgtgaggacagccatcgaggccatggctgctgtgtttggaggcacccagagcctgcacaccaacagctttgatgaggccctgggcctgcccaccgtgaagagcgcccgcatcgccaggaacacccagatcatcatccaggaggagagcggcatccccaaggtggccgacccctggggcggcagctacatgatggagtgcctgaccaatgatgtgtatgatgctgccctgaagctgatcaatgaaattgaggagatgggcggcatggccaaggctgtggccgagggcatccccaagctgcgcatcgaggagtgtgccgcccggcggcaggccagaattgattctggcagcgaggtgattgtgggcgtgaacaagtaccagctggagaaggaggatgctgtggaggtgctggccatcgacaacacctctgtgaggaaccggcagatcgagaagctgaagaagatcaagagcagccgggaccaggccctggccgagcgctgcctggccgccctgacagaatgtgccgccagcggagatggcaacatcctggccctggccgtggatgccagccgggcccgctgcaccgtgggggagatcacagatgccctgaagaaggtgtttggagagcacaaggccaatgacaggatggtgtctggggcctaccggcaggagtttggagagagcaaggagatcaccagcgccatcaagagggtgcacaagttcatggagcgggagggcagaagaccccggctgctggtggccaagatgggccaggacggccatgacagaggagccaaggtgattgccaccggctttgctgacctgggctttgatgtggacatcggccccctcttccagaccccccgggaggtggcccagcaggccgtggatgctgatgtgcatgctgtgggcatcagcaccctggccgccggccacaagaccctggtgcctgagctgatcaaggagctgaacagcctgggccgcccagacatcctggtgatgtgtggcggcgtcatccccccccaggactatgagttcctgtttgaggtgggcgtgtccaatgtgtttggacctggcacccgcatccccaaggctgctgtgcaggtgctggatgacatcgagaagtgcctggagaagaagcagcagagcgtgtag

SEQ ID NO: 5694 - DNA, 594 bp, Artificial Sequence
  derived and/or modified sequence
acccgctacctggcccgctgcaccgtgggggagatcacagatgccctgaagaaggtgtttggagagcacaaggccaatgacaggatggtgtctggggcctaccggcaggagtttggagagagcaaggagatcaccagcgccatcaagagggtgcacaagttcatggagcgggagggccggcggccccggctgctggtggccaagatgggccaggacggccatgacagaggagccaaggtgattgccactggatttgctgacctgggctttgatgtggacatcggccccctcttccagaccccccgggaggtggcccagcaggccgtggatgctgatgtgcatgctgtgggcatcagcaccctggccgccggccacaagaccctggtgcctgagctgatcaaggagctgaacagcctgggccgcccagacatcctggtgatgtgtggcggcgtcatccccccccaggactatgagttcctgtttgaggtgggcgtgtccaatgtgtttggacctggcacccgcatccccaaggctgctgtgcaggtgctggatgacatcgagaagtgcctggagaagaagcagcagagcgtgtag

SEQ ID NO: 5695 - DNA, 2253 bp, Artificial Sequence
  derived and/or modified sequence
atgctgcgggccaagaaccagctgttcctgctgagcccccactacctgcgacaagtgaaggaatccagtgggtcccggctcatccagcaacggttgctccaccagcagcagccgcttcaccccgagtgggcagcattagctaagaagcagcttaaagggaaaaaccctgaggatctcatttggcacactccagaggggatcagcatcaagcctctttactctaagcgcgacaccatggaccttccagaggaactcccaggagtgaagccctttactaggggaccgtacccgaccatgtatacatttcgcccatggacaatacgtcagtatgcaggtttcagcacagtagaggaatcaaataaattttacaaggacaacattaaggccggtcagcaggggctaagcgtggcgtttgacctggcgacccataggggatatgacagtgacaaccctcgggtgcgtggtgatgttggcatggccggagttgcgattgatactgtcgaagataccaaaatcctctttgacgggattcctcttgaaaagatgagcgtttcaatgaccatgaacggggcagtcatacctgtgttagccaatttcatcgtcacaggggaagaacaaggcgtgcctaaagagaaattaacgggcaccatccaaaacgatatcctaaaagagttcatggtgaggaacacctacatctttccacctgaaccttctatgaagatcatagcagacatctttgagtacactgccaaacacatgccgaagtttaatagtattagcatctcgggatatcacatgcaggaagccggagcagatgctatactcgagcttgcttacacgttggcagacgggctcgagtactcccgcacagggcttcaggccgggctgaccatcgacgaatttgcaccgcggctttctttcttctggggtatcggcatgaatttttacatggagatcgccaagatgagagcaggacggaggctttgggcccacttgatagagaaaatgtttcaacctaagaactctaagtcactgctcctcagggctcactgccagaccagtggctggagcctcaccgaacaggatccctataataatatcgtccgcactgccatcgaagctatggctgcagtttttggaggcacccaatctttgcacactaactcgttcgatgaggcactcggcctgccaaccgtcaagagcgccagaatcgcgaggaacacccaaataataatacaagaagagtctgggatccccaaggtggctgatccatgggggggaagttacatgatggaatgtcttacaaacgatgtatatgacgctgccctgaaactgatcaatgaaatcgaagaaatgggcggcatggcaaaggcagtggccgaaggaatccctaagctccgaattgaggagtgtgccgcaagacgccaggccagaatcgatagcggttccgaggtgattgtgggggtcaacaaatatcagctggagaaagaagacgcggtggaagtcctagctatcgacaatacatccgtaagaaacagacagattgagaagctaaagaagattaagagctccagggaccaagccctggccgagaggtgccttgcagccctgacggagtgtgcggcaagcggggatggtaatattctggctctggcggtggacgcctcccgggcccgctgtaccgtgggagaaattactgatgccttaaagaaggtcttcggggaacacaaggcaaacgaccggatggtgtccggtgcctatcgccaggaattcggcgagagtaaggaaataacctctgccatcaaaagagtacataaattcatggagagggaggggagaaggccacggctgctcgttgcgaagatgggacaggatggccatgaccgcggcgcgaaggtgattgcaacggggtttgcggatctgggctttgacgttgacatcggaccactgttccagaccccgcgcgaggtggcccagcaggcggtagatgccgatgttcatgctgtgggcatcagtacgctggccgccggccacaagaccctggtgccagagcttattaaggagctaaactcgttgggcagacccgacattctggtcatgtgcggcggtgtcattccgcctcaagattacgaattcttgttcgaagttggggtgtccaacgtatttggaccaggtacaagaatccctaaggcagccgtgcaggtactggatgacattgagaagtgtttagagaagaaacagcagtcagtctag

SEQ ID NO: 5696 - DNA, 594 bp, Artificial Sequence
  derived and/or modified sequence
acccggtacctggcccggtgcaccgtgggcgagatcaccgacgccttgaaaaaagtctttggcgagcacaaggccaacgacaggatggtctcgggtgcttatagacaggaattcggtgagagtaaggagattacatcggctatcaagcgggtgcacaaattcatggaaagagaaggacggcggcctcgactgctggtggcgaaaatgggacaggatgggcatgataggggggctaaagtcattgccacaggattcgctgatctggggtttgacgtggacattggtcctctctttcaaactcctcgcgaagtggcccagcaagctgtagacgccgacgtgcacgctgtgggtatttcaactctggctgcaggccataaaacacttgtccctgagctgattaaggaattaaattctctgggtagacccgatatactggtgatgtgtggcggtgtgatccccccacaagactatgagtttctgtttgaagtgggtgtgtcaaacgtgtttgggccaggaacaagaatcccaaaagcagccgtacaggtattagatgacattgaaaagtgtctggaaaaaaagcagcagtcagtgtag

SEQ ID NO: 5697 - DNA, 2253 bp, Artificial Sequence
  derived and/or modified sequence
atgttacgggctaagaaccagctattcctattatctcctcactacctgcgccaggttaaggaatcatccggatcacgactaatccagcaaagacttttacatcaacagcagccactgcatccggaatgggcggcactggctaaaaaacagttaaagggcaagaaccctgaagacctaatttggcatactccagaaggtatatcaatcaagcctctatattccaagcgcgacaccatggatctcccagaggaactgcccggtgtgaagccctttaccagaggtccctatccaactatgtatacgtttaggccttggaccattaggcagtacgcagggttttccaccgtcgaggaatcgaataaattctacaaagataatataaaagcgggacagcaggggctctccgtggccttcgacctggcgactcacaggggctacgatagcgacaaccccagggtgagaggagacgtagggatggcaggggtcgctatcgacaccgtggaagacacaaagatcctgtttgatggcattcccttagaaaagatgtctgtgagcatgacaatgaatggggcagtcatacctgttcttgccaacttcatcgttactggtgaggagcagggagtgcctaaagaaaagctcaccggtacaatccaaaatgacattctaaaggagtttatggtcagaaacacatacatatttccacctgagccttccatgaaaatcatcgccgatatattcgagtacaccgccaagcacatgcctaagtttaacagcatctccataagtggctaccacatgcaggaagctggagcagatgccattttggagctcgcttatactctagcagacggcctggagtacagtagaactgggctgcaggcgggtctgactattgatgagttcgcaccccgtcttagttttttctggggcataggcatgaacttctacatggaaatcgcaaagatgagggccggacggagactgtgggctcatctcattgaaaagatgtttcaacctaaaaactcaaagtctttgctcctcagagctcactgccagaccagtggttggagcctgaccgaacaagacccctataacaatattgtgcggacagccatcgaagcaatggccgcagtgtttggcggaactcagagcctacataccaatagcttcgatgaagccctgggcctgccaacagtcaagtccgcacggatcgcgagaaatacccagattatcatccaggaagagagcggaatacctaaggtagcagatccctggggcggatcgtacatgatggagtgcctgacaaatgatgtgtacgacgccgctctgaaacttattaatgagatagaagaaatgggaggaatggcaaaggccgttgcggagggaatacctaagctcaggatagaagaatgcgccgcaaggcgccaagcacgcattgattcaggctctgaggtgatcgtgggcgtcaataagtaccagctcgaaaaggaggatgctgtggaagtgcttgctatcgacaacacatccgtgcgcaatcgtcagatcgagaagctgaagaaaataaagagtagtcgggatcaggcgctggccgaaaggtgcctggctgcactgactgagtgcgcagctagcggtgacggcaatatcctggcgcttgccgtggacgccagccgggcacgctgtacggtcggcgagattacggatgccctgaaaaaagttttcggcgagcataaggccaatgacagaatggtgagcggcgcatatcgtcaggagtttggtgagagcaaggaaatcactagcgcgatcaagagggtccacaagttcatggaaagagaggggcgacggcctaggctcctagtcgcgaagatgggacaggacgggcatgacaggggtgccaaggtcattgcaaccggctttgcagaccttgggttcgacgtggacatcggccctctctttcaaaccccaagagaggtcgctcagcaggcagttgatgcagatgtgcacgcagtaggaatatccaccctggccgcagggcacaagactttagtgcccgagctcattaaagagctaaacagtttaggccgacctgacattctagtgatgtgcggcggtgtgattcctcctcaggactacgaatttctgttcgaagtgggagtatcaaacgtgtttggcccaggtactaggatccccaaggctgcagtgcaagtactggatgacatagagaaatgcctggagaaaaaacaacaatctgtttag

SEQ ID NO: 5698 - DNA, 594 bp, Artificial Sequence
  derived and/or modified sequence
accaggtacctcgccagatgcacagtcggcgagataactgatgcacttaaaaaggtcttcggtgagcacaaggccaacgatagaatggtgtcaggggcataccggcaggagttcggcgagagtaaagagattaccagcgctatcaaaagggtccacaaatttatggagagggaaggcaggcggccacgacttctcgtggctaaaatgggccaggatggtcatgacagaggtgccaaggtaatcgcaacagggtttgcggatctggggttcgacgtcgacatcgggcctctcttccaaaccccgagggaggtggcccaacaggcagtcgacgctgacgtccacgctgttggcattagcactctggcagccggacacaagacactagttcctgaactcatcaaggagttgaactcgctgggcagacccgatatcctagttatgtgtggtggggtgattcctccccaggactacgagtttctcttcgaggtcggagtcagcaatgttttcgggccaggcacaagaattccaaaagctgccgtgcaggtgctggatgacatagagaaatgcctggagaaaaaacagcagtccgtgtag

SEQ ID NO: 5699 - DNA, 2253 bp, Artificial Sequence
  derived and/or modified sequence
atgctcagagccaagaaccagctattcctgctgtctcctcactacctgcgtcaggttaaagaatcatctggttcacgtcttatccagcaaaggctgctgcatcaacaacaacccctccatccggaatgggcagcgctggccaaaaagcaattaaaagggaaaaacccggaggatctcatttggcacacccccgagggaatttctatcaaacccctgtattccaagcgcgacacaatggatcttcctgaagaacttcccggcgtcaaaccgttcacacgagggccatatcccacgatgtatacattcagaccatggacaatccggcagtacgccggctttagcacagtagaggaaagcaacaagttttacaaagacaatattaaagcagggcagcaaggcctttccgtcgcctttgacctggctactcaccggggatatgattccgacaatcctcgcgtacgcggggacgtggggatggccggcgttgcaattgataccgtcgaagacactaagattctattcgatggaatcccacttgagaagatgagcgtctctatgactatgaatggcgctgtgatccccgtgttagccaactttattgtgacaggagaagagcagggcgtgccaaaggagaaactaaccggaaccattcagaacgacattctaaaggagttcatggtgcgaaacacatacatcttccccccggagccctcaatgaagataattgctgacatcttcgagtataccgccaagcatatgcccaagttcaattcaattagcatctccggctatcatatgcaggaagccggggccgatgctattctcgagcttgcctacactttggccgacggtctggagtactcccggacaggactacaggctgggttaacaattgatgagttcgctccgagattgtcctttttctggggtatcggcatgaacttttatatggaaattgcaaagatgagagcgggacggaggctgtgggcccaccttattgaaaagatgttccagcctaagaactctaaatccctgctgttgagagcgcattgccagacatccggatggagtctaaccgagcaggatccctataacaatatcgttcgaactgcgattgaggctatggcagcagtgttcggggggactcagtccttacatacaaattccttcgacgaagccctcggtttgccgaccgtcaaaagcgctcggattgcccggaacactcagatcatcatccaggaagagtccggaattcccaaagtggctgacccctggggtggttcctacatgatggagtgcctgacgaacgatgtgtatgatgcagcactgaagctgatcaatgagatagaggaaatggggggtatggccaaggcagttgcagaaggcattcctaaactcagaattgaagagtgtgcagcacgccggcaagcccgcattgactcagggtcagaagtaatcgtcggcgtgaataagtaccaactggaaaaggaagatgctgtagaagtactggcaatcgataatactagcgtgcgcaaccggcaaatcgaaaagttaaaaaagattaagtcctcgagggaccaggccttggctgaaagatgtttggctgccctcacggagtgcgccgcttcaggcgatggcaatatactggctttagcggttgatgcaagcagagcaaggtgtaccgtgggggagattactgatgcgctgaagaaagtatttggagaacataaagctaatgatagaatggtaagtggtgcctatagacaggaattcggcgaatcgaaggaaatcacatcagcgataaagagggtccacaaattcatggagagagaaggacgtaggccgcgcctgctggtggcaaaaatgggacaagacggccacgacaggggcgctaaagtcatcgcaaccgggtttgcagacctgggatttgacgtagacattggtcccctgtttcagacacccagagaggtcgctcagcaagccgtggacgcagatgttcacgcggttggcatctccacactggctgccggtcacaagacactagtccctgagctcataaaagaactgaactccttgggacgaccagatatcctggtgatgtgtggcggtgtgatccctcctcaggattacgaatttctgtttgaggttggcgtgtcaaatgtgtttgggcccgggaccaggattcctaaggccgcagtgcaggtgcttgacgacatcgaaaaatgcttggagaagaaacagcagtcggtgtag

SEQ ID NO: 5700 - DNA, 594 bp, Artificial Sequence
  derived and/or modified sequence
accagatacctggcccgctgtacagtgggagagatcactgacgccctcaaaaaggtgttcggtgaacacaaagctaatgacagaatggtgagcggcgcctatagacaggagtttggcgaatctaaagaaataacgtcagctatcaaaagggttcacaaatttatggagagagagggtaggagaccccggttgctagttgccaagatgggacaggacggccacgacagaggtgccaaggttatcgccacaggattcgcggatttgggatttgacgtggacattggacccctctttcaaacgcctagagaagtggcccagcaagcagttgacgcggatgtccatgcagtcggtatttctacattggcagccggacataaaaccctggttccagagcttataaaagaactgaactcattagggcgtccggacatattggttatgtgtggcggcgtcatcccgccgcaggactacgagttcctgttcgaggtcggggtcagtaatgtgtttggtcctggcacccgcatacccaaggcagcagtgcaggttctagatgatatagagaagtgtttagaaaagaaacagcaaagcgtctag

SEQ ID NO: 5701 - DNA, 2253 bp, Artificial Sequence
  derived and/or modified sequence
atgctccgcgcgaagaaccaactgttccttctgtccccccactatctgaggcaggtgaaagaatcatcagggtccagactgattcagcaacggttgctccatcaacaacagccactgcatcccgaatgggcagctctcgctaagaaacaactgaagggaaaaaatccagaggacttgatatggcatacaccagaggggatttccatcaaacccttgtatagcaaacgcgacactatggaccttccagaagaactgccaggagtcaagccctttacccgaggcccttatcccaccatgtacacttttagaccttggacaattcgacaatatgcaggattctcaacagtcgaggaatccaataagttctataaagataacatcaaagctggacagcaagggctttccgtggccttcgacttggcgacccacagaggctatgactccgataaccccagagttagaggtgacgtgggcatggccggtgtagctattgatacggtcgaagacactaaaatactgtttgatggcatccctctggagaaaatgagcgttagcatgactatgaatggcgccgtgatccccgtcctcgcaaatttcattgtgactggcgaggagcagggagtgccaaaggaaaaactgacaggtaccattcagaacgacatcttgaaggaatttatggtgagaaatacatatattttcccccctgagccctcgatgaagattattgctgacatatttgaatacacagccaaacacatgccgaaattcaactctatatctatcagtgggtaccacatgcaggaagccggagccgacgctatccttgaacttgcttatacactggccgacggcctagagtattccagaacaggactgcaagctggccttactattgacgaatttgcacccaggctatcctttttttggggaatcgggatgaacttttacatggaaatcgcaaaaatgcgggcaggaaggcgattatgggcccatcttatagaaaaaatgttccagcccaagaacagtaaaagcctgctactgagagcgcactgccagacatctggttggtcactcactgaacaggatccgtataacaacattgtcaggacggccattgaagccatggccgcagtattcggcgggactcagtctctgcatacaaactcctttgatgaagccctaggcctaccaacagtcaaatctgcaagaatcgcacgaaacacccagatcattatacaggaggaaagtgggatacctaaagtggccgatccatggggaggcagttatatgatggaatgtttaacgaatgacgtgtacgatgccgctctcaagctgattaatgagattgaggagatggggggcatggccaaggcagtggcagaaggaatcccaaaactgaggatcgaagaatgtgcagccagacgccaggcaaggatcgattcaggctctgaggtgattgttggggtaaacaaatatcagctggaaaaggaggatgctgtagaagtactggcaatcgataatactagcgtgcgcaaccggcaaatcgaaaagttaaaaaagattaagtcctcgagggaccaggccttggctgaaagatgtttggctgccctcacggagtgcgccgcttcaggcgatggcaatatactggctttagcggttgatgcaagcagagcaaggtgtaccgtgggggagattactgatgcgctgaagaaagtatttggagaacataaagctaatgatagaatggtaagtggtgcctatagacaggaattcggcgaatcgaaggaaatcacatcagcgatcaaaagagttcacaagttcatggaacgtgaaggccggagacccaggcttctcgtggctaagatggggcaggacgggcacgatagaggggctaaagtcatagcaaccggcttcgctgacctgggttttgatgtagacattgggcccctattccagaccccgcgcgaggtggctcaacaggccgtagacgccgatgtgcacgctgttggtatttccaccctagccgccgggcataaaacattggttccagagctgattaaagagctcaattctctgggtagacccgatatcctggtgatgtgtggcggagtgattcccccccaagattacgaattcctgtttgaggtgggcgtgagtaatgtattcggccctggcacccggatccccaaagctgctgtgcaggttctggacgacatcgaaaaatgtttggaaaagaaacaacagtctgtgtag

SEQ ID NO: 5702 - DNA, 594 bp, Artificial Sequence
  derived and/or modified sequence
accaggtatttagcgcggtgtactgtaggagagatcactgacgcccttaaaaaagtgtttggcgaacataaggctaatgataggatggtttccggagcgtatcgccaggaattcggggagtcaaaggaaatcacttccgccattaaacgggtgcacaagtttatggagagagaaggccggagaccgagacttttggtagctaaaatgggacaggatggacacgaccgcggagcaaaagttatcgccactggctttgccgacctgggcttcgatgtggatattggacctctctttcagactccacgggaagtagctcaacaggccgtggatgccgatgtgcatgccgtaggaatctcgacactcgccgccggacacaagacattggtgccagaactcattaaagaactgaattcactgggtagaccggatatcttggtgatgtgtggtggcgtcataccgccacaagactacgaatttttatttgaggtcggagtatcaaacgtcttcggacctgggaccaggatcccaaaagccgctgtgcaggtcttggacgacatagagaagtgtcttgagaaaaaacagcagtccgtatag

SEQ ID NO: 5703 - DNA, 3749 bp, Artificial Sequence
  derived and/or modified sequence
cctggctgtgtggatgtctgacaggtgaggcgggggacgcagaagtgcagccgccctctcccacagcggagtccaaaacaggcctaccagtcagttcttatttctattgggtgtttccatgctccaccatgttaagagctaagaatcagctttttttactttcacctcattacctgaggcaggtaaaagaatcatcaggctccaggctcatacagcaacgacttctacaccagcaacagccccttcacccagaatgggctgccctggctaaaaagcagctgaaaggcaaaaacccagaagacctaatatggcacaccccggaagggatctctataaaacccttgtattccaagagagatactatggacttacctgaagaacttccaggagtgaagccattcacacgtggaccatatcctaccatgtatacctttaggccctggaccatccgccagtatgctggttttagtactgtggaagaaagcaataagttctataaggacaacattaaggctggtcagcagggattatcagttgcctttgatctggcgacacatcgtggctatgattcagacaaccctcgagttcgtggtgatgttggaatggctggagttgctattgacactgtggaagataccaaaattctttttgatggaattcctttagaaaaaatgtcagtttccatgactatgaatggagcagttattccagttcttgcaaattttatagtaactggagaagaacaaggtgtacctaaagagaagcttactggtaccatccaaaatgatatactaaaggaatttatggttcgaaatacatacatttttcctccagaaccatccatgaaaattattgctgacatatttgaatatacagcaaagcacatgccaaaatttaattcaatttcaattagtggataccatatgcaggaagcaggggctgatgccattctggagctggcctatactttagcagatggattggagtactctagaactggactccaggctggcctgacaattgatgaatttgcaccaaggttgtctttcttctggggaattggaatgaatttctatatggaaatagcaaagatgagagctggtagaagactctgggctcacttaatagagaaaatgtttcagcctaaaaactcaaaatctcttcttctaagagcacactgtcagacatctggatggtcacttactgagcaggatccctacaataatattgtccgtactgcaatagaagcaatggcagcagtatttggagggactcagtctttgcacacaaattcttttgatgaagctttgggtttgccaactgtgaaaagtgctcgaattgccaggaacacacaaatcatcattcaagaagaatctgggattcccaaagtggctgatccttggggaggttcttacatgatggaatgtctcacaaatgatgtttatgatgctgctttaaagctcattaatgaaattgaagaaatgggtggaatggccaaagctgtagctgagggaatacctaaacttcgaattgaagaatgtgctgcccgaagacaagctagaatagattctggttctgaagtaattgttggagtaaataagtaccagttggaaaaagaagacgctgtagaagttctggcaattgataatacttcagtgcgaaacaggcagattgaaaaacttaagaagatcaaatccagcagggatcaagctttggctgaacgttgtcttgctgcactaaccgaatgtgctgctagcggagatggaaatatcctggctcttgcagtggatgcatctcgggcaagatgtacagtgggagaaatcacagatgccctgaaaaaggtatttggtgaacataaagcgaatgatcgaatggtgagtggagcatatcgccaggaatttggagaaagtaaagagataacatctgctatcaagagggttcataaattcatggaacgtgaaggtcgcagacctcgtcttcttgtagcaaaaatgggacaagatggccatgacagaggagcaaaagttattgctacaggatttgctgatcttggttttgatgtggacataggccctcttttccagactcctcgtgaagtggcccagcaggctgtggatgcggatgtgcatgctgtgggcataagcaccctcgctgctggtcataaaaccctagttcctgaactcatcaaagaacttaactcccttggacggccagatattcttgtcatgtgtggaggggtgataccacctcaggattatgaatttctgtttgaagttggtgtttccaatgtatttggtcctgggactcgaattccaaaggctgccgttcaggtgcttgatgatattgagaagtgtttggaaaagaagcagcaatctgtataatatcctctttttgttttagcttttgtctaaaatattattttagttatgatcaaagaagagagtaaagctatgtcttcaatttaatttcaatacctgatttgtactttccttgaaagctttactttaaaataccttacttataggcctggtgtcatgctataagtatgtacatacagtttcacttcaaaaataaaaaaaaaatccctaaaaactctctatactctctataacaatactttatcaagaactctggacaatggtattatttttaaaaatcatggtgatgtatttattagaatgtttcttataaatctgtttactttttatattaagaattaaactgtacctaaaaaaactctgactattcccatttgtcagtttagcattacattgtcttgagcaccagaaaataaaatccatatattaataaaaacctatcttgaaaaactagtggagtgtatttacgtggcaaaagagattttgggaggagtcctcagccaaattctaccagaatcaccttaataaaagaagtattaaaatcaagcacagcaggttggaatatggggaatttgacagtatatttcttcaagtctgagtttactttcttcctgatcatgaccatctgaccttgttatttctgggcttggctcaagaccaaggagagtggatgttgatgaacattcctttaaataaaagtgcttaggttgtagttatggctttgtctagaatggtgatgtcaactgtgagtgtaggtctgtgatatagaaagaattcaactttccagatctagaaagatgctaccttgcatagatttgctccttaaacataaattgcaaaaataaaaatatcacagagaacacctgtactttgcttactgaaagatttgctcactaaagaaggaaagttgccatttacctgtttaacaaatctgcacatcctgcacatgttccccagaatgtaaaataaaaaaagtttaaataaaaaaggaaagttgtcctttattgttaacatgatccattacatgaatataacataaataattatcttttttaataaatttctattgtattagatcagagagcagtcttttggaaagtattatagatacattactgtagaatttacaaactcattgtaatacaatgtatttaattttcagaatatgattatctgaatggtattgtcatgattattgttcccattttcagatgaacactgacttcaagtccaatgatatattcactatgccattttattgacttttccttgtaaagcaatgcacactaatttagtaagtatttggtttctgtgatgtgttcagttgcgtgctgggtgacatgtgaaataaactcatccttgaggaattta

SEQ ID NO: 5704 - DNA, 1962 bp, Artificial Sequence
  derived and/or modified sequence
acacgatatttggcaagatgtacagtgggagaaatcacagatgccctgaaaaaggtatttggtgaacataaagcgaatgatcgaatggtgagtggagcatatcgccaggaatttggagaaagtaaagagataacatctgctatcaagagggttcataaattcatggaacgtgaaggtcgcagacctcgtcttcttgtagcaaaaatgggacaagatggccatgacagaggagcaaaagttattgctacaggatttgctgatcttggttttgatgtggacataggccctcttttccagactcctcgtgaagtggcccagcaggctgtggatgcggatgtgcatgctgtgggcataagcaccctcgctgctggtcataaaaccctagttcctgaactcatcaaagaacttaactcccttggacggccagatattcttgtcatgtgtggaggggtgataccacctcaggattatgaatttctgtttgaagttggtgtttccaatgtatttggtcctgggactcgaattccaaaggctgccgttcaggtgcttgatgatattgagaagtgtttggaaaagaagcagcaatctgtataatatcctctttttgttttagcttttgtctaaaatattattttagttatgatcaaagaagagagtaaagctatgtcttcaatttaatttcaatacctgatttgtactttccttgaaagctttactttaaaataccttacttataggcctggtgtcatgctataagtatgtacatacagtttcacttcaaaaataaaaaaaaaatccctaaaaactctctatactctctataacaatactttatcaagaactctggacaatggtattatttttaaaaatcatggtgatgtatttattagaatgtttcttataaatctgtttactttttatattaagaattaaactgtacctaaaaaaactctgactattcccatttgtcagtttagcattacattgtcttgagcaccagaaaataaaatccatatattaataaaaacctatcttgaaaaactagtggagtgtatttacgtggcaaaagagattttgggaggagtcctcagccaaattctaccagaatcaccttaataaaagaagtattaaaatcaagcacagcaggttggaatatggggaatttgacagtatatttcttcaagtctgagtttactttcttcctgatcatgaccatctgaccttgttatttctgggcttggctcaagaccaaggagagtggatgttgatgaacattcctttaaataaaagtgcttaggttgtagttatggctttgtctagaatggtgatgtcaactgtgagtgtaggtctgtgatatagaaagaattcaactttccagatctagaaagatgctaccttgcatagatttgctccttaaacataaattgcaaaaataaaaatatcacagagaacacctgtactttgcttactgaaagatttgctcactaaagaaggaaagttgccatttacctgtttaacaaatctgcacatcctgcacatgttccccagaatgtaaaataaaaaaagtttaaataaaaaaggaaagttgtcctttattgttaacatgatccattacatgaatataacataaataattatcttttttaataaatttctattgtattagatcagagagcagtcttttggaaagtattatagatacattactgtagaatttacaaactcattgtaatacaatgtatttaattttcagaatatgattatctgaatggtattgtcatgattattgttcccattttcagatgaacactgacttcaagtccaatgatatattcactatgccattttattgacttttccttgtaaagcaatgcacactaatttagtaagtatttggtttctgtgatgtgttcagttgcgtgctgggtgacatgtgaaataaactcatccttgaggaattta

SEQ ID NO: 5705 - RNA, 2396 nt, Artificial Sequence
  derived and/or modified sequence
gggaaauaagagagaaaagaagaguaagaagaaauauaagagccaccauguugcgcgccaaaaaccagcuuuuucuucugucaccucacuaccuucgccaggugaaggaaucauccggcagcagacugauccagcagcgccugcugcaccagcaacaaccccuucaccccgagugggccgcacucgcuaagaagcaacuuaaagggaaaaacccggaggaccuuaucuggcacaccccagagggaaucucaaucaaaccacucuacucaaaaagagauaccauggaucugccggaggaguugcccggaguaaagccguucacgagaggacccuaucccaccauguacaccuuuagacccuggacuauccgccaguacgccggguucagcacaguagaagagucaaacaaguuuuacaaagacaacaucaaggcugggcagcagggguugucgguagccuucgaccucgcgacgcaucgcggcuacgacuccgacaauccgagggucagaggggacguggguauggcgggaguagcaaucgauaccgucgaggacacuaagauuuuguucgaugggauuccucuggagaaaaugagcgugagcaugacgaugaauggggccguaauuccggucuuggcgaacuuuaucgucacuggagaagaacagggagucccgaaggaaaagcucaccgggacuauccagaacgacauuuugaaagaguucaugguccgcaacacuuacaucuuuccgccugagccuucgaugaaaaucaucgccgacaucuucgaguauacggcuaaacacaugccgaaguuuaacucgauuucaauuucaggguaucauaugcaagaagcaggagcggaugcaauccuugaguuggcguauacguuggcggacggccuugaauauagcaggaccgggcugcaagcgggacucacaauugacgaguucgcacccagacugucguuuuucugggguauugggaugaauuucuauauggagauugccaaaaugcgggcaggacgcagacucugggcccaucucaucgagaaaauguuucaacccaaaaacucaaagucgcucuugcuucgggcgcacugccagacgucgggauggagcuugacagagcaggaccccuacaauaacaucguacggacagcaaucgaggcgauggcagcgguguuugggggaacgcagagccuccauacaaauuccuuugaugaggcgcugggauugcccacggucaaaucagcccgaaucgcgaggaauacucagaucaucauccaagaagaaucgggaaucccgaagguggcagaccccugggguggaucguacaugauggagugucugacaaaugacguguacgaugcggcgcugaaacucaucaacgagaucgaggagaugggagggauggccaaggcgguggcagaagggauuccuaagcugcgaauugaggaaugcgcagcgcggaggcaggcgcggaucgacucgggcuccgaggugauugugggggucaacaaauaucagcuugagaaggaggacgccguagaagugcuggcuaucgacaauacgucagugcggaauagacagaucgaaaaguugaagaaaaucaagucgagccgcgaccaggcacuggcagaaaggugcuuggcagcccugacggaaugugcggcgucaggugaugggaacauccuugcguuggccgucgaugccucaagagcacgcuguacagugggggagaucacugacgcuuugaagaagguauuuggagagcauaaggcaaaugaucggaugguaucgggugccuaucggcaggaguuuggugaaagcaaggagaucacgucagcgaucaagaggguacacaaguucauggagagagagggaaggcgaccccgcuugcuuguagccaagaugggacaagauggacacgauagaggcgcgaaggugaucgcgacgggguuugcggaucucgguuucgacguagauauuggaccccuuuuccagacaccucgcgaagucgcgcagcaggcagucgaugcugauguccacgcagugggaauuucgacauuggcggcagggcauaaaacccuugucccagagcucaucaaggagcuuaauucccucgguagaccugacauucuggugaugugcgggggagugauuccgccccaagauuacgaguucuuguucgaggucggagucagcaacguguuugggccagguacaagaauccccaaagccgcagugcaagugcucgaugacauugagaagugucucgaaaagaaacaacaguccgucuaaugagcugccuucugcggggcuugccuucuggccaugcccuucuucucucccuugcaccuguaccucuuggucuuugaauaaagccugaguaggaag

SEQ ID NO: 5706 - RNA, 2253 nt, Artificial Sequence
  derived and/or modified sequence
augcucagagccaagaaccagcuauuccugcugucuccucacuaccugcgucagguuaaagaaucaucugguucacgucuuauccagcaaaggcugcugcaucaacaacaaccccuccauccggaaugggcagcgcuggccaaaaagcaauuaaaagggaaaaacccggaggaucucauuuggcacacccccgagggaauuucuaucaaaccccuguauuccaagcgcgacacaauggaucuuccugaagaacuucccggcgucaaaccguucacacgagggccauaucccacgauguauacauucagaccauggacaauccggcaguacgccggcuuuagcacaguagaggaaagcaacaaguuuuacaaagacaauauuaaagcagggcagcaaggccuuuccgucgccuuugaccuggcuacucaccggggauaugauuccgacaauccucgcguacgcggggacguggggauggccggcguugcaauugauaccgucgaagacacuaagauucuauucgauggaaucccacuugagaagaugagcgucucuaugacuaugaauggcgcugugauccccguguuagccaacuuuauugugacaggagaagagcagggcgugccaaaggagaaacuaaccggaaccauucagaacgacauucuaaaggaguucauggugcgaaacacauacaucuuccccccggagcccucaaugaagauaauugcugacaucuucgaguauaccgccaagcauaugcccaaguucaauucaauuagcaucuccggcuaucauaugcaggaagccggggccgaugcuauucucgagcuugccuacacuuuggccgacggucuggaguacucccggacaggacuacaggcuggguuaacaauugaugaguucgcuccgagauuguccuuuuucugggguaucggcaugaacuuuuauauggaaauugcaaagaugagagcgggacggaggcugugggcccaccuuauugaaaagauguuccagccuaagaacucuaaaucccugcuguugagagcgcauugccagacauccggauggagucuaaccgagcaggaucccuauaacaauaucguucgaacugcgauugaggcuauggcagcaguguucggggggacucaguccuuacauacaaauuccuucgacgaagcccucgguuugccgaccgucaaaagcgcucggauugcccggaacacucagaucaucauccaggaagaguccggaauucccaaaguggcugaccccuggggugguuccuacaugauggagugccugacgaacgauguguaugaugcagcacugaagcugaucaaugagauagaggaaaugggggguauggccaaggcaguugcagaaggcauuccuaaacucagaauugaagagugugcagcacgccggcaagcccgcauugacucagggucagaaguaaucgucggcgugaauaaguaccaacuggaaaaggaagaugcuguagaaguacuggcaaucgauaauacuagcgugcgcaaccggcaaaucgaaaaguuaaaaaagauuaaguccucgagggaccaggccuuggcugaaagauguuuggcugcccucacggagugcgccgcuucaggcgauggcaauauacuggcuuuagcgguugaugcaagcagagcaagguguaccgugggggagauuacugaugcgcugaagaaaguauuuggagaacauaaagcuaaugauagaaugguaaguggugccuauagacaggaauucggcgaaucgaaggaaaucacaucagcgauaaagaggguccacaaauucauggagagagaaggacguaggccgcgccugcugguggcaaaaaugggacaagacggccacgacaggggcgcuaaagucaucgcaaccggguuugcagaccugggauuugacguagacauugguccccuguuucagacacccagagaggucgcucagcaagccguggacgcagauguucacgcgguuggcaucuccacacuggcugccggucacaagacacuagucccugagcucauaaaagaacugaacuccuugggacgaccagauauccuggugauguguggcggugugaucccuccucaggauuacgaauuucuguuugagguuggcgugucaaauguguuugggcccgggaccaggauuccuaaggccgcagugcaggugcuugacgacaucgaaaaaugcuuggagaagaaacagcagucgguguag

SEQ ID NO: 5707 - RNA, 594 nt, Artificial Sequence
  derived and/or modified sequence
accagauaccuggcccgcuguacagugggagagaucacugacgcccucaaaaagguguucggugaacacaaagcuaaugacagaauggugagcggcgccuauagacaggaguuuggcgaaucuaaagaaauaacgucagcuaucaaaaggguucacaaauuuauggagagagaggguaggagaccccgguugcuaguugccaagaugggacaggacggccacgacagaggugccaagguuaucgccacaggauucgcggauuugggauuugacguggacauuggaccccucuuucaaacgccuagagaaguggcccagcaagcaguugacgcggauguccaugcagucgguauuucuacauuggcagccggacauaaaacccugguuccagagcuuauaaaagaacugaacucauuagggcguccggacauauugguuauguguggcggcgucaucccgccgcaggacuacgaguuccuguucgaggucggggucaguaauguguuugguccuggcacccgcauacccaaggcagcagugcagguucuagaugauauagagaaguguuuagaaaagaaacagcaaagcgucuag

SEQ ID NO: 5708 - RNA, 2253 nt, Artificial Sequence
  derived and/or modified sequence
augcuccgcgcgaagaaccaacuguuccuucuguccccccacuaucugaggcaggugaaagaaucaucaggguccagacugauucagcaacgguugcuccaucaacaacagccacugcaucccgaaugggcagcucucgcuaagaaacaacugaagggaaaaaauccagaggacuugauauggcauacaccagaggggauuuccaucaaacccuuguauagcaaacgcgacacuauggaccuuccagaagaacugccaggagucaagcccuuuacccgaggcccuuaucccaccauguacacuuuuagaccuuggacaauucgacaauaugcaggauucucaacagucgaggaauccaauaaguucuauaaagauaacaucaaagcuggacagcaagggcuuuccguggccuucgacuuggcgacccacagaggcuaugacuccgauaaccccagaguuagaggugacgugggcauggccgguguagcuauugauacggucgaagacacuaaaauacuguuugauggcaucccucuggagaaaaugagcguuagcaugacuaugaauggcgccgugauccccguccucgcaaauuucauugugacuggcgaggagcagggagugccaaaggaaaaacugacagguaccauucagaacgacaucuugaaggaauuuauggugagaaauacauauauuuuccccccugagcccucgaugaagauuauugcugacauauuugaauacacagccaaacacaugccgaaauucaacucuauaucuaucaguggguaccacaugcaggaagccggagccgacgcuauccuugaacuugcuuauacacuggccgacggccuagaguauuccagaacaggacugcaagcuggccuuacuauugacgaauuugcacccaggcuauccuuuuuuuggggaaucgggaugaacuuuuacauggaaaucgcaaaaaugcgggcaggaaggcgauuaugggcccaucuuauagaaaaaauguuccagcccaagaacaguaaaagccugcuacugagagcgcacugccagacaucugguuggucacucacugaacaggauccguauaacaacauugucaggacggccauugaagccauggccgcaguauucggcgggacucagucucugcauacaaacuccuuugaugaagcccuaggccuaccaacagucaaaucugcaagaaucgcacgaaacacccagaucauuauacaggaggaaagugggauaccuaaaguggccgauccauggggaggcaguuauaugauggaauguuuaacgaaugacguguacgaugccgcucucaagcugauuaaugagauugaggagauggggggcauggccaaggcaguggcagaaggaaucccaaaacugaggaucgaagaaugugcagccagacgccaggcaaggaucgauucaggcucugaggugauuguugggguaaacaaauaucagcuggaaaaggaggaugcuguagaaguacuggcaaucgauaauacuagcgugcgcaaccggcaaaucgaaaaguuaaaaaagauuaaguccucgagggaccaggccuuggcugaaagauguuuggcugcccucacggagugcgccgcuucaggcgauggcaauauacuggcuuuagcgguugaugcaagcagagcaagguguaccgugggggagauuacugaugcgcugaagaaaguauuuggagaacauaaagcuaaugauagaaugguaaguggugccuauagacaggaauucggcgaaucgaaggaaaucacaucagcgaucaaaagaguucacaaguucauggaacgugaaggccggagacccaggcuucucguggcuaagauggggcaggacgggcacgauagaggggcuaaagucauagcaaccggcuucgcugaccuggguuuugauguagacauugggccccuauuccagaccccgcgcgagguggcucaacaggccguagacgccgaugugcacgcuguugguauuuccacccuagccgccgggcauaaaacauugguuccagagcugauuaaagagcucaauucucuggguagacccgauauccuggugauguguggcggagugauucccccccaagauuacgaauuccuguuugaggugggcgugaguaauguauucggcccuggcacccggauccccaaagcugcugugcagguucuggacgacaucgaaaaauguuuggaaaagaaacaacagucuguguag

SEQ ID NO: 5709 - RNA, 594 nt, Artificial Sequence
  derived and/or modified sequence
accagguauuuagcgcgguguacuguaggagagaucacugacgcccuuaaaaaaguguuuggcgaacauaaggcuaaugauaggaugguuuccggagcguaucgccaggaauucggggagucaaaggaaaucacuuccgccauuaaacgggugcacaaguuuauggagagagaaggccggagaccgagacuuuugguagcuaaaaugggacaggauggacacgaccgcggagcaaaaguuaucgccacuggcuuugccgaccugggcuucgauguggauauuggaccucucuuucagacuccacgggaaguagcucaacaggccguggaugccgaugugcaugccguaggaaucucgacacucgccgccggacacaagacauuggugccagaacucauuaaagaacugaauucacuggguagaccggauaucuuggugaugugugguggcgucauaccgccacaagacuacgaauuuuuauuugaggucggaguaucaaacgucuucggaccugggaccaggaucccaaaagccgcugugcaggucuuggacgacauagagaagugucuugagaaaaaacagcaguccguauag

SEQ ID NO: 5710 - protein, 1273 aa, Artificial Sequence [sequence omitted]

SEQ ID NO: 5711 - protein, 1274 aa, Artificial Sequence
  derived and/or modified sequence
MPEPGKKPVSAFSKKPRSVEVAAGSPAVFEAETERAGVKVRWQRGGSDISASNKYGLATEGTRHTLTVREVGPADQGSYAVIAGSSKVKFDLKVIEAEKAEPMLAPAPAPAEATGAPGEAPAPAAELGESAPSPKGSSSAALNGPTPGAPDDPIGLFVMRPQDGEVTVGGSITFSARVAGASLLKPPVVKWFKGKWVDLSSKVGQHLQLHDSYDRASKVYLFELHITDAQPAFTGSYRCEVSTKDKFDCSNFNLTVHEAMGTGDLDLLSAFRRTSLAGGGRRISDSHEDTGILDFSSLLKKSSSFRTPRDSKLEAPAEEDVWEILRQAPPSEYERIAFQYGVTDLRGMLKRLKGMRRDEKKSTAFQKKLEPAYQVSKGHKIRLTVELADHDAEVKWLKNGQEIQMSGSKYIFESIGAKRTLTISQCSLADDAAYQCVVGGEKCSTELFVKEPPVLITRPLEDQLVMVGQRVEFECEVSEEGAQVKWLKDGVELTREETFKYRFKKDGQRHHLIINEAMLEDAGHYALCTSGGQALAELIVQEKKLEVYQSIADLMVGAKDQAVFKCEVSDENVRGVWLKNGKELVPDSRIKVSHIGRVHKLTIDDVTPADEADYSFVPEGFACNLSAKLHFMEVKIDFVPRQEPPKIHLDCPGRIPDTIVVVAGNKLRLDVPISGDPAPTVIWQKAITQGNKAPARPAPDAPEDTGDSDEWVFDKKLLCETEGRVRVETTKDRSIFTVEGAEKEDEGVYTVTVKNPVGEDQVNLTVKVIDVPDAPAAPKISNVGEDSCTVQWEPPAYDGGQPILGYILERKKKKSYRWMRLNFDLIQELSHEARRMIEGVVYEMRVYAVNAIGMSRPSPASQPFMPIGPPSEPTHLAVEDVSDTTVSLKWRPPERVGAGGLDGYSVEYCPEGCSEWVAALQGLTEHTSILVKDLPTGARLLFRVRAHNMAGPGAPVTTTEPVTVQEILQRPRLQLPRHLRQTIQKKVGEPVNLLIPFQGKPRPQVTWTKEGQPLAGEEVSIRNSPTDTILFIRAARRVHSGTYQVTVRIENMEDKATLVLQVVDKPSPPQDLRVTDAWGLNVALEWKPPQDVGNTELWGYTVQKADKKTMEWFTVLEHYRRTHCVVPELIIGNGYYFRVFSQNMVGFSDRAATTKEPVFIPRPGITYEPPNYKALDFSEAPSFTQPLVNRSVIAGYTAMLCCAVRGSPKPKISWFKNGLDLGEDARFRMFSKQGVLTLEIRKPCPFDGGIYVCRATNLQGEARCECRLEVRVPQ

SEQ ID NO: 5712 - protein, 1274 aa, Artificial Sequence
  derived and/or modified sequence
MPEPGKKPVSAFSKKPRSVEVAAGSPAVFEAETERAGVKVRWQRGGSDISASNKYGLATEGTRHTLTVREVGPADQGSYAVIAGSSKVKFDLKVIEAEKAEPMLAPAPAPAEATGAPGEAPAPAAELGESAPSPKGSSSAALNGPTPGAPDDPIGLFVMRPQDGEVTVGGSITFSARVAGASLLKPPVVKWFKGKWVDLSSKVGQHLQLHDSYDRASKVYLFELHITDAQPAFTGSYRCEVSTKDKFDCSNFNLTVHEAMGTGDLDLLSAFRRTSLAGGGRRISDSHEDTGILDFSSLLKKRDSFRTPRDSKLEAPAEEDVWEILRQAPPSEYERIAFQYGVTDLRGMLKRLKGMRRDEKKSTAFQKKLEPAYQVSKGHKIRLTVELADHDAEVKWLKNGQEIQMSGSKYIFESIGAKRTLTISQCSLADDAAYQCVVGGEKCSTELFVKEPPVLITRPLEDQLVMVGQRVEFECEVSEEGAQVKWLKDGVELTREETFKYRFKKDGQRHHLIINEAMLEDAGHYALCTSGGQALAELIVQEKKLEVYQSIADLMVGAKDQAVFKCEVSDENVRGVWLKNGKELVPDSRIKVSHIGRVHKLTIDDVTPADEADYSFVPEGFACNLSAKLHFMEVKIDFVPRQEPPKIHLDCPGRIPDTIVVVAGNKLRLDVPISGDPAPTVIWQKAITQGNKAPARPAPDAPEDTGDSDEWVFDKKLLCETEGRVRVETTKDRSIFTVEGAEKEDEGVYTVTVKNPVGEDQVNLTVKVIDVPDAPAAPKISNVGEDSCTVQWEPPAYDGGQPILGYILERKKKKSYRWMRLNFDLIQELSHEARRMIEGVVYEMRVYAVNAIGMSRPSPASQPFMPIGPPSEPTHLAVEDVSDTTVSLKWRPPERVGAGGLDGYSVEYCPEGCSEWVAALQGLTEHTSILVKDLPTGARLLFRVRAHNMAGPGAPVTTTEPVTVQEILQRPRLQLPRHLRQTIQKKVGEPVNLLIPFQGKPRPQVTWTKEGQPLAGEEVSIRNSPTDTILFIRAARRVHSGTYQVTVRIENMEDKATLVLQVVDKPSPPQDLRVTDAWGLNVALEWKPPQDVGNTELWGYTVQKADKKTMEWFTVLEHYRRTHCVVPELIIGNGYYFRVFSQNMVGFSDRAATTKEPVFIPRPGITYEPPNYKALDFSEAPSFTQPLVNRSVIAGYTAMLCCAVRGSPKPKISWFKNGLDLGEDARFRMFSKQGVLTLEIRKPCPFDGGIYVCRATNLQGEARCECRLEVRVPQ

SEQ ID NO: 5713 - DNA, 3822 bp, Artificial Sequence
  derived and/or modified sequence
atgccagagccaggtaagaaacctgtgtcggccttttcgaagaaacccaggagcgtggaggtggccgccggttctccagctgtgtttgaggccgaaaccgagagagcaggagttaaggtccgatggcaacgaggggggtctgacatcagtgcctctaataagtatgggctggctaccgaagggaccagacatactctgactgtcagggaagtcggccctgcagatcaagggagttacgctgtaatcgctggatcaagtaaggtgaaatttgatctgaaagtgattgaggctgagaaggccgaacctatgttggcccctgcccctgcccctgccgaggccacaggggctcccggcgaggcccctgcccccgccgcagagctgggcgagtctgccccctccccaaagggaagttccagcgcagcactgaacggccccacaccaggcgccccagacgatcctatcggactgtttgtgatgcggccacaagatggcgaggtaactgttggcgggagtatcactttttcagcacgcgttgcgggtgccagtctcctgaaacctcccgtcgtcaaatggttcaagggcaaatgggtcgacctctcctctaaggtgggacaacacctccagcttcatgactcttacgatcgggcttccaaggtgtatctgtttgaacttcacattacagacgcccaaccagcctttacggggtcttacagatgcgaagtttcaactaaggacaaatttgactgctccaactttaatttaactgtgcatgaagcaatgggcaccggagatttggatctcctgagcgcattccgcagaacatccctcgctggaggaggacgacgcattagcgattcccatgaagacacaggcatactggatttcagtagcctgctgaagaagtcctcttcattccgaacaccacgggactccaaactagaagcacccgctgaggaagacgtgtgggagattctgcgacaggccccaccgtccgaatatgaacggatcgcttttcagtatggtgtcactgacttgaggggcatgcttaaacgcctgaaggggatgagacgggatgagaaaaagtccaccgcttttcagaaaaagctggagcccgcctaccaggtgagcaagggccataaaattcggctcaccgtcgagctggccgaccatgatgctgaagtgaagtggctgaaaaatgggcaggagatacagatgagcgggcgctatatattcgaatctataggagccaaacggacccttacgattagtcagtgctcccttgctgatgatgcggcttatcaatgtgtagtagggggcgagaaatgcagcacagagctatttgtaaaagagcctccggtattgattaccagacctctggaagaccaacttgtcatggtgggacagcgcgtggaattcgagtgtgaggtgagcgaggaaggagcgcaggtcaagtggctaaaagacggcgttgaactgactagagaagagaccttcaagtacagattcaagaaggacgggcaacgccatcatttgattatcaacgaagcaatgctggaggacgccggccactacgctctctgtactagcggagggcaggctctggctgagctgatcgtgcaggagaaaaaactagaggtttatcagtccatcgccgacctgatggtgggtgccaaagaccaggccgtgttcaagtgtgaagtgagtgacgagaacgtgcgcggggtgtggctaaagaacggcaaagagctggtgcccgactcgcggatcaaggtctcacatatagggcgagtccataaactgactatagatgatgtgactcctgctgacgaggcggattattcgttcgtccccgaaggattcgcttgtaatctaagcgcaaaactccatttcatggaggtcaagatcgatttcgtgccccggcaagagcctccaaaaattcacctggactgtcccggtagaatcccggatacaatagtcgttgtcgctggaaacaagctgcgtctggacgtgccaatttcaggggacccagctcctactgtcatttggcagaaagccatcacacagggcaacaaagcacccgccagacctgcacccgacgctcctgaggacacgggggactctgatgaatgggtgttcgataaaaagctgctttgtgagaccgaaggtcgtgtcagagtggagaccactaaggatcggagtatcttcaccgttgagggggcagagaaggaggatgaaggtgtttataccgtcacagtgaaaaatcctgtgggtgaggatcaggtgaatttaacagtcaaggtcattgatgtgccagacgcccccgcagcacccaagatctccaatgtgggggaggatagctgcacagtacagtgggaaccaccggcatatgatggtgggcaacctattctgggttacatcctggagagaaaaaaaaagaagtcctacaggtggatgaggttaaatttcgacctcattcaagaactgtcacatgaggcccggaggatgatcgagggcgtggtgtacgagatgagagtgtacgcagtcaacgcgatcggaatgtccagaccttccccggccagccaaccattcatgcccatcggtccacctagcgagccgacgcacctggcggtggaggatgtcagtgatacaacagtgagtctgaagtggcgtccacccgaaagggtgggggccgggggattagatggctattccgttgagtattgtcctgagggctgctctgagtgggtggcagcccttcaggggttaactgagcacaccagcattctggtgaaggatcttccaaccggcgcccggttgttgttccgggtgagagcccacaatatggccgggcccggagcgcctgtcacgactacagagcccgtgactgtgcaggaaatccttcaacgcccacgcctccagttgcccagacacctgcggcaaaccattcagaagaaggttggtgagcccgtgaatctgttgattccgttccagggaaagcctcggccccaggtgacctggacaaaggaggggcagccgttggctggagaagaagtgtccattcgcaatagtcctaccgacactattctgtttattcgcgccgccaggcgcgtgcactccgggacctaccaggttacagtgcggatcgagaatatggaagataaagccacactggtgctacaggtcgtggataaaccgagccctccccaagatctgagagtaaccgacgcttggggactaaacgtggctctggagtggaagccaccccaggacgtgggtaataccgaactctggggttatacggtgcaaaaggcagataagaagactatggagtggttcacagtgctggagcactataggagaacacactgtgtggtgcctgaactgatcatcggaaacgggtactattttagggtgttcagtcagaatatggtcggtttctctgatcgcgctgccacaactaaagaacccgtcttcattccaaggcctggaatcacctatgagccccccaactacaaagcactggacttcagtgaggctcccagcttcacacagcctttggtcaatagatcggtgatcgccggttataccgctatgctttgctgcgctgtgcgggggagccccaagcccaaaatcagctggtttaaaaatggattagatctcggcgaagatgcacggtttcgcatgttctcaaagcagggagtgttgactctcgaaattcgcaaaccctgcccgttcgacgggggcatctacgtctgtcgagcgaccaatctacagggagaagcccgctgtgagtgccggctagaggtgcgagtgcctcagtag

SEQ ID NO: 5714 - DNA, 3825 bp, Artificial Sequence
  derived and/or modified sequence
atgccagagcctggcaaaaagcctgtttccgcattctcaaagaaaccaaggtcagttgaggtagctgccggctctccagccgtattcgaggccgagactgagcgcgctggagtcaaagtgaggtggcagagaggcggcagtgacatctccgcctccaacaagtacggcctcgcgacagaaggcactaggcatacgcttaccgttagggaagttggacccgcagaccagggtagctatgcagtgatcgccggaagctccaaagttaagttcgacttaaaagtcatcgaggccgaaaaggccgaacccatgctcgcacccgccccagccccggctgaagccaccggagcccctggtgaagcacctgcccctgctgctgagctgggagagtcagcaccctcccctaaagggtcttcctctgccgcccttaacggccctacaccaggagccccagacgaccccatcggacttttcgttatgagaccgcaggacggcgaagtcaccgtgggagggagcatcacattttctgctcgggtggctggagcgagtctgctaaaacccccggtggtcaagtggtttaaaggcaaatgggttgatctcagctccaaagtgggtcagcacttgcagctgcacgatagctacgatagggcctcaaaggtgtacctgttcgaacttcacatcacagatgcgcagcccgctttcacaggctcttacagatgtgaggtttcaaccaaggataaatttgattgcagtaatttcaacctcacggtgcatgaggctatgggtaccggtgatttagaccttctgtcagccttccgccgaacaagtctcgccggaggaggcagacgcatttctgactcacatgaggacacgggtatcttggacttctctagcttgctgaagaaatcatcctcttttcggacaccacgagactcaaaactggaagctcctgccgaggaagacgtctgggagatccttcgacaagcccctcctagcgaatatgagaggatcgcctttcaatacggtgtcaccgatcttagaggtatgctcaaacgccttaagggcatgcgaagagacgagaagaaatctacagcatttcagaagaagctggagcctgcttaccaggtttctaagggccataaaatcaggctcactgtggagttggccgaccacgatgccgaggtcaagtggctgaaaaacggtcaggaaatccagatgtccggtagtaagtacatcttcgagagtatcggggcgaaaagaacactgacaatttcacaatgttctctcgccgacgatgcggcataccagtgcgtcgtcgggggagaaaagtgtagtacggagctgtttgttaaagaaccacctgtgctgatcaccaggcctctggaagaccagctagtgatggtcggccaacgcgtggaattcgagtgtgaggtgtctgaggaaggcgcgcaggtgaagtggctgaaggatggggtcgaactgactcgggaggagacatttaagtatcggttcaaaaaggatggacagcggcaccaccttattatcaatgaagcaatgctggaggatgctggccactatgccctctgcacgtccggcggccaggctctggctgagctgattgtccaagaaaagaaattagaagtgtatcagagtattgcagaccttatggtcggcgctaaagaccaagccgtgttcaaatgtgaggtttctgacgagaacgtgcggggggtttggctcaaaaatgggaaggagttggtgcctgatagtaggattaaggtgagccatattggccgcgtgcataaattgacaattgatgacgtgactccggccgacgaagctgattactcctttgtcccagaaggattcgcctgtaatctgtctgcaaagcttcactttatggaggtgaagatcgacttcgtgccccgacaggagcccccaaaaatccacctcgattgcccgggtcgaattccagatactattgtggtggtggctggcaataaactgcgcttggatgtaccaataagtggtgatcctgcccctacagttatctggcaaaaggccatcacgcagggcaataaagcccctgctcggccggctccagacgcccccgaagatacaggagactctgacgaatgggtctttgataagaagctcctctgcgaaacagagggccgagtgcgtgtcgaaactactaaagatagatccatatttaccgtggagggtgctgaaaaagaagatgaaggagtttacacagtgactgtgaaaaaccccgttggggaggatcaggtgaatttaaccgttaaggtgattgacgtgcctgacgccccggccgcgccgaagatcagcaacgtcggagaggacagctgcacagtacaatgggaacctcccgcttacgatggcggacagcccattttgggctatattttagaacgcaagaagaagaagagctaccggtggatgcggttaaattttgatctcatccaggagctctcacatgaagccagaagaatgatcgaaggagtcgtgtatgagatgagagtctacgccgtgaatgccattgggatgtccagaccttcacccgctagccagccctttatgcctatcggtcctccatccgagcccacacacctcgctgttgaggacgtttcggatacaacagtttcgctgaaatggcgccctcccgagagggtgggagccggcgggttagacggatattcagtagagtattgccctgagggctgctcagaatgggtggcggcactgcagggactgacagagcacacctctatccttgtcaaggacctgccaactggcgcccggctcttgttcagagtgagagcgcacaatatggccggtccaggggccccagtcaccacgaccgagcccgtcaccgttcaagagatcctgcagagaccaaggcttcagttgccacgtcacctccggcagaccatccagaaaaaagttggagagccagtgaacctcttaatcccattccaggggaagcctaggccacaggtcacttggacaaaagaaggccagcccttggcgggcgaggaagtttcgatcagaaacagtcctaccgacactatactctttattcgggcagctcgcagagtccactctggcacttaccaggtgactgtcaggattgagaacatggaagacaaagcaaccctggtcctccaggtggtcgataagcctagtcctccccaggacctgcgggtgaccgacgcatggggcctgaatgttgcattagagtggaaaccacctcaggacgtgggtaacaccgagctctggggctataccgtgcagaaggccgacaagaagacaatggaatggtttacagtcctggaacactacaggcggacccactgcgtggtgcccgaactgattatcggaaacgggtattatttcagagtattctctcagaatatggtaggtttctccgaccgcgcagcaaccaccaaagagcctgtattcataccccggccaggcatcacctacgaaccccccaattataaggccctcgatttttctgaggctccatcttttacccaacctctggttaaccgctccgtgatcgccggctatacagctatgctgtgctgcgctgtgagaggctcaccaaaacctaaaatatcctggttcaagaatggtttggatctgggggaagacgcccgctttaggatgttttcaaagcaaggagttttgaccctcgagatacggaaaccgtgtcccttcgacggaggaatctacgtctgccgcgcaaccaatctgcaaggtgaagcccgatgcgagtgtcgactcgaggtccgagttccacagtag

SEQ ID NO: 5715 - DNA, 3825 bp, Artificial Sequence
  derived and/or modified sequence
atgcccgagcccggaaagaagcctgtctcagccttctcaaaaaaaccacggtcagtggaagtagccgctgggtcaccagccgtattcgaagccgaaacggagagagctggggtgaaggttcgctggcaacgaggagggtcagacataagcgcctcgaataaatacggtctggcaacggagggcacacgtcatacccttactgtccgtgaggtgggcccagccgaccaggggtcttatgccgtgatagctgggtcctcaaaagtcaagtttgacctgaaggtgatcgaggcagaaaaagccgagcctatgcttgctcctgcccccgctcctgctgaggccactggggccccgggtgaagcccctgcgcccgctgcagagctgggagaatctgcacccagccctaaaggtagcagcagtgccgctttgaatgggccgactcccggagccccggacgatccaattggactctttgtcatgcgccctcaggacggagaagtgacagtgggcggatctatcacattcagcgcccgcgttgcaggggctagccttcttaaacctcccgtagtgaaatggtttaagggaaagtgggttgacctaagctccaaggtaggccagcacctgcagctgcatgatagctacgaccgcgcttctaaagtatatctgtttgaactgcatattacagatgcccagcccgccttcacaggcagctaccggtgcgaggtgagtacaaaagataaattcgactgttcaaatttcaatctaactgtacacgaggccatgggcacaggtgacctggatctgctgtctgccttccggcgcacttccttggccggcggaggcaggagaatctctgattcccatgaggatacagggattctggatttctcatccctgctgaagaaaagggatagcttcagaactcctcgcgacagcaaattggaggctcctgccgaggaggacgtctgggagatcctgaggcaggctccacccagcgaatacgagcgtattgcctttcagtacggagtgaccgaccttcggggtatgcttaagcgactcaagggtatgcggcgtgatgaaaagaaatctactgcctttcagaaaaagctggagcctgcttaccaggtatcaaagggccacaagattaggctgactgtcgagcttgctgaccacgacgccgaggtgaagtggctcaaaaatggccaggaaatccagatgtccggcagcaagtatatattcgaatctataggagcaaagcggaccctgaccatctcccagtgttcactggccgacgatgccgcttatcagtgcgtcgtcggaggtgagaagtgtagtaccgagctctttgtgaaggagcctcccgttctgatcacacgtcctcttgaggatcaactggtaatggtgggacagagggtggagttcgagtgtgaagtgagtgaagaaggggctcaggttaagtggctgaaagatggcgtggagctgacccgggaagaaacttttaagtatcggttcaaaaaggatgggcaacgccatcacctgataattaatgaagctatgctggaggacgcagggcactacgctttatgcaccagcggcgggcaagctttagctgaactgattgtccaagaaaaaaagctggaagtctatcaaagtatcgctgaccttatggtaggagcgaaagaccaggctgtcttcaaatgtgaggtgtcggacgagaatgtgaggggtgtctggctgaaaaacggaaaggagctggtgcctgactccaggattaaggtgtcgcatatcggtcgcgtacacaagctgactatcgacgatgtgaccccagctgacgaggctgactatagcttcgtacccgaagggttcgcttgcaacctgtctgctaagctgcatttcatggaggttaagatcgacttcgtgccaaggcaagaacctcctaaaattcacctcgattgtccaggcaggattccggataccattgtggtggttgccggcaataagttgcgcttggatgttccaatcagtggagacccggcccctacagtgatctggcaaaaagctataacgcagggcaacaaagcacccgcacggccagcgcccgacgcccctgaagatacaggcgactcggacgaatgggtcttcgataagaagttgctgtgcgaaactgagggcagagtgagggtggagaccacgaaagataggagcatctttacggtggagggcgcggagaaagaggacgagggagtgtacactgtgacggttaagaaccccgtgggtgaggaccaggtgaacctcaccgtgaaagtgatcgatgtgccggacgcccccgctgcccccaagattagcaacgtcggcgaagactcatgtactgtgcagtgggaacctccagcctacgatggaggccagccaatcctggggtacattttggagcgcaaaaaaaaaaagtcctatcggtggatgcggctcaatttcgatcttatccaggagctttcccatgaagcaagaaggatgattgagggggtcgtctacgagatgcgggtgtatgccgtgaatgcgatcggaatgtcccgaccctctcccgcatctcagccttttatgccgatcggcccaccctctgaacccacccacctggccgtggaagatgtgagtgatacaacggtatccctcaagtggcggccccctgaacgtgtcggtgctggagggctggacggatatagcgtggaatactgccccgagggatgctcagagtgggttgccgctttgcagggccttacagagcacactagtatcttggtgaaggacttgcccacaggggctagattactgttcagggtgagagcacacaacatggcggggccgggcgctccagtgacgaccacagagcccgtaactgttcaggagattctacagcgaccccgcctccagttaccgcggcatctgcggcagacaatacagaagaaggtcggagagccagtgaacctgctgatcccctttcagggcaagccaagaccgcaggtcacatggactaaggagggtcagccactggccggcgaggaggtcagtattcggaatagcccaacggacactatattgtttatccgggctgcacgtcgcgttcacagcggcacctatcaagtgacggttaggattgaaaatatggaggataaggccacccttgtgcttcaggttgtggataaaccttcgcccccacaggacctgcgcgtgactgatgcttggggcctgaatgtagccctggaatggaagccgccccaggacgttggaaacacggaactctggggttatactgtgcaaaaggctgataagaagacgatggagtggttcacggtcctggagcactaccggcggacgcattgcgtcgtgccagagttgattatcggtaacggctactacttcagggtctttagccagaacatggtaggatttagtgacagggcagctacaactaaagaaccagtcttcattccgcgccccgggattacttatgagccgccaaattataaggcactggacttttcggaggccccttctttcactcaacctctggtgaatcggagcgtgatcgctggttatacagcaatgctttgctgtgccgtgcgcggctctccaaagcctaagatttcttggttcaaaaacggtttagacctaggagaggatgcaagattcaggatgttttccaagcagggagtgctgacactcgagataaggaaaccgtgtcctttcgacggagggatttacgtgtgtcgagcaactaacctgcagggagaagctcgctgcgagtgccgactggaagtaagagtgcctcagtag

SEQ ID NO: 5716 - DNA, 3822 bp, Artificial Sequence
  derived and/or modified sequence
atgcctgagcccgggaagaagcctgtgtctgccttcagcaagaagcccaggtctgtggaggtggccgccggcagccctgctgtgtttgaagctgagacagagcgggccggcgtgaaggtgcgctggcagagaggaggcagtgacatcagcgccagcaacaagtatggcctggccacagagggcaccaggcacaccctgactgtgcgggaggtgggccctgctgaccagggcagctatgctgtgattgctggcagcagcaaggtgaagtttgacctgaaggtgattgaagctgagaaggccgagcccatgctggccccagccccagccccagctgaggccaccggggcccctggagaggccccagccccagctgctgagctgggggagagcgcccccagccccaagggcagcagcagcgctgccctgaatggccccacccctggggccccagatgaccccatcggcctgtttgtgatgaggccccaggatggagaggtgacagtgggcggcagcatcaccttcagcgcccgggtggccggggccagcctgctgaagccccctgtggtgaagtggttcaagggcaagtgggtggacctgagcagcaaggtgggccagcacctgcagctgcatgacagctatgaccgggccagcaaggtgtacctgtttgagctgcacatcacagatgcccagcctgccttcaccggcagctaccgctgtgaggtgtccaccaaggacaagtttgactgcagcaacttcaacctgactgtgcatgaggccatgggcaccggggacctggacctgctgagcgccttccggaggaccagcctggccggcggcggccgccgcatcagtgacagccatgaggacaccggcatcctggacttcagcagcctgctgaagaagagcagcagcttccgcaccccccgggacagcaagctggaggccccagcagaagaagatgtgtgggagatcctgcggcaggcccctccttctgaatatgagcgcatcgccttccagtatggagtgacagacctgcggggcatgctgaagaggctgaagggcatgagaagagatgagaagaagagcacagccttccagaagaagctggagcccgcctaccaggtgtccaagggccacaagatccggctgactgtggagctggccgaccatgatgctgaggtgaagtggctgaagaatggccaggagatccagatgagcggccgctacatctttgagagcatcggggccaagaggaccctgaccatcagccagtgcagcctggctgatgatgctgcctaccagtgtgtggtgggcggggagaagtgcagcacagagctgtttgtgaaggagccccctgtgctgatcacccggcccctggaggaccagctggtgatggtgggccagagggtggagtttgaatgtgaggtgtctgaggagggcgcccaggtgaagtggctgaaggatggagtggagctgacccgggaggagaccttcaagtaccgcttcaagaaggatggccagaggcaccacctgatcatcaatgaggccatgctggaggatgctggccactacgccctgtgcaccagcggcggccaggccctggccgagctgattgtgcaggagaagaagctggaggtgtaccagagcattgctgacctgatggtgggcgccaaggaccaggccgtgttcaagtgtgaggtgtctgatgaaaatgtgcggggcgtgtggctgaagaatggcaaggagctggtgcctgacagccgcatcaaggtgagccacatcggccgggtgcacaagctgaccattgatgatgtgaccccagcagatgaagctgactacagctttgtgcctgagggctttgcctgcaacctgagcgccaagctgcacttcatggaggtgaagattgactttgtgccccggcaggagccccccaagatccacctggactgccccggccgcatcccagacaccatcgtggtggtggccggcaacaagctgcggctggatgtgcccatcagcggggaccctgcccccaccgtcatctggcagaaggccatcacccagggcaacaaggccccagcccggcctgccccagatgcccctgaggacaccggggacagtgatgagtgggtgtttgacaagaagctgctgtgtgaaacagagggccgggtgcgggtggagaccaccaaggacaggagcatcttcaccgtggagggcgctgagaaggaggatgagggcgtgtacacagtgacagtgaagaaccctgtgggggaggaccaggtgaacctgactgtgaaggtgattgatgtgcctgatgccccagctgcccccaagatcagcaatgtgggggaggacagctgcaccgtgcagtgggagcccccagcctatgatggcggccagcccatcctgggctacatcctggagaggaagaagaagaagagctaccgctggatgaggctgaactttgacctgatccaggagctgagccatgaggcccggaggatgattgagggcgtggtgtatgagatgagggtgtatgctgtgaatgccatcggcatgagccggcccagccctgccagccagcccttcatgcccatcggcccccccagcgagcccacccacctggccgtggaggatgtgtctgacaccaccgtgtccctgaagtggaggcctcctgagcgggtgggcgccggcggcctggatggctacagcgtggagtactgcccagagggctgcagcgagtgggtggccgccctgcagggcctgacagagcacaccagcatcctggtgaaggacctgcccactggagcccggctgctcttccgggtgcgggcccacaacatggccggccctggggcccctgtgaccaccacagagcctgtgacagtgcaggagatcctgcagaggccccggctgcagctgcccaggcacctgcggcagaccatccagaagaaggtgggggagcctgtgaacctgctgatccccttccagggcaagccccggccccaggtgacctggaccaaggagggccagcccctggccggggaggaggtgtccatccggaacagccccacagacaccatcctcttcatccgggccgccaggagagtgcacagcggcacctaccaggtgacagtgagaattgagaacatggaggacaaggccaccctggtgctgcaggtggtggacaagcccagccccccccaggacctgcgggtgacagatgcctggggcctgaatgtggccctggagtggaagccaccccaggatgtgggcaacacagagctgtggggctacacagtgcagaaggctgacaagaagaccatggagtggttcaccgtgctggagcactacagaaggacccactgtgtggtgcctgagctgatcattggaaatggctactacttccgggtcttcagccagaacatggtgggcttcagtgaccgggccgccaccaccaaggagcccgtcttcatcccccggcccggcatcacctatgagccccccaactacaaggccctggacttcagcgaggcccccagcttcacccagcccctggtgaacagatctgtgattgctggctacacagccatgctgtgctgtgctgtgcggggcagccccaagcccaagatctcctggttcaagaatggcctggacctgggggaggatgcccgcttcaggatgttcagcaagcagggcgtgctgaccctggagatcaggaagccctgcccctttgatggcggcatctacgtgtgccgggccaccaacctgcagggcgaggcccgctgtgagtgccgcctggaggtgcgggtgccccagtag

SEQ ID NO: 5717 - DNA, 3825 bp, Artificial Sequence
  derived and/or modified sequence
atgcctgagcccgggaagaagcctgtgtctgccttcagcaagaagcccaggtctgtggaggtggccgccggcagccctgctgtgtttgaagctgagacagagcgggccggcgtgaaggtgcgctggcagagaggaggcagtgacatcagcgccagcaacaagtatggcctggccacagagggcaccaggcacaccctgactgtgcgggaggtgggccctgctgaccagggcagctatgctgtgattgctggcagcagcaaggtgaagtttgacctgaaggtgattgaagctgagaaggccgagcccatgctggccccagccccagccccagctgaggccaccggggcccctggagaggccccagccccagctgctgagctgggggagagcgcccccagccccaagggcagcagcagcgctgccctgaatggccccacccctggggccccagatgaccccatcggcctgtttgtgatgaggccccaggatggagaggtgacagtgggcggcagcatcaccttcagcgcccgggtggccggggccagcctgctgaagccccctgtggtgaagtggttcaagggcaagtgggtggacctgagcagcaaggtgggccagcacctgcagctgcatgacagctatgaccgggccagcaaggtgtacctgtttgagctgcacatcacagatgcccagcctgccttcaccggcagctaccgctgtgaggtgtccaccaaggacaagtttgactgcagcaacttcaacctgactgtgcatgaggccatgggcaccggggacctggacctgctgagcgccttccggaggaccagcctggccggcggcggccgccgcatcagtgacagccatgaggacaccggcatcctggacttcagcagcctgctgaagaagagcagcagcttccgcaccccccgggacagcaagctggaggccccagcagaagaagatgtgtgggagatcctgcggcaggcccctccttctgaatatgagcgcatcgccttccagtatggagtgacagacctgcggggcatgctgaagaggctgaagggcatgagaagagatgagaagaagagcacagccttccagaagaagctggagcccgcctaccaggtgtccaagggccacaagatccggctgactgtggagctggccgaccatgatgctgaggtgaagtggctgaagaatggccaggagatccagatgagcggcagcaagtacatctttgagagcattggagccaagaggaccctgaccatcagccagtgcagcctggctgatgatgctgcctaccagtgtgtggtgggcggggagaagtgcagcacagagctgtttgtgaaggagccccctgtgctgatcacccggcccctggaggaccagctggtgatggtgggccagagggtggagtttgaatgtgaggtgtctgaggagggcgcccaggtgaagtggctgaaggatggagtggagctgacccgggaggagaccttcaagtaccgcttcaagaaggatggccagaggcaccacctgatcatcaatgaggccatgctggaggatgctggccactacgccctgtgcaccagcggcggccaggccctggccgagctgattgtgcaggagaagaagctggaggtgtaccagagcattgctgacctgatggtgggcgccaaggaccaggccgtgttcaagtgtgaggtgtctgatgaaaatgtgcggggcgtgtggctgaagaatggcaaggagctggtgcctgacagccgcatcaaggtgagccacatcggccgggtgcacaagctgaccattgatgatgtgaccccagcagatgaggccgactacagctttgtgcctgagggctttgcctgcaacctgagcgccaagctgcacttcatggaggtgaagattgactttgtgccccggcaggagccccccaagatccacctggactgccccggccgcatcccagacaccatcgtggtggtggccggcaacaagctgcggctggatgtgcccatcagcggggaccctgcccccaccgtcatctggcagaaggccatcacccagggcaacaaggccccagcccggcctgccccagatgccccagaagatactggagacagtgatgagtgggtgtttgacaagaagctgctgtgtgaaacagagggccgggtgcgggtggagaccaccaaggacaggagcatcttcaccgtggagggcgctgagaaggaggatgaaggagtgtacacagtgacagtgaagaaccctgtgggggaggaccaggtgaacctgactgtgaaggtgattgatgtgcctgatgccccagctgcccccaagatcagcaatgtgggggaggacagctgcaccgtgcagtgggagcccccagcctatgatggcggccagcccatcctgggctacatcctggagaggaagaagaagaagagctaccgctggatgaggctgaactttgacctgatccaggagctgagccatgaggcccggaggatgattgaaggagtggtgtatgagatgagggtgtatgctgtgaatgccatcggcatgagccggcccagccctgccagccagcccttcatgcccatcggccccccatctgagcccacccacctggccgtggaggatgtgtctgacaccaccgtgtccctgaagtggaggcctcctgagcgggtgggcgctgggggcctggatggctacagcgtggagtactgcccagagggctgcagcgagtgggtggccgccctgcagggcctgacagagcacaccagcatcctggtgaaggacctgcccaccggggcccggctgctcttccgggtgcgggcccacaacatggccggccctggggcccctgtgaccaccacagagcctgtgacagtgcaggagatcctgcagaggccccggctgcagctgcccaggcacctgcggcagaccatccagaagaaggtgggggagcctgtgaacctgctgatccccttccagggcaagccccggccccaggtgacctggaccaaggagggccagcccctggccggggaggaggtgtccatccggaacagccccacagacaccatcctcttcatccgggccgcccggcgggtgcacagcggcacctaccaggtgacagtgagaattgagaacatggaggacaaggccaccctggtgctgcaggtggtggacaagcccagccccccccaggacctgcgggtgacagatgcctggggcctgaatgtggccctggagtggaagccaccccaggatgtgggcaacacagagctgtggggctacacagtgcagaaggctgacaagaagaccatggagtggttcaccgtgctggagcactacagaaggacccactgtgtggtgcctgagctgatcattggaaatggctactacttccgggtcttcagccagaacatggtgggcttcagtgacagagctgccaccaccaaggagcctgtgttcatccccaggcctggcatcacctatgagccccccaactacaaggccctggacttcagcgaggcccccagcttcacccagcccctggtgaacagatctgtgattgctggctacacagccatgctgtgctgtgctgtgcggggcagccccaagcccaagatctcctggttcaagaatggcctggacctgggagaagatgcccgcttcaggatgttcagcaagcagggcgtgctgaccctggagatcaggaagccctgcccctttgatggcggcatctacgtgtgccgggccaccaacctgcagggcgaggcccgctgtgaatgtcggctggaggtgcgggtgccccagtag

SEQ ID NO: 5718 - DNA, 3825 bp, Artificial Sequence
  derived and/or modified sequence
atgcctgagcccgggaagaagcctgtgtctgccttcagcaagaagcccaggtctgtggaggtggccgccggcagccctgctgtgtttgaagctgagacagagcgggccggcgtgaaggtgcgctggcagagaggaggcagtgacatcagcgccagcaacaagtatggcctggccacagagggcaccaggcacaccctgactgtgcgggaggtgggccctgctgaccagggcagctatgctgtgattgctggcagcagcaaggtgaagtttgacctgaaggtgattgaagctgagaaggccgagcccatgctggccccagccccagccccagctgaggccaccggggcccctggagaggccccagccccagctgctgagctgggggagagcgcccccagccccaagggcagcagcagcgctgccctgaatggccccacccctggggccccagatgaccccatcggcctgtttgtgatgaggccccaggatggagaggtgacagtgggcggcagcatcaccttcagcgcccgggtggccggggccagcctgctgaagccccctgtggtgaagtggttcaagggcaagtgggtggacctgagcagcaaggtgggccagcacctgcagctgcatgacagctatgaccgggccagcaaggtgtacctgtttgagctgcacatcacagatgcccagcctgccttcaccggcagctaccgctgtgaggtgtccaccaaggacaagtttgactgcagcaacttcaacctgactgtgcatgaggccatgggcaccggggacctggacctgctgagcgccttccggaggaccagcctggccggcggcggccgccgcatcagtgacagccatgaggacaccggcatcctggacttcagcagcctgctgaagaagagggacagcttccgcaccccccgggacagcaagctggaggccccagcagaagaagatgtgtgggagatcctgcggcaggcccctccttctgaatatgagcgcatcgccttccagtatggagtgacagacctgcggggcatgctgaagaggctgaagggcatgagaagagatgagaagaagagcacagccttccagaagaagctggagcccgcctaccaggtgtccaagggccacaagatccggctgactgtggagctggccgaccatgatgctgaggtgaagtggctgaagaatggccaggagatccagatgagcggcagcaagtacatctttgagagcattggagccaagaggaccctgaccatcagccagtgcagcctggctgatgatgctgcctaccagtgtgtggtgggcggggagaagtgcagcacagagctgtttgtgaaggagccccctgtgctgatcacccggcccctggaggaccagctggtgatggtgggccagagggtggagtttgaatgtgaggtgtctgaggagggcgcccaggtgaagtggctgaaggatggagtggagctgacccgggaggagaccttcaagtaccgcttcaagaaggatggccagaggcaccacctgatcatcaatgaggccatgctggaggatgctggccactacgccctgtgcaccagcggcggccaggccctggccgagctgattgtgcaggagaagaagctggaggtgtaccagagcattgctgacctgatggtgggcgccaaggaccaggccgtgttcaagtgtgaggtgtctgatgaaaatgtgcggggcgtgtggctgaagaatggcaaggagctggtgcctgacagccgcatcaaggtgagccacatcggccgggtgcacaagctgaccattgatgatgtgaccccagcagatgaggccgactacagctttgtgcctgagggctttgcctgcaacctgagcgccaagctgcacttcatggaggtgaagattgactttgtgccccggcaggagccccccaagatccacctggactgccccggccgcatcccagacaccatcgtggtggtggccggcaacaagctgcggctggatgtgcccatcagcggggaccctgcccccaccgtcatctggcagaaggccatcacccagggcaacaaggccccagcccggcctgccccagatgccccagaagatactggagacagtgatgagtgggtgtttgacaagaagctgctgtgtgaaacagagggccgggtgcgggtggagaccaccaaggacaggagcatcttcaccgtggagggcgctgagaaggaggatgaaggagtgtacacagtgacagtgaagaaccctgtgggggaggaccaggtgaacctgactgtgaaggtgattgatgtgcctgatgccccagctgcccccaagatcagcaatgtgggggaggacagctgcaccgtgcagtgggagcccccagcctatgatggcggccagcccatcctgggctacatcctggagaggaagaagaagaagagctaccgctggatgaggctgaactttgacctgatccaggagctgagccatgaggcccggaggatgattgaaggagtggtgtatgagatgagggtgtatgctgtgaatgccatcggcatgagccggcccagccctgccagccagcccttcatgcccatcggccccccatctgagcccacccacctggccgtggaggatgtgtctgacaccaccgtgtccctgaagtggaggcctcctgagcgggtgggcgctgggggcctggatggctacagcgtggagtactgcccagagggctgcagcgagtgggtggccgccctgcagggcctgacagagcacaccagcatcctggtgaaggacctgcccaccggggcccggctgctcttccgggtgcgggcccacaacatggccggccctggggcccctgtgaccaccacagagcctgtgacagtgcaggagatcctgcagaggccccggctgcagctgcccaggcacctgcggcagaccatccagaagaaggtgggggagcctgtgaacctgctgatccccttccagggcaagccccggccccaggtgacctggaccaaggagggccagcccctggccggggaggaggtgtccatccggaacagccccacagacaccatcctcttcatccgggccgcccggcgggtgcacagcggcacctaccaggtgacagtgagaattgagaacatggaggacaaggccaccctggtgctgcaggtggtggacaagcccagccccccccaggacctgcgggtgacagatgcctggggcctgaatgtggccctggagtggaagccaccccaggatgtgggcaacacagagctgtggggctacacagtgcagaaggctgacaagaagaccatggagtggttcaccgtgctggagcactacagaaggacccactgtgtggtgcctgagctgatcattggaaatggctactacttccgggtcttcagccagaacatggtgggcttcagtgacagagctgccaccaccaaggagcctgtgttcatccccaggcctggcatcacctatgagccccccaactacaaggccctggacttcagcgaggcccccagcttcacccagcccctggtgaacagatctgtgattgctggctacacagccatgctgtgctgtgctgtgcggggcagccccaagcccaagatctcctggttcaagaatggcctggacctgggagaagatgcccgcttcaggatgttcagcaagcagggcgtgctgaccctggagatcaggaagccctgcccctttgatggcggcatctacgtgtgccgggccaccaacctgcagggcgaggcccgctgtgaatgtcggctggaggtgcgggtgccccagtag

SEQ ID NO: 5719 - DNA, 4214 bp, Artificial Sequence
  derived and/or modified sequence
agtccctctttgggtgacctgtgcctgcttcgtgcctggtgtgacgtctctcaggatgcctgagccggggaagaagccagtctcagcttttagcaagaagccacggtcagtggaagtggccgcaggcagccctgccgtgttcgaggccgagacagagcgggcaggagtgaaggtgcgctggcagcgcggaggcagtgacatcagcgccagcaacaagtacggcctggccacagagggcacacggcatacgctgacagtgcgggaagtgggccctgccgaccagggatcttacgcagtcattgctggctcctccaaggtcaagttcgacctcaaggtcatagaggcagagaaggcagagcccatgctggcccctgcccctgcccctgctgaggccactggagcccctggagaagccccggccccagccgctgagctgggagaaagtgccccaagtcccaaagggtcaagctcagcagctctcaatggtcctacccctggagcccccgatgaccccattggcctcttcgtgatgcggccacaggatggcgaggtgaccgtgggtggcagcatcaccttctcagcccgcgtggccggcgccagcctcctgaagccgcctgtggtcaagtggttcaagggcaaatgggtggacctgagcagcaaggtgggccagcacctgcagctgcacgacagctacgaccgcgccagcaaggtctatctgttcgagctgcacatcaccgatgcccagcctgccttcactggcagctaccgctgtgaggtgtccaccaaggacaaatttgactgctccaacttcaatctcactgtccacgaggccatgggcaccggagacctggacctcctatcagccttccgccgcacgagcctggctggaggtggtcggcggatcagtgatagccatgaggacactgggattctggacttcagctcactgctgaaaaagagcagcagtttccggaccccgagggactcgaagctggaggcaccagcagaggaggacgtgtgggagatcctacggcaggcacccccatctgagtacgagcgcatcgccttccagtacggcgtcactgacctgcgcggcatgctaaagaggctcaagggcatgaggcgcgatgagaagaagagcacagcctttcagaagaagctggagccggcctaccaggtgagcaaaggccacaagatccggctgaccgtggaactggctgaccatgacgctgaggtcaaatggctcaagaatggccaggagatccagatgagcggcaggtacatctttgagtccatcggtgccaagcgtaccctgaccatcagccagtgctcattggcggacgacgcagcctaccagtgcgtggtgggtggcgagaagtgtagcacggagctctttgtgaaagagccccctgtgctcatcacgcgccccttggaggaccagctggtgatggtggggcagcgggtggagtttgagtgtgaagtatcggaggagggggcgcaagtcaaatggctgaaggacggggtggagctgacccgggaggagaccttcaaataccggttcaagaaggacgggcagagacaccacctgatcatcaacgaggccatgctggaggacgcggggcactatgcactgtgcactagcgggggccaggcgctggctgagctcattgtgcaggaaaagaagctggaggtgtaccagagcatcgcagacctgatggtgggcgcaaaggaccaggcggtgttcaaatgtgaggtctcagatgagaatgttcggggtgtgtggctgaagaatgggaaggagctggtgcccgacagccgcataaaggtgtcccacatcgggcgggtccacaaactgaccattgacgacgtcacacctgccgacgaggctgactacagctttgtgcccgagggcttcgcctgcaacctgtcagccaagctccacttcatggaggtcaagattgacttcgtacccaggcaggaacctcccaagatccacctggactgcccaggccgcataccagacaccattgtggttgtagctggaaataagctacgtctggacgtccctatctctggggaccctgctcccactgtgatctggcagaaggctatcacgcaggggaataaggccccagccaggccagccccagatgccccagaggacacaggtgacagcgatgagtgggtgtttgacaagaagctgctgtgtgagaccgagggccgggtccgcgtggagaccaccaaggaccgcagcatcttcacggtcgagggggcagagaaggaagatgagggcgtctacacggtcacagtgaagaaccctgtgggcgaggaccaggtcaacctcacagtcaaggtcatcgacgtgccagacgcacctgcggcccccaagatcagcaacgtgggagaggactcctgcacagtacagtgggagccgcctgcctacgatggcgggcagcccatcctgggctacatcctggagcgcaagaagaagaagagctaccggtggatgcggctgaacttcgacctgattcaggagctgagtcatgaagcgcggcgcatgatcgagggcgtggtgtacgagatgcgcgtctacgcggtcaacgccatcggcatgtccaggcccagccctgcctcccagcccttcatgcctatcggtccccccagcgaacccacccacctggcagtagaggacgtctctgacaccacggtctccctcaagtggcggcccccagagcgcgtgggagcaggaggcctggatggctacagcgtggagtactgcccagagggctgctcagagtgggtggctgccctgcaggggctgacagagcacacatcgatactggtgaaggacctgcccacgggggcccggctgcttttccgagtgcgggcacacaatatggcagggcctggagcccctgttaccaccacggagccggtgacagtgcaggagatcctgcaacggccacggcttcagctgcccaggcacctgcgccagaccattcagaagaaggtcggggagcctgtgaaccttctcatccctttccagggcaagccccggcctcaggtgacctggaccaaagaggggcagcccctggcaggcgaggaggtgagcatccgcaacagccccacagacaccatcctgttcatccgggccgctcgccgcgtgcattcaggcacttaccaggtgacggtgcgcattgagaacatggaggacaaggccacgctggtgctgcaggttgttgacaagccaagtcctccccaggatctccgggtgactgacgcctggggtcttaatgtggctctggagtggaagccaccccaggatgtcggcaacacggagctctgggggtacacagtgcagaaagccgacaagaagaccatggagtggttcaccgtcttggagcattaccgccgcacccactgcgtggtgccagagctcatcattggcaatggctactacttccgcgtcttcagccagaatatggttggctttagtgacagagcggccaccaccaaggagcccgtctttatccccagaccaggcatcacctatgagccacccaactataaggccctggacttctccgaggccccaagcttcacccagcccctggtgaaccgctcggtcatcgcgggctacactgctatgctctgctgtgctgtccggggtagccccaagcccaagatttcctggttcaagaatggcctggacctgggagaagacgcccgcttccgcatgttcagcaagcagggagtgttgactctggagattagaaagccctgcccctttgacgggggcatctatgtctgcagggccaccaacttacagggcgaggcacggtgtgagtgccgcctggaggtgcgagtgcctcagtgaccaggctggctcctggggatggccaggtacaaccggatgccagccccgtgccaggagcctggagggaagttggggaaacccctccctactgttggatgtatgtgtgacaagtgtgtctcctgtgctgcgatgggggatcagcagggcagttgtcgggcagtcctgagtgggtgttgcacagactggtccacagggctcctgaaggaagcccctggatctttggggtaaaaggagggtggcctcaagaaacaatgtctggggacaggcctttctggcctgctatgtcttcccaatgtttattgggcaataaaagataagtgcagtcacagagaactca

SEQ ID NO: 5720 - DNA, 4217 bp, Artificial Sequence
  derived and/or modified sequence
agtccctctttgggtgacctgtgcctgcttcgtgcctggtgtgacgtctctcaggatgcctgagccggggaagaagccagtctcagcttttagcaagaagccacggtcagtggaagtggccgcaggcagccctgccgtgttcgaggccgagacagagcgggcaggagtgaaggtgcgctggcagcgcggaggcagtgacatcagcgccagcaacaagtacggcctggccacagagggcacacggcatacgctgacagtgcgggaagtgggccctgccgaccagggatcttacgcagtcattgctggctcctccaaggtcaagttcgacctcaaggtcatagaggcagagaaggcagagcccatgctggcccctgcccctgcccctgctgaggccactggagcccctggagaagccccggccccagccgctgagctgggagaaagtgccccaagtcccaaagggtcaagctcagcagctctcaatggtcctacccctggagcccccgatgaccccattggcctcttcgtgatgcggccacaggatggcgaggtgaccgtgggtggcagcatcaccttctcagcccgcgtggccggcgccagcctcctgaagccgcctgtggtcaagtggttcaagggcaaatgggtggacctgagcagcaaggtgggccagcacctgcagctgcacgacagctacgaccgcgccagcaaggtctatctgttcgagctgcacatcaccgatgcccagcctgccttcactggcagctaccgctgtgaggtgtccaccaaggacaaatttgactgctccaacttcaatctcactgtccacgaggccatgggcaccggagacctggacctcctatcagccttccgccgcacgagcctggctggaggtggtcggcggatcagtgatagccatgaggacactgggattctggacttcagctcactgctgaaaaagagcagcagtttccggaccccgagggactcgaagctggaggcaccagcagaggaggacgtgtgggagatcctacggcaggcacccccatctgagtacgagcgcatcgccttccagtacggcgtcactgacctgcgcggcatgctaaagaggctcaagggcatgaggcgcgatgagaagaagagcacagcctttcagaagaagctggagccggcctaccaggtgagcaaaggccacaagatccggctgaccgtggaactggctgaccatgacgctgaggtcaaatggctcaagaatggccaggagatccagatgagcggcagcaagtacatctttgagtccatcggtgccaagcgtaccctgaccatcagccagtgctcattggcggacgacgcagcctaccagtgcgtggtgggtggcgagaagtgtagcacggagctctttgtgaaagagccccctgtgctcatcacgcgccccttggaggaccagctggtgatggtggggcagcgggtggagtttgagtgtgaagtatcggaggagggggcgcaagtcaaatggctgaaggacggggtggagctgacccgggaggagaccttcaaataccggttcaagaaggacgggcagagacaccacctgatcatcaacgaggccatgctggaggacgcggggcactatgcactgtgcactagcgggggccaggcgctggctgagctcattgtgcaggaaaagaagctggaggtgtaccagagcatcgcagacctgatggtgggcgcaaaggaccaggcggtgttcaaatgtgaggtctcagatgagaatgttcggggtgtgtggctgaagaatgggaaggagctggtgcccgacagccgcataaaggtgtcccacatcgggcgggtccacaaactgaccattgacgacgtcacacctgccgacgaggctgactacagctttgtgcccgagggcttcgcctgcaacctgtcagccaagctccacttcatggaggtcaagattgacttcgtacccaggcaggaacctcccaagatccacctggactgcccaggccgcataccagacaccattgtggttgtagctggaaataagctacgtctggacgtccctatctctggggaccctgctcccactgtgatctggcagaaggctatcacgcaggggaataaggccccagccaggccagccccagatgccccagaggacacaggtgacagcgatgagtgggtgtttgacaagaagctgctgtgtgagaccgagggccgggtccgcgtggagaccaccaaggaccgcagcatcttcacggtcgagggggcagagaaggaagatgagggcgtctacacggtcacagtgaagaaccctgtgggcgaggaccaggtcaacctcacagtcaaggtcatcgacgtgccagacgcacctgcggcccccaagatcagcaacgtgggagaggactcctgcacagtacagtgggagccgcctgcctacgatggcgggcagcccatcctgggctacatcctggagcgcaagaagaagaagagctaccggtggatgcggctgaacttcgacctgattcaggagctgagtcatgaagcgcggcgcatgatcgagggcgtggtgtacgagatgcgcgtctacgcggtcaacgccatcggcatgtccaggcccagccctgcctcccagcccttcatgcctatcggtccccccagcgaacccacccacctggcagtagaggacgtctctgacaccacggtctccctcaagtggcggcccccagagcgcgtgggagcaggaggcctggatggctacagcgtggagtactgcccagagggctgctcagagtgggtggctgccctgcaggggctgacagagcacacatcgatactggtgaaggacctgcccacgggggcccggctgcttttccgagtgcgggcacacaatatggcagggcctggagcccctgttaccaccacggagccggtgacagtgcaggagatcctgcaacggccacggcttcagctgcccaggcacctgcgccagaccattcagaagaaggtcggggagcctgtgaaccttctcatccctttccagggcaagccccggcctcaggtgacctggaccaaagaggggcagcccctggcaggcgaggaggtgagcatccgcaacagccccacagacaccatcctgttcatccgggccgctcgccgcgtgcattcaggcacttaccaggtgacggtgcgcattgagaacatggaggacaaggccacgctggtgctgcaggttgttgacaagccaagtcctccccaggatctccgggtgactgacgcctggggtcttaatgtggctctggagtggaagccaccccaggatgtcggcaacacggagctctgggggtacacagtgcagaaagccgacaagaagaccatggagtggttcaccgtcttggagcattaccgccgcacccactgcgtggtgccagagctcatcattggcaatggctactacttccgcgtcttcagccagaatatggttggctttagtgacagagcggccaccaccaaggagcccgtctttatccccagaccaggcatcacctatgagccacccaactataaggccctggacttctccgaggccccaagcttcacccagcccctggtgaaccgctcggtcatcgcgggctacactgctatgctctgctgtgctgtccggggtagccccaagcccaagatttcctggttcaagaatggcctggacctgggagaagacgcccgcttccgcatgttcagcaagcagggagtgttgactctggagattagaaagccctgcccctttgacgggggcatctatgtctgcagggccaccaacttacagggcgaggcacggtgtgagtgccgcctggaggtgcgagtgcctcagtgaccaggctggctcctggggatggccaggtacaaccggatgccagccccgtgccaggagcctggagggaagttggggaaacccctccctactgttggatgtatgtgtgacaagtgtgtctcctgtgctgcgatgggggatcagcagggcagttgtcgggcagtcctgagtgggtgttgcacagactggtccacagggctcctgaaggaagcccctggatctttggggtaaaaggagggtggcctcaagaaacaatgtctggggacaggcctttctggcctgctatgtcttcccaatgtttattgggcaataaaagataagtgcagtcacagagaactca

SEQ ID NO: 5721 - DNA, 4217 bp, Artificial Sequence
  derived and/or modified sequence
agtccctctttgggtgacctgtgcctgcttcgtgcctggtgtgacgtctctcaggatgcctgagccggggaagaagccagtctcagcttttagcaagaagccacggtcagtggaagtggccgcaggcagccctgccgtgttcgaggccgagacagagcgggcaggagtgaaggtgcgctggcagcgcggaggcagtgacatcagcgccagcaacaagtacggcctggccacagagggcacacggcatacgctgacagtgcgggaagtgggccctgccgaccagggatcttacgcagtcattgctggctcctccaaggtcaagttcgacctcaaggtcatagaggcagagaaggcagagcccatgctggcccctgcccctgcccctgctgaggccactggagcccctggagaagccccggccccagccgctgagctgggagaaagtgccccaagtcccaaagggtcaagctcagcagctctcaatggtcctacccctggagcccccgatgaccccattggcctcttcgtgatgcggccacaggatggcgaggtgaccgtgggtggcagcatcaccttctcagcccgcgtggccggcgccagcctcctgaagccgcctgtggtcaagtggttcaagggcaaatgggtggacctgagcagcaaggtgggccagcacctgcagctgcacgacagctacgaccgcgccagcaaggtctatctgttcgagctgcacatcaccgatgcccagcctgccttcactggcagctaccgctgtgaggtgtccaccaaggacaaatttgactgctccaacttcaatctcactgtccacgaggccatgggcaccggagacctggacctcctatcagccttccgccgcacgagcctggctggaggtggtcggcggatcagtgatagccatgaggacactgggattctggacttcagctcactgctgaaaaagagagacagtttccggaccccgagggactcgaagctggaggcaccagcagaggaggacgtgtgggagatcctacggcaggcacccccatctgagtacgagcgcatcgccttccagtacggcgtcactgacctgcgcggcatgctaaagaggctcaagggcatgaggcgcgatgagaagaagagcacagcctttcagaagaagctggagccggcctaccaggtgagcaaaggccacaagatccggctgaccgtggaactggctgaccatgacgctgaggtcaaatggctcaagaatggccaggagatccagatgagcggcagcaagtacatctttgagtccatcggtgccaagcgtaccctgaccatcagccagtgctcattggcggacgacgcagcctaccagtgcgtggtgggtggcgagaagtgtagcacggagctctttgtgaaagagccccctgtgctcatcacgcgccccttggaggaccagctggtgatggtggggcagcgggtggagtttgagtgtgaagtatcggaggagggggcgcaagtcaaatggctgaaggacggggtggagctgacccgggaggagaccttcaaataccggttcaagaaggacgggcagagacaccacctgatcatcaacgaggccatgctggaggacgcggggcactatgcactgtgcactagcgggggccaggcgctggctgagctcattgtgcaggaaaagaagctggaggtgtaccagagcatcgcagacctgatggtgggcgcaaaggaccaggcggtgttcaaatgtgaggtctcagatgagaatgttcggggtgtgtggctgaagaatgggaaggagctggtgcccgacagccgcataaaggtgtcccacatcgggcgggtccacaaactgaccattgacgacgtcacacctgccgacgaggctgactacagctttgtgcccgagggcttcgcctgcaacctgtcagccaagctccacttcatggaggtcaagattgacttcgtacccaggcaggaacctcccaagatccacctggactgcccaggccgcataccagacaccattgtggttgtagctggaaataagctacgtctggacgtccctatctctggggaccctgctcccactgtgatctggcagaaggctatcacgcaggggaataaggccccagccaggccagccccagatgccccagaggacacaggtgacagcgatgagtgggtgtttgacaagaagctgctgtgtgagaccgagggccgggtccgcgtggagaccaccaaggaccgcagcatcttcacggtcgagggggcagagaaggaagatgagggcgtctacacggtcacagtgaagaaccctgtgggcgaggaccaggtcaacctcacagtcaaggtcatcgacgtgccagacgcacctgcggcccccaagatcagcaacgtgggagaggactcctgcacagtacagtgggagccgcctgcctacgatggcgggcagcccatcctgggctacatcctggagcgcaagaagaagaagagctaccggtggatgcggctgaacttcgacctgattcaggagctgagtcatgaagcgcggcgcatgatcgagggcgtggtgtacgagatgcgcgtctacgcggtcaacgccatcggcatgtccaggcccagccctgcctcccagcccttcatgcctatcggtccccccagcgaacccacccacctggcagtagaggacgtctctgacaccacggtctccctcaagtggcggcccccagagcgcgtgggagcaggaggcctggatggctacagcgtggagtactgcccagagggctgctcagagtgggtggctgccctgcaggggctgacagagcacacatcgatactggtgaaggacctgcccacgggggcccggctgcttttccgagtgcgggcacacaatatggcagggcctggagcccctgttaccaccacggagccggtgacagtgcaggagatcctgcaacggccacggcttcagctgcccaggcacctgcgccagaccattcagaagaaggtcggggagcctgtgaaccttctcatccctttccagggcaagccccggcctcaggtgacctggaccaaagaggggcagcccctggcaggcgaggaggtgagcatccgcaacagccccacagacaccatcctgttcatccgggccgctcgccgcgtgcattcaggcacttaccaggtgacggtgcgcattgagaacatggaggacaaggccacgctggtgctgcaggttgttgacaagccaagtcctccccaggatctccgggtgactgacgcctggggtcttaatgtggctctggagtggaagccaccccaggatgtcggcaacacggagctctgggggtacacagtgcagaaagccgacaagaagaccatggagtggttcaccgtcttggagcattaccgccgcacccactgcgtggtgccagagctcatcattggcaatggctactacttccgcgtcttcagccagaatatggttggctttagtgacagagcggccaccaccaaggagcccgtctttatccccagaccaggcatcacctatgagccacccaactataaggccctggacttctccgaggccccaagcttcacccagcccctggtgaaccgctcggtcatcgcgggctacactgctatgctctgctgtgctgtccggggtagccccaagcccaagatttcctggttcaagaatggcctggacctgggagaagacgcccgcttccgcatgttcagcaagcagggagtgttgactctggagattagaaagccctgcccctttgacgggggcatctatgtctgcagggccaccaacttacagggcgaggcacggtgtgagtgccgcctggaggtgcgagtgcctcagtgaccaggctggctcctggggatggccaggtacaaccggatgccagccccgtgccaggagcctggagggaagttggggaaacccctccctactgttggatgtatgtgtgacaagtgtgtctcctgtgctgcgatgggggatcagcagggcagttgtcgggcagtcctgagtgggtgttgcacagactggtccacagggctcctgaaggaagcccctggatctttggggtaaaaggagggtggcctcaagaaacaatgtctggggacaggcctttctggcctgctatgtcttcccaatgtttattgggcaataaaagataagtgcagtcacagagaactca

SEQ ID NO: 5722 - DNA, 3822 bp, Artificial Sequence
  derived and/or modified sequence
atgcccgagcccggcaagaagcccgtgagcgccttcagcaagaagccaagatcagtggaggtagcagcaggaagccccgccgttttcgaggcggaaacggaaagggccggggttaaagtgcgctggcagcggggaggttctgacatttcagcctccaacaagtatgggttggccaccgagggaactcggcacacgctgacggtgagggaggtcggccctgcagaccaagggtcatatgcggtgattgccgggtctagtaaggtcaaatttgacctcaaggttattgaggccgaaaaggcagaacccatgttggccccagcccccgcacccgctgaagccacgggggctcctggtgaggcacctgcacctgctgccgaacttggcgaatctgctccatctcctaagggctcttcctccgcagccttgaatggacccactcctggtgcccccgacgacccaatcggcctctttgtaatgaggccgcaggatggggaggtcaccgtgggcgggagtatcacattttctgccagggtggctggtgcctcgctacttaagcctcccgttgtgaagtggttcaaggggaagtgggtggacctgtcttccaaggttggccagcacttgcaacttcacgacagctacgatcgggcatcaaaagtgtatcttttcgagttgcacatcacagatgcacaacctgcctttaccggatcttacaggtgtgaagtgagtacaaaagacaagttcgactgctccaactttaacttaactgtgcacgaggctatgggaacgggtgacctcgacttgctctccgcgttcaggcggactagtctggcaggggggggtaggcggatttccgactcccatgaagacaccgggatactcgacttcagtagcttgctgaagaagagttcttcattccggacccctcgcgattccaagcttgaggcgccagctgaagaagacgtctgggaaatcctgaggcaggccccaccatcggagtacgaaaggatagccttccagtatggagtgactgatctccgggggatgctcaagaggttaaagggaatgaggcgggatgagaaaaagagcaccgccttccaaaaaaaactcgagccagcttatcaggtgtctaaaggacacaagattagattgactgttgagctggccgaccacgacgccgaagtgaaatggttgaaaaatgggcaggaaatccagatgagcggaagatacatctttgaaagtattggtgctaagaggacactgaccatcagtcaatgcagtttggctgatgacgccgcatatcagtgtgtcgttggcggagagaagtgttctaccgagctgttcgttaaggagcctcccgttctaattacacgccctctggaagatcaactcgtgatggtggggcaaagagtggaatttgagtgtgaggtgagcgaggagggtgcgcaggtcaaatggctgaaggatggcgttgaactcacccgagaggagacattcaagtatcgttttaagaaggacggacaacggcaccacctcatcatcaatgaggcaatgctggaagacgccgggcactacgccctgtgtacgagtggcggacaggcattggctgagctgattgtgcaggagaagaaactggaggtgtatcagagcattgctgacctaatggtgggagcgaaagaccaggcagttttcaagtgtgaggtttctgatgaaaacgtacgcggcgtctggttaaagaatggaaaggaactggtgcccgatagccggattaaggtttctcacattggcagggttcataagttaacaatcgatgacgtgactccagcggatgaggctgactacagcttcgttcccgaaggctttgcttgcaatctgtcggccaagcttcacttcatggaagtgaaaatcgactttgttcctcgacaggaaccacctaaaatccaccttgattgccccggtcgaattcctgacactatcgtagtggtggctggcaacaaactgcggcttgacgtgccaattagtggggatcctgcacccaccgttatttggcagaaagccataactcagggcaacaaggctcctgccaggcctgcccccgacgcccctgaagacactggagattctgatgaatgggtatttgacaaaaagttgttgtgtgagaccgagggtagggttcgggttgagactactaaggatcgcagcatttttaccgtggaaggggcagaaaaagaagatgagggcgtctacactgtgactgttaaaaacccagtgggagaggaccaggtcaaccttacagtgaaagtgattgacgtgcctgatgcgccagcggctccgaagatctccaacgttggcgaggatagctgtacagtccaatgggagcctcctgcgtatgacggaggccaacctatactggggtatattctcgagcggaagaagaaaaaaagttatcgctggatgcgactcaacttcgatttgattcaggagcttagtcatgaggcaaggcgaatgatcgagggcgtagtgtacgagatgagggtttatgcagtgaatgctatcggcatgagccgcccatctcccgcttcccaaccctttatgcccatcggacccccatcggagcctactcatcttgctgtggaggacgtgtccgacaccactgtttctctgaagtggcgcccacctgaaagggtgggcgctggcggattagacggttactcagtggaatattgccccgaggggtgtagcgaatgggtggcggccctacagggcctcaccgagcacacctcaatactggtgaaggatctgccaaccggcgccaggctcttgtttcgcgtccgggcccataacatggctgggccaggcgcccctgtcacgaccactgagcctgttaccgtgcaggaaattctccaaagacctaggttgcaactaccccggcacctccggcagacaatccaaaaaaaggtcggagaaccggtcaatctgctgataccgtttcaaggtaagccacggccgcaagtgacatggacaaaggagggccagccactcgccggtgaagaagtctccatcagaaactcaccaaccgacaccatccttttcataagagctgctcggcgagtccattccggaacatatcaggttactgtgagaattgagaatatggaggacaaggctactctcgttctgcaagtcgttgacaaaccgagtcctccccaggatttgagagtgaccgatgcctggggactgaatgtcgctctggagtggaaacccccccaggatgtcggcaacacggaactgtggggttacaccgtccaaaaggccgacaagaagaccatggagtggtttaccgttctcgagcactatcgccggacccactgcgtggtgcccgaactcatcatcggcaatgggtattattttcgcgtattttcccagaacatggtgggattctccgacagagccgcgaccaccaaggaacctgtgtttatccctaggccgggaattacctatgagcctccgaactataaggctctggacttctcggaggccccgagctttacccagccccttgttaaccggagtgtaatcgccggctacaccgccatgctgtgttgtgcggtgcgggggtcccctaaacccaagatcagctggttcaaaaatggcttagatctaggggaggacgctaggtttcgcatgttttcaaagcagggagtgttgactctggagatcagaaaaccctgtccatttgacggtggaatctatgtgtgtagagctacaaaccttcagggggaagccagatgtgaatgcagattagaggtacgcgtgccacagtag

SEQ ID NO: 5723 - DNA, 3825 bp, Artificial Sequence
  derived and/or modified sequence
atgcccgagcccggcaagaagcccgtgagcgccttcagcaagaagcccaggagtgtggaagtagcggcggggagtcctgccgtctttgaagccgagactgagcgggcgggggtgaaggttcggtggcaacgcgggggttctgatatatcggcatcaaataaatacgggctcgcaaccgagggcacacggcacactctgaccgtgcgcgaggtgggccctgcagaccaaggctcctacgcagtaattgcaggatcatccaaggtgaaatttgatctgaaagtgattgaagcagagaaagccgagcccatgctggcacctgcgcctgcaccggccgaggctacaggggcgcccggagaggcccctgcgcctgcggccgaactgggagagtccgctccatcgcctaagggaagctcctccgctgctctcaacggccctacccctggtgcacctgatgaccccatcggactgttcgtcatgcgccctcaggacggcgaggttactgttggtggttcgatcacattcagtgcacgagttgctggggccagcctattgaagcctcctgtggtgaaatggtttaagggtaagtgggtagacctcagcagtaaagtcggtcagcaccttcagctgcacgacagctacgatcgagcgtccaaggtgtacctttttgagctgcacatcacggacgcacagcctgcctttacaggtagctatcgttgcgaagtttcgactaaggacaagtttgactgctccaactttaacctcacagtccatgaagcaatggggaccggggaccttgatctgctttctgcttttaggcgtacgtccctggcaggtggtggcaggaggatctccgactcgcatgaggatactggaatcttggacttttcctctctcctcaaaaagagctcttctttccggactcccagggacagcaagctggaagcacctgccgaagaggacgtctgggagatccttcgtcaggcccctccctcggaatatgagcggatcgcattccaatatggtgtcacagatctccgcgggatgctcaagaggctgaaggggatgcggcgagacgaaaaaaagtcaaccgctttccagaagaaattagagcctgcttaccaggtgtccaaagggcacaaaattagacttactgtcgagctggctgatcacgatgccgaagttaagtggctcaagaacggacaagaaattcagatgtctggaagcaaatacattttcgaatctattggagcgaagaggaccttaaccataagccagtgctctctggcagacgacgccgcataccaatgtgtggtgggcggagaaaagtgctccacggaactgttcgttaaagagccgcccgtactgatcactaggccgctcgaggaccagttagtgatggtagggcagcgagtggagttcgagtgtgaggtgtccgaggagggggctcaagtgaagtggctgaaggacggggttgaactgactcgcgaagagacctttaagtatcgctttaagaaagatggtcagcgccaccatctaattatcaatgaagctatgctggaagacgctggccactacgcactgtgcacatcaggcgggcaggctctggctgaactgatagtgcaggaaaagaagcttgaggtataccaatccatcgccgaccttatggttggggccaaggatcaggccgtgtttaagtgcgaggtgtccgacgagaatgtccgcggagtgtggttgaagaacggtaaagagctggtccctgactcgcgaatcaaagtctctcacattggtcgcgtacataagcttacaatcgatgacgtgacccccgccgacgaggccgattactctttcgtccctgagggtttcgcctgtaacctatcagcaaagctgcacttcatggaagtgaagatagattttgtgccaagacaggaaccccccaagatccacctggactgcccaggccgcatccctgacacaatagtcgtggtggcgggaaacaaacttcgcttagacgtccccatctcaggagatcccgcccccaccgttatctggcagaaagcaataacccaaggaaacaaagccccagcacggcctgcccctgatgcccctgaagacactggggactctgacgaatgggtcttcgacaaaaaactgctgtgcgaaactgagggccgggtgcgcgtggaaaccactaaggatagatctatcttcacagttgagggggccgaaaaagaagatgagggcgtgtatactgttaccgtgaaaaatccagtgggggaggatcaggttaatttgaccgtcaaggtgatcgacgtgcctgatgcacccgctgcacctaaaatctcaaatgtcggcgaggacagctgtaccgtccagtgggaacctccagcttatgacggcggccagccaatcctcgggtatattttggaaaggaagaaaaagaagagctatcggtggatgcgcctgaatttcgatctcatacaggaactaagccacgaggctagaagaatgattgagggcgtcgtgtacgaaatgcgcgtatatgcagtcaatgccatcggaatgtctcgaccaagtcctgcctcccagcccttcatgcctattggtccacctagtgaaccaacgcacctggcagtggaagacgtgtctgatacaacagtgagccttaaatggcgaccccctgagcgcgttggagccggcggcctcgacggctactcagtcgaatactgccccgaaggatgctccgaatgggtcgccgccctgcaaggactgacagagcacacgtctatattagtgaaggaccttccgacaggagcacgcctgctctttcgtgttcgagcccataacatggctggccctggtgccccagtcaccaccaccgagcccgtgacagtgcaggagatcttacaacgcccgcgtttgcaactcccaaggcacctcaggcagaccatacagaagaaagttggggagccagtaaatctgcttattccatttcaggggaagccgcgaccccaggtcacctggactaaggaaggacagcctctcgctggcgaggaggtgtctataagaaatagccctacagatacaattctctttattagggccgccaggagagtgcactctggtacctaccaggttaccgtgagaattgagaatatggaagataaggccacactcgtcctccaggttgtggacaagccctcgccacctcaagatcttcgcgtcacggacgcatggggcctcaatgttgcccttgaatggaaacctcctcaggatgtgggcaataccgagctctggggctacacagttcaaaaggccgataaaaagacgatggaatggtttactgttctggagcactatcgtagaacccactgtgttgtcccagaactgatcatcgggaatggatactatttccgggtgtttagtcaaaacatggtaggcttttcagatagagctgcgactactaaagagccagtgttcattccgcgccctggaattacctatgagccccctaattacaaggccctggacttcagtgaagccccctcttttacacagccgctggtgaacagaagtgttattgccggatataccgccatgttgtgctgcgctgtccgaggttctcccaaacctaaaatctcttggttcaaaaacggcctggacctgggggaggacgccaggttccgaatgttttccaagcaaggtgttcttacattggagatccgtaaaccctgcccttttgatggcgggatatacgtgtgccgggccacgaatctgcaaggagaagcccgatgcgaatgcaggcttgaggtgcgggttcctcaatag

SEQ ID NO: 5724 - DNA, 3825 bp, Artificial Sequence
  derived and/or modified sequence
atgcccgagcccggcaagaagcccgtgagcgccttcagcaagaagccgaggagcgtggaggtcgccgctggcagtcccgcagtatttgaggccgaaactgagagagctggtgtgaaagttcgatggcagcgcggcggtagcgatatctccgcctcaaacaagtacggacttgctaccgaggggaccaggcacactctgacagtcagagaagtgggccccgcagatcagggcagttacgctgttatcgccggtagttccaaagtgaagttcgatctcaaagttatagaggcagagaaggccgaaccgatgttagctcccgcacccgcccccgctgaggcgactggtgcacctggagaggctcctgccccggcggctgagctgggcgagagcgcaccctccccaaaaggtagcagttcagctgctctgaatggcccgacacccggtgcaccagacgatcccatcggattattcgtaatgagaccccaggacggggaggtgacagttggcgggtctatcacattctcagccagagtggccggcgcatccctgcttaaaccgccagtggtgaagtggtttaaggggaaatgggtggacctatcctccaaagtggggcagcacctccagctgcatgacagttatgacagggcatcaaaagtctatctctttgagttgcatattaccgatgcacaacccgcctttaccggctcctacaggtgcgaggtctcaaccaaggacaagtttgattgttccaacttcaacctcaccgtgcacgaggccatggggactggtgacctggatctattaagcgcattccggcgtacaagtctggcaggcggcggaaggcgtattagtgattcccatgaagacacagggattctggatttttcatcccttctgaagaagcgtgattcatttcggacacccagagacagtaagctcgaagcccctgcagaggaggatgtctgggagattcttcgacaggccccgccctcagagtacgaaaggatagcgttccaatatggcgtaaccgacctaagggggatgctgaagaggcttaagggcatgcggcgcgacgagaagaagagtacagcttttcaaaagaagctcgagcccgcctaccaagtttctaagggccataaaataagactaaccgttgagttggctgaccacgacgcggaagtcaagtggctcaaaaacggtcaggagattcagatgagcggcagtaagtacatcttcgaatcaatcggcgccaagagaactcttactatctcacagtgtagcttggctgacgacgctgcataccagtgcgtggtcggtggcgagaagtgctctacagagctgtttgtgaaagagccgcccgtgttgatcacacggcccctcgaagaccaactggttatggtgggacaacgtgttgaatttgagtgcgaggtcagcgaagagggcgctcaggtgaaatggctcaaggatggagtcgagctgactcgcgaggaaaccttcaaatatagatttaagaaggacggtcagcgccatcatttgatcataaacgaggctatgctggaagacgccggtcattatgccttgtgcacctcgggcgggcaggccctggctgaactgattgtccaagagaaaaaactggaggtttatcagtcgatcgccgacctcatggtgggggctaaggaccaggccgtgttcaagtgtgaagtgagcgacgagaatgtgcggggcgtgtggctgaagaatggcaaggagctggttcccgactcacgaatcaaggtctctcacattggccgggttcataaacttactatagatgatgtcacacccgccgacgaagcagactactcatttgtgcccgaaggtttcgcctgtaatctatccgcaaagcttcacttcatggaagtcaagatcgactttgtgccaagacaagagccacccaagattcacttagattgtcctggcaggatacccgataccatcgtggtggtggctggcaataagctgaggttggacgtgccaatttcaggcgaccctgcccccactgtgatatggcagaaggcaataacacaaggtaacaaggcgcctgcgcgcccagctcctgatgcacccgaggataccggggactcagatgagtgggtgttcgataaaaagttactctgcgagactgaagggagagtgcgggtcgagactactaaagaccgttctatttttactgtggagggggccgagaaggaggatgagggggtgtacaccgtcacagttaaaaaccccgtaggcgaggatcaggttaatctgactgttaaggtgatagacgtcccagatgcacctgctgcacccaaaatctcaaatgtgggggaggattcgtgtacggtgcagtgggaacctccggcctatgacggcgggcagccaattctcggctatattttggaaagaaagaaaaaaaaatcctaccgatggatgcggctgaactttgatttgattcaagaacttagtcacgaggcccgccggatgattgagggcgtggtctatgagatgagagtctacgcagtaaatgccattggtatgtccagaccctctccggcctcgcagcccttcatgccaatcggcccaccctccgaaccaactcatctcgccgttgaggacgtgtcagatacaaccgttagcctgaagtggcgcccacctgagcgagtcggagcaggaggcttagacggttattcggtggagtattgccccgaaggatgtagcgaatgggttgcggcactgcaggggctcacggagcacactagcattctcgtgaaggacctccctacaggcgcacggctgctgtttcgcgtccgagctcataatatggcaggcccgggcgcacccgtgacaactacagagccagtgaccgttcaagaaatcctgcagagacctcggctacaactgccacgtcacctccggcaaactatccagaagaaggtcggcgaaccagtgaaccttctgattccgtttcagggtaagccccggccccaggtcacttggacgaaggaagggcaacctcttgccggggaagaggtctcaatacggaattccccgacagataccatcctgtttattagggccgcccgaagagttcacagcggtacctatcaggtaactgtaaggatagagaatatggaggacaaggccacattggtacttcaggtcgtggataaaccctcccctccccaagacttgcgcgtgactgacgcctggggattaaatgtggctctcgagtggaagccgccccaggacgtgggaaatactgaactgtggggctataccgtccagaaggcagataaaaaaaccatggaatggtttaccgtgttagaacactatcgtcggactcattgcgttgttcccgaactgatcattggaaacgggtactacttccgcgtcttcagccagaatatggtcggattcagcgatagagctgctacaaccaaggagccagtgtttattccccgtccagggattacctacgagcccccgaattacaaagcccttgatttctccgaggctcccagtttcacccaaccactagtgaatagaagcgttatcgcaggttacacagccatgctgtgctgtgctgtccgcggctctcccaagccaaagatctcttggttcaagaacgggctcgatctaggagaggatgcccggtttcgaatgttcagcaagcagggagttcttaccctggagattcggaaaccctgtccctttgatggaggcatttacgtttgtagagctacaaacctccaaggagaagcgcgctgcgagtgtagactcgaagtccgggtcccgcagtag

SEQ ID NO: 5725 - DNA, 3822 bp, Artificial Sequence
  derived and/or modified sequence
atgccagaacccggtaagaagcccgtttctgccttttcaaaaaagcctagatcagtggaggtagccgcagggtccccggcagtgtttgaggccgagactgagcgcgcaggcgtgaaagtgcgttggcaacgcggtgggagcgacatcagcgcgtccaataaatacggtctggccactgaagggacgaggcacactctgactgttcgggaggtgggccctgccgaccaaggaagttacgctgtaattgcaggaagttctaaggtgaagttcgacctgaaggtgatcgaggcagagaaggccgagcctatgctggccccagctccagccccagcggaagctacaggcgcaccgggtgaggctcctgctccagcagccgaattaggtgaaagtgccccatcacccaaaggctccagttctgccgctctcaacggacccacacctggtgcacctgatgaccccattggtttatttgtcatgcgccctcaggatggggaagtgacagtgggaggaagtattacattcagcgcacgcgtggctggtgctagtctccttaaacccccagtcgttaaatggttcaaaggtaagtgggtggatttgtcaagtaaggttggccagcacctacagttacatgatagctatgaccgcgctagcaaagtttatttgtttgaattgcacatcacggatgctcagccagccttcacaggcagctaccgttgcgaggtaagcaccaaggacaaattcgactgttcaaattttaacctgactgttcacgaagctatgggtaccggggatctggatctccttagcgcattcagaaggacatcactggctggcggaggcaggcgcatctccgactctcacgaggacactggcattctggacttttcgagcctgctgaagaaatcttcatcgtttcggacccccagggatagtaagctggaggccccagctgaagaagacgtttgggagatcctgaggcaagccccaccttcagaatatgagcgcatcgcattccagtacggtgtcactgacttgaggggaatgctcaagcgtctcaaaggtatgcgcagggatgaaaaaaagtccacagcctttcagaagaagctcgagcccgcttatcaagtttccaaaggccacaaaattaggctgactgtagaattagctgaccacgacgctgaggtgaagtggctgaaaaacggacaggagattcaaatgtcaggaagatacatatttgagtctataggcgctaagcgaacattgaccatatcacagtgctcgttagctgatgacgcggcttatcaatgcgtcgtcggaggggaaaagtgcagcactgaactgttcgtgaaagagccaccagtgttaattacacggcctctagaggatcagctcgtgatggtggggcagcgagtggagtttgaatgcgaggttagcgaggagggtgcccaggtgaagtggctgaaagatggggttgaactcacacgcgaagagacctttaaatataggtttaagaaggacggccagaggcaccatcttatcataaacgaagccatgctcgaagacgcaggacattacgcgctgtgcaccagcggtggacaagctctcgccgagctaatcgtgcaagagaaaaaactggaagtgtatcagtctattgccgatctaatggtaggcgcaaaagaccaggcagtgtttaagtgtgaagtgtccgatgaaaacgtaaggggcgtgtggctcaaaaacgggaaggagctagtgcccgattccaggattaaggtcagccatatagggcgtgtacataaactgacaatcgacgacgttacacccgctgacgaggctgactacagttttgtccccgaaggatttgcctgcaatttgtctgcaaaacttcacttcatggaggtgaaaatagactttgtccctcgccaggagcctcccaagatacatctcgattgccccggtcgaattcctgataccatagtcgtggtggctggtaacaaactccgtctggacgtaccgataagtggtgatcctgcacctaccgttatttggcagaaggccatcacacaggggaacaaggctccggctagacctgctcccgatgctcccgaagacacgggtgacagcgatgagtgggtctttgacaaaaagctcctatgcgagactgagggcagagtgagagtggaaacaactaaagaccgcagtatctttactgtggaaggggctgaaaaagaggacgaaggcgtgtacaccgtgaccgtgaaaaatcccgtgggcgaggaccaggtcaatctgaccgtgaaagtaatcgacgtgcccgacgccccagccgctcccaagatcagcaacgtgggcgaggactcctgtacagttcagtgggagcctcccgcatatgatgggggtcagccaatcctaggttacattcttgaacgcaaaaagaagaagagctaccgatggatgcgcctgaatttcgacctgattcaggagctgtcccacgaggcccgacggatgatagaaggagtggtctatgagatgcgcgtgtacgcggtgaacgcaatcgggatgagccgccctagcccagcatcgcagccctttatgccaataggaccaccatccgaaccaacacatcttgctgtagaggacgtgtcggatacgaccgtctcactgaaatggcgtcctcctgagagggtcggtgcgggaggtctggatgggtacagcgtcgaatattgtccagagggctgctctgaatgggtggctgctctgcaaggtctgaccgaacatacgtccattctggtgaaagatctgcctacgggggcacgcctactcttccgcgttcgcgctcataacatggccggaccaggggctcctgtgacaactacagagccagtgactgtgcaagagatactccagcgacctcgactgcagctgccccgtcacttacgccagaccatccagaaaaaggtgggcgagcccgtgaatctcctgattccttttcaaggcaaacctagaccccaggttacttggactaaggaaggtcaacctctcgctggcgaggaggttagcataaggaattctccaacagacactatccttttcatcagagccgctcgacgcgtgcactccgggacctatcaggtcacagtgagaattgaaaacatggaagataaagctacactcgtgctgcaggtagtggacaagccatctccccctcaggatctcagagttacggacgcgtggggattaaacgtcgctttagaatggaaaccaccgcaggacgtggggaataccgagctgtgggggtatacagtacagaaggctgataaaaaaacaatggaatggttcacagttcttgaacattacaggagaacgcattgtgtggtgcctgagctgatcatcggcaacggatactatttccgggtgtttagccaaaacatggtgggattttcagatagggccgctactaccaaggaaccagtgtttatcccgcgacctgggatcacctacgaaccacccaactacaaggctctcgacttcagcgaagctcctagcttcacccaacccctggtcaatagaagcgtaatcgcgggatataccgccatgctatgctgtgcagtgagaggatcgcccaaacccaaaattagttggtttaaaaatggtctagacctgggtgaggatgcaaggtttcgaatgttcagcaagcagggagtgctgaccctcgagattagaaagccctgtccttttgatggcggaatttacgtttgtagagccacaaacctgcagggcgaggctcgctgcgagtgtcgtctcgaggttagagttcctcagtag

SEQ ID NO: 5726 - DNA, 3825 bp, Artificial Sequence
  derived and/or modified sequence
atgcccgagccaggtaaaaagccggtgagcgcttttagtaagaagcccagatctgtggaggtggctgccggttccccagcagtttttgaagccgagacagaaagagccggagtgaaagttcgctggcaaagaggagggtccgacattagtgcctctaacaaatacggcctcgctacagaagggacaaggcataccctcaccgttagagaggtgggccctgccgaccaagggtcctatgcagtaatagccggttctagtaaggtgaaattcgatttgaaagtgattgaggctgaaaaggccgaacccatgttggctcccgcacccgctcccgctgaagccaccggtgctcctggcgaagctccagcaccagccgctgagctcggtgaaagcgccccttcacctaaaggaagttcctcagctgcccttaacggacctaccccaggtgcacctgacgacccaattggcctttttgtcatgcggcctcaggatggcgaagtaactgttggcggtagcataaccttttctgccagagtagcaggcgcaagtcttctgaaaccccctgtcgtgaagtggttcaaaggaaaatgggtagatctctcatcgaaggtaggacaacacttgcagcttcatgacagctacgacagagctagtaaggtttacctattcgagttgcacatcacagatgcacagcccgctttcacaggtagctaccgctgtgaggttagtacgaaagacaagttcgattgcagtaatttcaatctgacggttcatgaggctatgggtaccggcgatctggaccttttgtcggccttccgaaggacaagtttggcaggcggaggcagaagaatctccgacagtcacgaagacaccggaattttagacttttctagcctactgaaaaagagctcatctttccgcaccccccgtgactcaaagctagaggcacctgctgaagaggacgtgtgggagattctccgccaggcccctccttccgagtatgagcgcatcgccttccagtacggggtgaccgatctgaggggaatgttgaagcgactcaagggtatgcgccgagacgaaaagaagtccaccgccttccagaaaaagctggaacctgcataccaggtttcaaaagggcacaagatcagattgacagttgaattagccgaccatgatgctgaggtgaagtggcttaagaacggtcaggaaatccaaatgtcaggatccaagtatatcttcgaaagtatcggtgcaaagcgtacactaaccatcagtcagtgttccctggccgatgatgcagcctaccagtgcgtagtcggtggggaaaaatgtagcactgaactcttcgtaaaagagccacccgtgctgatcacaagacctctggaagatcagctcgtcatggtgggacagagggtagagtttgagtgcgaggtgagcgaagagggcgcacaggtcaagtggctaaaagatggtgttgagctcacaagggaagaaactttcaagtaccggttcaaaaaagacggacagcgccaccatcttattatcaacgaggctatgctcgaagacgccggacactacgctctttgtacttctgggggacaggccctagcagagttgatcgttcaggagaagaaactagaggtttaccagagtatagctgacctcatggtaggcgcaaaggatcaagccgtgttcaagtgcgaggtgtccgatgagaatgtacgcggagtgtggctgaagaatgggaaggaactggtacctgatagccggattaaagtctcacacattggccgtgtacataaactgaccatcgacgacgtgactccggctgacgaggcggactactcatttgtgcctgagggattcgcttgcaatctgagtgcaaagctacattttatggaggtgaagattgacttcgttcctcggcaggagccaccaaagattcatttggattgtcctggacgcatccctgacaccatcgtggtagtggcaggcaacaaactgcgactcgacgtccctatctccggcgaccctgctccaacagtgatctggcaaaaagcgataacccagggaaacaaggcaccagcccgacctgcaccagatgcgcctgaggacacgggagattcagacgaatgggtctttgataagaagctgttgtgtgagacagaaggacgtgttcgggttgagacgaccaaagaccgctctattttcacagtagagggggcagaaaaagaggatgaaggagtctacaccgtaacggttaagaatccagttggtgaggatcaggttaacttgacggtcaaggtcatcgacgtgccagacgccccagcagccccaaagatttctaacgtgggggaggactcctgcacagtccagtgggagccacctgcctacgacggtgggcagccaattttgggatatattctcgagagaaaaaagaagaaatcctacagatggatgagattgaacttcgacttgatccaagaactgtcccatgaagcccgtaggatgatcgagggcgtggtgtacgaaatgagagtgtacgccgtgaatgccattggaatgtcaagaccatccccggcatcacagcccttcatgccaattgggcctccctccgaacccactcatctggccgtggaagatgtctctgacacaacagtcagcctaaagtggaggcctcccgagcgagtcggagccggtgggctggacggatactccgtagaatattgtcctgagggttgctcagagtgggtggccgctttgcaagggctgaccgaacacacctctatcctggttaaagatctgccgacgggcgcacggcttctgttccgtgtccgggcacacaacatggccggacccggtgccccagtaaccaccacggagcctgtcacagtgcaggaaatcctacaacgacctagactgcagttacctcgccacttaagacagactattcagaaaaaggtcggtgaacctgttaaccttttgattccttttcaggggaaacctcgccctcaggtgacctggaccaaggaaggccagcctctggcgggagaggaagttagtattcggaattcacccacggatacaatcctgttcatcagagccgctcgtcgagtgcacagcggcacttaccaagtcaccgtgcgcatcgagaacatggaggataaagccaccctggtgctgcaagttgtcgacaagcccagtcctccccaggatctgagagtgacggatgcctggggactcaacgttgcactggagtggaagcctccccaggacgtgggtaacaccgagttgtggggatacacagtccagaaagctgacaaaaagaccatggagtggtttacggtgctggagcactacagaagaacccactgcgtcgtccctgagttaatcatcggcaatgggtattatttccgggtattttcccaaaacatggtcgggttctctgacagggctgccactactaaagagccagtgtttatcccacgtcctggcatcacatatgagccgccaaactacaaagccctggattttagcgaggccccaagcttcacccaacccttagtcaaccggagcgtgatcgctggctatacggctatgctgtgctgcgccgttcgagggtcccctaagccaaaaatctcttggtttaagaatggactggacctcggcgaggacgccagatttaggatgttctccaagcagggtgtcttgaccctagaaatcagaaaaccctgcccatttgatggcggaatttacgtctgccgtgcaactaacctgcagggggaggccagatgtgagtgtcggttagaggtacgcgtgccccagtag

SEQ ID NO: 5727 - DNA, 3825 bp, Artificial Sequence
  derived and/or modified sequence
atgccagagccaggcaagaaaccggtctcagctttttcaaaaaagcctcggtctgtagaagtggccgcaggaagccctgcggtattcgaagccgaaaccgagagggccggagtgaaagtacgttggcagcgaggaggttctgatatctctgcctccaataagtacgggttggcaacagagggcacaagacatacattgaccgtgagggaggtgggcccagccgatcagggttcttacgctgtcatcgcgggatcatctaaggtgaaatttgatctcaaagttattgaagccgaaaaggctgagcccatgctagcgccagcccctgccccagccgaggcaaccggcgcacctggagaagcacccgcacctgcagccgaattgggagaaagtgctccaagtcccaaaggaagtagctccgcggcactgaacgggcctactcccggagctcctgatgaccctattggcctgtttgtgatgcgccctcaagacggcgaggtcacagtcggcggaagcattactttcagcgcgagggtggccggagcctcactcttgaagcccccagttgtgaagtggtttaagggtaagtgggtggatctgagtagcaaggtcgggcagcacctccaactgcacgactcttacgatcgcgctagcaaagtctatcttttcgagctacacataaccgatgcacaacccgctttcacggggtcttatcgctgcgaggtatccaccaaggacaagttcgattgcagcaacttcaatttaacagttcacgaagcgatgggtacaggggacctagacctgctgagcgcctttcggagaacttcgttagccggtgggggaagacgcatttcagattcccacgaagacactggaattttggacttctctagtctgcttaaaaaacgagatagttttcggacaccacgtgattcaaaactggaagctcctgccgaggaagatgtgtgggaaatcctgaggcaagcccctccctccgaatacgaaaggatcgcctttcagtatggggtgacagatcttaggggcatgctgaagcggctgaagggtatgaggcgcgacgagaagaagtcaacagcgtttcaaaaaaaactggaaccagcataccaggtttccaagggacacaaaatcaggctgacggtggaactggctgatcacgatgccgaagtgaagtggcttaagaacggacaggagatccagatgagcggcagtaagtacatattcgagagtattggggctaaacgcacactgactatctctcagtgtagcttagcagacgacgccgcttatcagtgcgtggtgggaggggagaaatgttccaccgaattgttcgtgaaagaaccccctgttctcattacacgcccactggaagatcagctcgtgatggtaggacagcgtgtggagtttgaatgcgaagtctcagaagagggtgctcaggtgaagtggcttaaggatggagtggaactgacaagagaggagacgttcaaatatcgattcaagaaggatggccaacggcatcatttgatcatcaatgaagcaatgttggaggacgctggtcattacgctttgtgcacctcaggcggacaggctctcgctgaattaattgtccaggaaaaaaagctagaagtataccaatcaatcgccgacctgatggtgggtgctaaggaccaagccgtattcaaatgcgaggtgagcgacgaaaacgtcaggggggtttggctgaaaaatgggaaagaacttgtcccagactccagaatcaaggtgagccacatcggccgagttcacaagctcaccatcgacgatgtgaccccggctgacgaggcagactactctttcgtgcccgaaggcttcgcctgcaacctgagtgccaaactccacttcatggaggtgaagattgacttcgttcccagacaggaaccccctaaaatccatctcgattgcccgggacggatacccgatactatcgtggtggtggccggtaacaaactgcgcctcgacgtgcccattagcggcgaccctgcgccaacagtgatttggcaaaaggctatcactcaggggaataaggcaccagcacgcccagcgcctgatgcccctgaggacacgggagactctgatgagtgggtctttgacaaaaaactgttgtgtgagaccgagggacgtgtacgagtggagaccaccaaggacagatcgatctttaccgtcgaaggagccgaaaaagaggatgaaggcgtatacactgtgaccgtgaagaatcccgtcggtgaggaccaggtcaacctcaccgttaaagttatcgacgtgccagatgccccagccgctcctaagatttcaaacgtaggggaagatagttgcaccgtacagtgggagcccccagcgtatgacggagggcaaccaatcctgggatacattttggagcgcaagaaaaaaaagagctatcgctggatgcgactaaacttcgatctcattcaggaactcagccatgaggcacggaggatgatcgaaggcgtagtttatgagatgagagtgtacgccgtgaatgctatcggcatgtccagaccttcgcccgctagccagccattcatgccgattggcccaccgagtgagccaacacacctggcagtggaggacgtgtccgacaccactgtctccctgaagtggcgtccaccagaacgcgtgggtgcgggtggacttgacggttattctgtggaatattgccccgaaggctgctctgaatgggtggcggctctgcaagggctgactgaacatacgagcatcctcgtcaaggatctgccaaccggagcacgtcttttatttagggtgcgggctcacaacatggcaggccctggagcgccagttactactacagaacctgtaacggtccaggagattctgcagcgaccaagactacagctgccacgacacctgcggcagaccatccagaagaaagttggagagccagtaaatctgctcataccattccagggaaagcctcgaccacaggtgacttggactaaggaagggcagccgctcgcaggagaggaggtttcaatacgaaacagccccacagatactatactgttcattcgcgctgctaggcgagtccatagcggcacctatcaggtgaccgttaggattgaaaatatggaagacaaggcaacactggtcttgcaggtggtcgacaagccgagcccccctcaggatttacgtgttaccgatgcttggggattgaacgttgctctggagtggaagcccccacaggatgtcggcaatacagagttgtggggctatacagttcagaaagccgataaaaagaccatggagtggttcacggtcctcgagcactataggcgcacccactgcgtagtgcctgagttgattattggtaacggttactactttcgcgtgttcagtcagaatatggtcgggttctccgaccgtgccgcaacaacaaaggaaccagtgtttattccgagacccggaatcacgtatgagcctcccaactataaggctttagatttctctgaagctcctagttttacgcagccactcgtgaatcgctccgttatcgccggttacaccgccatgttatgctgcgcagtgcgaggttcccccaagccaaaaatcagctggttcaagaatggactggatctgggcgaggatgcacgattccgtatgttcagcaagcaaggggtgctgacgctggaaattaggaaaccttgcccattcgacgggggaatatacgtgtgtcgcgctactaatctacagggggaagcgagatgcgagtgcagacttgaggtcagggtacctcaatag

SEQ ID NO: 5728 - DNA, 3822 bp, Artificial Sequence
  derived and/or modified sequence
atgcccgagcccggcaagaagcccgtgagcgccttcagcaagaagcccagaagcgtggaggtggccgccggcagccccgccgtgttcgaggccgagaccgagagagccggcgtgaaggtgagatggcagagaggcggcagcgacatcagcgccagcaacaagtacggcctggccaccgagggcaccagacacaccctgaccgtgagagaggtgggccccgccgaccagggcagctacgccgtgatcgccggcagcagcaaggtgaagttcgacctgaaggtgatcgaggccgagaaggccgagcccatgctggcccccgcccccgcccccgccgaggccaccggcgcccccggcgaggcccccgcccccgccgccgagctgggcgagagcgcccccagccccaagggcagcagcagcgccgccctgaacggccccacccccggcgcccccgacgaccccatcggcctgttcgtgatgagaccccaggacggcgaggtgaccgtgggcggcagcatcaccttcagcgccagagtggccggcgccagcctgctgaagccccccgtggtgaagtggttcaagggcaagtgggtggacctgagcagcaaggtgggccagcacctgcagctgcacgacagctacgacagagccagcaaggtgtacctgttcgagctgcacatcaccgacgcccagcccgccttcaccggcagctacagatgcgaggtgagcaccaaggacaagttcgactgcagcaacttcaacctgaccgtgcacgaggccatgggcaccggcgacctggacctgctgagcgccttcagaagaaccagcctggccggcggcggcagaagaatcagcgacagccacgaggacaccggcatcctggacttcagcagcctgctgaagaagagcagcagcttcagaacccccagagacagcaagctggaggcccccgccgaggaggacgtgtgggagatcctgagacaggccccccccagcgagtacgagagaatcgccttccagtacggcgtgaccgacctgagaggcatgctgaagagactgaagggcatgagaagagacgagaagaagagcaccgccttccagaagaagctggagcccgcctaccaggtgagcaagggccacaagatcagactgaccgtggagctggccgaccacgacgccgaggtgaagtggctgaagaacggccaggagatccagatgagcggcagatacatcttcgagagcatcggcgccaagagaaccctgaccatcagccagtgcagcctggccgacgacgccgcctaccagtgcgtggtgggcggcgagaagtgcagcaccgagctgttcgtgaaggagccccccgtgctgatcaccagacccctggaggaccagctggtgatggtgggccagagagtggagttcgagtgcgaggtgagcgaggagggcgcccaggtgaagtggctgaaggacggcgtggagctgaccagagaggagaccttcaagtacagattcaagaaggacggccagagacaccacctgatcatcaacgaggccatgctggaggacgccggccactacgccctgtgcaccagcggcggccaggccctggccgagctgatcgtgcaggagaagaagctggaggtgtaccagagcatcgccgacctgatggtgggcgccaaggaccaggccgtgttcaagtgcgaggtgagcgacgagaacgtgagaggcgtgtggctgaagaacggcaaggagctggtgcccgacagcagaatcaaggtgagccacatcggcagagtgcacaagctgaccatcgacgacgtgacccccgccgacgaggccgactacagcttcgtgcccgagggcttcgcctgcaacctgagcgccaagctgcacttcatggaggtgaagatcgacttcgtgcccagacaggagccccccaagatccacctggactgccccggcagaatccccgacaccatcgtggtggtggccggcaacaagctgagactggacgtgcccatcagcggcgaccccgcccccaccgtgatctggcagaaggccatcacccagggcaacaaggcccccgccagacccgcccccgacgcccccgaggacaccggcgacagcgacgagtgggtgttcgacaagaagctgctgtgcgagaccgagggcagagtgagagtggagaccaccaaggacagaagcatcttcaccgtggagggcgccgagaaggaggacgagggcgtgtacaccgtgaccgtgaagaaccccgtgggcgaggaccaggtgaacctgaccgtgaaggtgatcgacgtgcccgacgcccccgccgcccccaagatcagcaacgtgggcgaggacagctgcaccgtgcagtgggagccccccgcctacgacggcggccagcccatcctgggctacatcctggagagaaagaagaagaagagctacagatggatgagactgaacttcgacctgatccaggagctgagccacgaggccagaagaatgatcgagggcgtggtgtacgagatgagagtgtacgccgtgaacgccatcggcatgagcagacccagccccgccagccagcccttcatgcccatcggcccccccagcgagcccacccacctggccgtggaggacgtgagcgacaccaccgtgagcctgaagtggagaccccccgagagagtgggcgccggcggcctggacggctacagcgtggagtactgccccgagggctgcagcgagtgggtggccgccctgcagggcctgaccgagcacaccagcatcctggtgaaggacctgcccaccggcgccagactgctgttcagagtgagagcccacaacatggccggccccggcgcccccgtgaccaccaccgagcccgtgaccgtgcaggagatcctgcagagacccagactgcagctgcccagacacctgagacagaccatccagaagaaggtgggcgagcccgtgaacctgctgatccccttccagggcaagcccagaccccaggtgacctggaccaaggagggccagcccctggccggcgaggaggtgagcatcagaaacagccccaccgacaccatcctgttcatcagagccgccagaagagtgcacagcggcacctaccaggtgaccgtgagaatcgagaacatggaggacaaggccaccctggtgctgcaggtggtggacaagcccagccccccccaggacctgagagtgaccgacgcctggggcctgaacgtggccctggagtggaagcccccccaggacgtgggcaacaccgagctgtggggctacaccgtgcagaaggccgacaagaagaccatggagtggttcaccgtgctggagcactacagaagaacccactgcgtggtgcccgagctgatcatcggcaacggctactacttcagagtgttcagccagaacatggtgggcttcagcgacagagccgccaccaccaaggagcccgtgttcatccccagacccggcatcacctacgagccccccaactacaaggccctggacttcagcgaggcccccagcttcacccagcccctggtgaacagaagcgtgatcgccggctacaccgccatgctgtgctgcgccgtgagaggcagccccaagcccaagatcagctggttcaagaacggcctggacctgggcgaggacgccagattcagaatgttcagcaagcagggcgtgctgaccctggagatcagaaagccctgccccttcgacggcggcatctacgtgtgcagagccaccaacctgcagggcgaggccagatgcgagtgcagactggaggtgagagtgccccagtag

SEQ ID NO: 5729 - DNA, 3825 bp, Artificial Sequence
  derived and/or modified sequence
atgcccgagcccggcaagaagcccgtgagcgccttcagcaagaagcccagaagcgtggaggtggccgccggcagccccgccgtgttcgaggccgagaccgagagagccggcgtgaaggtgagatggcagagaggcggcagcgacatcagcgccagcaacaagtacggcctggccaccgagggcaccagacacaccctgaccgtgagagaggtgggccccgccgaccagggcagctacgccgtgatcgccggcagcagcaaggtgaagttcgacctgaaggtgatcgaggccgagaaggccgagcccatgctggcccccgcccccgcccccgccgaggccaccggcgcccccggcgaggcccccgcccccgccgccgagctgggcgagagcgcccccagccccaagggcagcagcagcgccgccctgaacggccccacccccggcgcccccgacgaccccatcggcctgttcgtgatgagaccccaggacggcgaggtgaccgtgggcggcagcatcaccttcagcgccagagtggccggcgccagcctgctgaagccccccgtggtgaagtggttcaagggcaagtgggtggacctgagcagcaaggtgggccagcacctgcagctgcacgacagctacgacagagccagcaaggtgtacctgttcgagctgcacatcaccgacgcccagcccgccttcaccggcagctacagatgcgaggtgagcaccaaggacaagttcgactgcagcaacttcaacctgaccgtgcacgaggccatgggcaccggcgacctggacctgctgagcgccttcagaagaaccagcctggccggcggcggcagaagaatcagcgacagccacgaggacaccggcatcctggacttcagcagcctgctgaagaagagcagcagcttcagaacccccagagacagcaagctggaggcccccgccgaggaggacgtgtgggagatcctgagacaggccccccccagcgagtacgagagaatcgccttccagtacggcgtgaccgacctgagaggcatgctgaagagactgaagggcatgagaagagacgagaagaagagcaccgccttccagaagaagctggagcccgcctaccaggtgagcaagggccacaagatcagactgaccgtggagctggccgaccacgacgccgaggtgaagtggctgaagaacggccaggagatccagatgagcggcagcaagtacatcttcgagagcatcggcgccaagagaaccctgaccatcagccagtgcagcctggccgacgacgccgcctaccagtgcgtggtgggcggcgagaagtgcagcaccgagctgttcgtgaaggagccccccgtgctgatcaccagacccctggaggaccagctggtgatggtgggccagagagtggagttcgagtgcgaggtgagcgaggagggcgcccaggtgaagtggctgaaggacggcgtggagctgaccagagaggagaccttcaagtacagattcaagaaggacggccagagacaccacctgatcatcaacgaggccatgctggaggacgccggccactacgccctgtgcaccagcggcggccaggccctggccgagctgatcgtgcaggagaagaagctggaggtgtaccagagcatcgccgacctgatggtgggcgccaaggaccaggccgtgttcaagtgcgaggtgagcgacgagaacgtgagaggcgtgtggctgaagaacggcaaggagctggtgcccgacagcagaatcaaggtgagccacatcggcagagtgcacaagctgaccatcgacgacgtgacccccgccgacgaggccgactacagcttcgtgcccgagggcttcgcctgcaacctgagcgccaagctgcacttcatggaggtgaagatcgacttcgtgcccagacaggagccccccaagatccacctggactgccccggcagaatccccgacaccatcgtggtggtggccggcaacaagctgagactggacgtgcccatcagcggcgaccccgcccccaccgtgatctggcagaaggccatcacccagggcaacaaggcccccgccagacccgcccccgacgcccccgaggacaccggcgacagcgacgagtgggtgttcgacaagaagctgctgtgcgagaccgagggcagagtgagagtggagaccaccaaggacagaagcatcttcaccgtggagggcgccgagaaggaggacgagggcgtgtacaccgtgaccgtgaagaaccccgtgggcgaggaccaggtgaacctgaccgtgaaggtgatcgacgtgcccgacgcccccgccgcccccaagatcagcaacgtgggcgaggacagctgcaccgtgcagtgggagccccccgcctacgacggcggccagcccatcctgggctacatcctggagagaaagaagaagaagagctacagatggatgagactgaacttcgacctgatccaggagctgagccacgaggccagaagaatgatcgagggcgtggtgtacgagatgagagtgtacgccgtgaacgccatcggcatgagcagacccagccccgccagccagcccttcatgcccatcggcccccccagcgagcccacccacctggccgtggaggacgtgagcgacaccaccgtgagcctgaagtggagaccccccgagagagtgggcgccggcggcctggacggctacagcgtggagtactgccccgagggctgcagcgagtgggtggccgccctgcagggcctgaccgagcacaccagcatcctggtgaaggacctgcccaccggcgccagactgctgttcagagtgagagcccacaacatggccggccccggcgcccccgtgaccaccaccgagcccgtgaccgtgcaggagatcctgcagagacccagactgcagctgcccagacacctgagacagaccatccagaagaaggtgggcgagcccgtgaacctgctgatccccttccagggcaagcccagaccccaggtgacctggaccaaggagggccagcccctggccggcgaggaggtgagcatcagaaacagccccaccgacaccatcctgttcatcagagccgccagaagagtgcacagcggcacctaccaggtgaccgtgagaatcgagaacatggaggacaaggccaccctggtgctgcaggtggtggacaagcccagccccccccaggacctgagagtgaccgacgcctggggcctgaacgtggccctggagtggaagcccccccaggacgtgggcaacaccgagctgtggggctacaccgtgcagaaggccgacaagaagaccatggagtggttcaccgtgctggagcactacagaagaacccactgcgtggtgcccgagctgatcatcggcaacggctactacttcagagtgttcagccagaacatggtgggcttcagcgacagagccgccaccaccaaggagcccgtgttcatccccagacccggcatcacctacgagccccccaactacaaggccctggacttcagcgaggcccccagcttcacccagcccctggtgaacagaagcgtgatcgccggctacaccgccatgctgtgctgcgccgtgagaggcagccccaagcccaagatcagctggttcaagaacggcctggacctgggcgaggacgccagattcagaatgttcagcaagcagggcgtgctgaccctggagatcagaaagccctgccccttcgacggcggcatctacgtgtgcagagccaccaacctgcagggcgaggccagatgcgagtgcagactggaggtgagagtgccccagtag

SEQ ID NO: 5730 - DNA, 3825 bp, Artificial Sequence
  derived and/or modified sequence
atgcccgagcccggcaagaagcccgtgagcgccttcagcaagaagcccagaagcgtggaggtggccgccggcagccccgccgtgttcgaggccgagaccgagagagccggcgtgaaggtgagatggcagagaggcggcagcgacatcagcgccagcaacaagtacggcctggccaccgagggcaccagacacaccctgaccgtgagagaggtgggccccgccgaccagggcagctacgccgtgatcgccggcagcagcaaggtgaagttcgacctgaaggtgatcgaggccgagaaggccgagcccatgctggcccccgcccccgcccccgccgaggccaccggcgcccccggcgaggcccccgcccccgccgccgagctgggcgagagcgcccccagccccaagggcagcagcagcgccgccctgaacggccccacccccggcgcccccgacgaccccatcggcctgttcgtgatgagaccccaggacggcgaggtgaccgtgggcggcagcatcaccttcagcgccagagtggccggcgccagcctgctgaagccccccgtggtgaagtggttcaagggcaagtgggtggacctgagcagcaaggtgggccagcacctgcagctgcacgacagctacgacagagccagcaaggtgtacctgttcgagctgcacatcaccgacgcccagcccgccttcaccggcagctacagatgcgaggtgagcaccaaggacaagttcgactgcagcaacttcaacctgaccgtgcacgaggccatgggcaccggcgacctggacctgctgagcgccttcagaagaaccagcctggccggcggcggcagaagaatcagcgacagccacgaggacaccggcatcctggacttcagcagcctgctgaagaagagagacagcttcagaacccccagagacagcaagctggaggcccccgccgaggaggacgtgtgggagatcctgagacaggccccccccagcgagtacgagagaatcgccttccagtacggcgtgaccgacctgagaggcatgctgaagagactgaagggcatgagaagagacgagaagaagagcaccgccttccagaagaagctggagcccgcctaccaggtgagcaagggccacaagatcagactgaccgtggagctggccgaccacgacgccgaggtgaagtggctgaagaacggccaggagatccagatgagcggcagcaagtacatcttcgagagcatcggcgccaagagaaccctgaccatcagccagtgcagcctggccgacgacgccgcctaccagtgcgtggtgggcggcgagaagtgcagcaccgagctgttcgtgaaggagccccccgtgctgatcaccagacccctggaggaccagctggtgatggtgggccagagagtggagttcgagtgcgaggtgagcgaggagggcgcccaggtgaagtggctgaaggacggcgtggagctgaccagagaggagaccttcaagtacagattcaagaaggacggccagagacaccacctgatcatcaacgaggccatgctggaggacgccggccactacgccctgtgcaccagcggcggccaggccctggccgagctgatcgtgcaggagaagaagctggaggtgtaccagagcatcgccgacctgatggtgggcgccaaggaccaggccgtgttcaagtgcgaggtgagcgacgagaacgtgagaggcgtgtggctgaagaacggcaaggagctggtgcccgacagcagaatcaaggtgagccacatcggcagagtgcacaagctgaccatcgacgacgtgacccccgccgacgaggccgactacagcttcgtgcccgagggcttcgcctgcaacctgagcgccaagctgcacttcatggaggtgaagatcgacttcgtgcccagacaggagccccccaagatccacctggactgccccggcagaatccccgacaccatcgtggtggtggccggcaacaagctgagactggacgtgcccatcagcggcgaccccgcccccaccgtgatctggcagaaggccatcacccagggcaacaaggcccccgccagacccgcccccgacgcccccgaggacaccggcgacagcgacgagtgggtgttcgacaagaagctgctgtgcgagaccgagggcagagtgagagtggagaccaccaaggacagaagcatcttcaccgtggagggcgccgagaaggaggacgagggcgtgtacaccgtgaccgtgaagaaccccgtgggcgaggaccaggtgaacctgaccgtgaaggtgatcgacgtgcccgacgcccccgccgcccccaagatcagcaacgtgggcgaggacagctgcaccgtgcagtgggagccccccgcctacgacggcggccagcccatcctgggctacatcctggagagaaagaagaagaagagctacagatggatgagactgaacttcgacctgatccaggagctgagccacgaggccagaagaatgatcgagggcgtggtgtacgagatgagagtgtacgccgtgaacgccatcggcatgagcagacccagccccgccagccagcccttcatgcccatcggcccccccagcgagcccacccacctggccgtggaggacgtgagcgacaccaccgtgagcctgaagtggagaccccccgagagagtgggcgccggcggcctggacggctacagcgtggagtactgccccgagggctgcagcgagtgggtggccgccctgcagggcctgaccgagcacaccagcatcctggtgaaggacctgcccaccggcgccagactgctgttcagagtgagagcccacaacatggccggccccggcgcccccgtgaccaccaccgagcccgtgaccgtgcaggagatcctgcagagacccagactgcagctgcccagacacctgagacagaccatccagaagaaggtgggcgagcccgtgaacctgctgatccccttccagggcaagcccagaccccaggtgacctggaccaaggagggccagcccctggccggcgaggaggtgagcatcagaaacagccccaccgacaccatcctgttcatcagagccgccagaagagtgcacagcggcacctaccaggtgaccgtgagaatcgagaacatggaggacaaggccaccctggtgctgcaggtggtggacaagcccagccccccccaggacctgagagtgaccgacgcctggggcctgaacgtggccctggagtggaagcccccccaggacgtgggcaacaccgagctgtggggctacaccgtgcagaaggccgacaagaagaccatggagtggttcaccgtgctggagcactacagaagaacccactgcgtggtgcccgagctgatcatcggcaacggctactacttcagagtgttcagccagaacatggtgggcttcagcgacagagccgccaccaccaaggagcccgtgttcatccccagacccggcatcacctacgagccccccaactacaaggccctggacttcagcgaggcccccagcttcacccagcccctggtgaacagaagcgtgatcgccggctacaccgccatgctgtgctgcgccgtgagaggcagccccaagcccaagatcagctggttcaagaacggcctggacctgggcgaggacgccagattcagaatgttcagcaagcagggcgtgctgaccctggagatcagaaagccctgccccttcgacggcggcatctacgtgtgcagagccaccaacctgcagggcgaggccagatgcgagtgcagactggaggtgagagtgccccagtag

SEQ ID NO: 5731 - protein, 1935 aa, Artificial Sequence
  derived and/or modified sequence
MGDSEMAVFGAAAPYLRKSEKERLEAQTRPFDLKKDVFVPDDKQEFVKAKIVSREGGKVTAETEYGKTVTVKEDQVMQQNPPKFDKIEDMAMLTFLHEPAVLYNLKDRYGSWMIYTYSGLFCVTVNPYKWLPVYTPEVVAAYRGKKRSEAPPHIFSISDNAYQYMLTDRENQSILITGESGAGKTVNTKRVIQYFAVIAAIGDRSKKDQSPGKGTLEDQIIQANPALEAFGNAKTVRNDNSSRFGKFIRIHFGATGKLASADIETYLLEKSRVIFQLKAERDYHIFYQILSNKKPELLDMLLITNNPYDYAFISQGETTVASIDDAEELMATDNAFDVLGFTSEEKNSMYKLTGAIMHFGNMKFKLKQREEQAEPDGTEEADKSAYLMGLNSADLLKGLCHPRVKVGNEYVTKGQNVQQVIYATGALAKAVYERMFNWMVTRINATLETKQPRQYFIGVLDIAGFEIFDFNSFEQLCINFTNEKLQQFFNHHMFVLEQEEYKKEGIEWTFIDFGMDLQACIDLIEKPMGIMSILEEECMFPKATDMTFKAKLFDNHLGKSANFQKPRNIKGKPEAHFSLIHYAGIVDYNIIGWLQKNKDPLNETVVGLYQKSSLKLLSTLFANYAGADAPIEKGKGKAKKGSSFQTVSALHRENLNKLMTNLRSTHPHFVRCIIPNETKSPGVMDNPLVMHQLRCNGVLEGIRICRKGFPNRILYGDFRQRYRILNPAAIPEGQFIDSRKGAEKLLSSLDIDHNQYKFGHTKVFFKAGLLGLLEEMRDERLSRIITRIQAQSRGVLARMEYKKLLERRDSLLVIQWNIRAFMGVKNWPWMKLYFKIKPLLKSAEREKEMASMKEEFTRLKEALEKSEARRKELEEKMVSLLQEKNDLQLQVQAEQDNLADAEERCDQLIKNKIQLEAKVKEMNERLEDEEEMNAELTAKKRKLEDECSELKRDIDDLELTLAKVEKEKHATENKVKNLTEEMAGLDEIIAKLTKEKKALQEAHQQALDDLQAEEDKVNTLTKAKVKLEQQVDDLEGSLEQEKKVRMDLERAKRKLEGDLKLTQESIMDLENDKQQLDERLKKKDFELNALNARIEDEQALGSQLQKKLKELQARIEELEEELEAERTARAKVEKLRSDLSRELEEISERLEEAGGATSVQIEMNKKREAEFQKMRRDLEEATLQHEATAAALRKKHADSVAELGEQIDNLQRVKQKLEKEKSEFKLELDDVTSNMEQIIKAKANLEKMCRTLEDQMNEHRSKAEETQRSVNDLTSQRAKLQTENGELSRQLDEKEALISQLTRGKLTYTQQLEDLKRQLEEEVKAKNALAHALQSARHDCDLLREQYEEETEAKAELQRVLSKANSEVAQWRTKYETDAIQRTEELEEAKKKLAQRLQEAEEAVEAVNAKCSSLEKTKHRLQNEIEDLMVDVERSNAAAAALDKKQRNFDKILAEWKQKYEESQSELESSQKEARSLSTELFKLKNAYEESLEHLETFKRENKNLQEEISDLTEQLGSSGKTIHELEKVRKQLEAEKMELQSALEEAEASLEHEEGKILRAQLEFNQIKAEIERKLAEKDEEMEQAKRNHLRVVDSLQTSLDAETRSRNEALRVKKKMEGDLNEMEIQLSHANRMAAEAQKQVKSLQSLLKDTQIQLDDAVRANDDLKENIAIVERRNNLLQAELEELRAVVEQTERSRKLAEQELIETSERVQLLHSQNTSLINQKKKMDADLSQLQTEVEEAVQECRNAEEKAKKAITDAAMMAEELKKEQDTSAHLERMKKNMEQTIKDLQHRLDEAEQIALKGGKKQLQKLEARVRELENELEAEQKRNAESVKGMRKSERRIKELTYQTEEDRKNLLRLQDLVDKLQLKVKAYKRQAEEAEEQANTNLSKFRKVQHELDEAEERADIAESQVNKLRAKSRDIGTKGLNEE

SEQ ID NO: 5732 - protein, 1940 aa, Artificial Sequence
  derived and/or modified sequence
MGDSEMAVFGAAAPYLRKSEKERLEAQTRPFDLKKDVFVPDDKQEFVKAKIVSREGGKVTAETEYGKTVTVKEDQVMQQNPPKFDKIEDMAMLTFLHEPAVLYNLKDRYGSWMIYTYSGLFCVTVNPYKWLPVYTPEVVAAYRGKKRSEAPPHIFSISDNAYQYMLTDRENQSILITGESGAGKTVNTKRVIQYFAVIAAIGDRSKKDQSPGKGTLEDQIIQANPALEAFGNAKTVRNDNSSRFGKFIRIHFGATGKLASADIETYLLEKSRVIFQLKAERDYHIFYQILSNKKPELLDMLLITNNPYDYAFISQGETTVASIDDAEELMATDNAFDVLGFTSEEKNSMYKLTGAIMHFGNMKFKLKQREEQAEPDGTEEADKSAYLMGLNSADLLKGLCHPRVKVGNEYVTKGQNVQQVIYATGALAKAVYERMFNWMVTRINATLETKQPRQYFIGVLDIAGFEIFDFNSFEQLCINFTNEKLQQFFNHHMFVLEQEEYKKEGIEWTFIDFGMDLQACIDLIEKPMGIMSILEEECMFPKATDMTFKAKLFDNHLGKSANFQKPRNIKGKPEAHFSLIHYAGIVDYNIIGWLQKNKDPLNETVVGLYQKSSLKLLSTLFANYAGADAPIEKGKGKAKKGSSFQTVSALHRENLNKLMTNLRSTHPHFVRCIIPNETKSPGVMDNPLVMHQLRCNGVLEGIRICRKGFPNRILYGDFRQRYRILNPAAIPEGQFIDSRKGAEKLLSSLDIDHNQYKFGHTKVFFKAGLLGLLEEMRDERLSRIITRIQAQSRGVLARMEYKKLLERRDSLLVIQWNIRAFMGVKNWPWMKLYFKIKPLLKSAEREKEMASMKEEFTRLKEALEKSEARRKELEEKMVSLLQEKNDLQLQVQAEQDNLADAEERCDQLIKNKIQLEAKVKEMNERLEDEEEMNAELTAKKRKLEDECSELKRDIDDLELTLAKVEKEKHATENKVKNLTEEMAGLDEIIAKLTKEKKALQEAHQQALDDLQAEEDKVNTLTKAKVKLEQQVDDLEGSLEQEKKVRMDLERAKRKLEGDLKLTQESIMDLENDKQQLDERLKKKDFELNALNARIEDEQALGSQLQKKLKELQARIEELEEELEAERTARAKVEKLRSDLSRELEEISERLEEAGGATSVQIEMNKKREAEFQKMRRDLEEATLQHEATAAALRKKHADSVAELGEQIDNLQRVKQKLEKEKSEFKLELDDALLGLPSSNFLLPPPLSANLEKMCRTLEDQMNEHRSKAEETQRSVNDLTSQRAKLQTENGELSRQLDEKEALISQLTRGKLTYTQQLEDLKRQLEEEVKAKNALAHALQSARHDCDLLREQYEEETEAKAELQRVLSKANSEVAQWRTKYETDAIQRTEELEEAKKKLAQRLQEAEEAVEAVNAKCSSLEKTKHRLQNEIEDLMVDVERSNAAAAALDKKQRNFDKILAEWKQKYEESQSELESSQKEARSLSTELFKLKNAYEESLEHLETFKRENKNLQEEISDLTEQLGSSGKTIHELEKVRKQLEAEKMELQSALEEAEASLEHEEGKILRAQLEFNQIKAEIERKLAEKDEEMEQAKRNHLRVVDSLQTSLDAETRSRNEALRVKKKMEGDLNEMEIQLSHANRMAAEAQKQVKSLQSLLKDTQIQLDDAVRANDDLKENIAIVERRNNLLQAELEELRAVVEQTERSRKLAEQELIETSERVQLLHSQNTSLINQKKKMDADLSQLQTEVEEAVQECRNAEEKAKKAITDAAMMAEELKKEQDTSAHLERMKKNMEQTIKDLQHRLDEAEQIALKGGKKQLQKLEARVRELENELEAEQKRNAESVKGMRKSERRIKELTYQTEEDRKNLLRLQDLVDKLQLKVKAYKRQAEEAEEQANTNLSKFRKVQHELDEAEERADIAESQVNKLRAKSRDIGTKGLNEE

SEQ ID NO: 5733 - DNA, 5808 bp, Artificial Sequence
  derived and/or modified sequence
atgggcgattcggaaatggccgtatttggggcagctgcaccttatctgcgaaagagtgaaaaggaaaggcttgaagctcagactaggccgtttgacctcaaaaaagatgtgttcgtgccagacgacaagcaagagttcgtcaaagcgaagatcgtgagcagggagggcggtaaggttaccgccgaaactgagtatgggaaaaccgtcactgtcaaggaagaccaggtgatgcagcaaaatccacccaaatttgacaagattgaggacatggctatgctgacatttctgcacgaacccgcagtcctttacaatctaaaagaccgatatggctcttggatgatctacacatacagcggcctgttttgtgtgacagttaacccctacaaatggctccccgtatatactccagaagtagtggcagcctatagggggaaaaagaggtccgaagcccccccgcatattttttctattagcgacaatgcatatcagtacatgttgaccgaccgtgaaaatcagtcgatcttaattaccggcgagtcgggtgcaggaaagaccgtaaacaccaagagggttattcagtattttgctgtcatcgctgctataggcgaccgttccaagaaggatcagtctccgggcaagggcaccttagaggaccagatcattcaagccaacccggctcttgaggcgtttgggaatgccaagactgtgaggaacgataacagctcacggtttggcaaatttatccgtattcacttcggcgctactggaaaattagccagtgcagatatcgagacgtatctgctggagaagagccgagtgatattccagttgaaagctgagagggactatcatatcttctatcagattttgtcaaataaaaaaccagaacttttggacatgttgctgattacaaacaacccatatgactatgcctttatctcccagggcgagactacagtggcgtcaatcgatgatgccgaggaattaatggcaacggacaacgcctttgacgtcctcgggtttacctccgaagagaagaactcaatgtacaagctaaccggcgctataatgcactttggtaatatgaaatttaagcttaagcaaagggaagaacaggcagagcctgatggaactgaagaagcagacaagagcgcctaccttatgggactgaattcagccgacctgctcaaaggcctatgtcatccccgggtgaaagtcggcaatgaatatgtgactaaagggcaaaacgtgcaacaggtgatctacgcgacaggggccctcgccaaggcagtgtatgagaggatgtttaactggatggtgacaaggataaacgcgaccctcgagactaagcaacctaggcagtattttatcggagttctggatattgccggcttcgagatttttgattttaattcattcgagcagttgtgcattaactttaccaatgagaagctacagcagttttttaaccaccacatgtttgtattggagcaggaagagtataaaaaagaggggatcgagtggacattcatagattttggtatggacctacaggcctgcatcgacctgatagaaaagccaatggggatcatgagtattctagaagaggagtgcatgttccctaaagcaaccgatatgacctttaaagctaagttattcgacaatcatctcggaaagtcagctaattttcagaagccacgcaacatcaaaggaaaacctgaagcacacttcagcctgattcattacgcagggatagtggactataatattatcggctggctccagaaaaataaagacccactgaatgagactgttgtgggcttataccagaagtcgagcttaaagctcctcagtacactattcgctaactatgccggagctgacgcccctatcgaaaaaggtaaggggaaggccaaaaagggaagcagttttcagacagtgagcgctttgcatcgagagaatctgaacaaactgatgactaatctgcgcagcacacatccccattttgtacgatgcatcattccgaatgaaacaaagagccccggcgtcatggataaccctcttgtcatgcaccagctgcgttgtaatggggtacttgagggcatccggatatgccggaagggcttcccaaatagaattctgtacggagattttaggcaacggtatcgaattttgaatcccgccgctatccctgaagggcaattcatcgatagcaggaaaggtgctgaaaaactactgtccagccttgatatcgatcataaccagtataaatttggacatacgaaggtattcttcaaagcggggctccttggactgctggaagagatgcgggacgagcggctatcacgcattatcacccgcatccaagcgcaatcaagaggcgtcttagcgaggatggagtacaagaagcttttggagcgcagagacagtctccttgtgatccagtggaacatacgagctttcatgggtgtgaaaaactggccatggatgaagttgtatttcaaaatcaagcccctcctgaaatccgcagagagggagaaggaaatggcatcaatgaaggaagagttcacacgactaaaggaggctctcgaaaagtcagaggcaagacgcaaagaattggaagaaaaaatggtttctttactccaggagaaaaacgatttacagctacaagtgcaggcggagcaggataatttggcagacgctgaagagcgatgcgatcagctgatcaagaataagatacaattagaggctaaggtcaaagagatgaacgaaagacttgaagacgaagaggaaatgaacgccgaacttaccgctaagaagagaaagctcgaggacgagtgcagcgagctgaagagggatatagatgatctggagctgacgcttgccaaggtcgaaaaagagaagcacgctactgaaaataaagtcaaaaatctaacggaggagatggctggcctggacgagatcatagccaagttgactaaagaaaagaaggctttacaggaagcccaccagcaggcactcgacgacctgcaggcagaagaggataaagttaacaccctgaccaaggctaaagtgaagctcgagcagcaggttgacgacctcgaagggagcctcgaacaggagaaaaaggtcaggatggatctggagagagccaagcgcaagctagaaggtgatctgaagctcacccaggaaagcataatggatttagagaacgacaaacagcagcttgacgagaggctcaagaagaaagatttcgaactcaatgctcttaacgcacgtattgaagatgaacaggccctcggtagccagctccagaaaaagctgaaagaacttcaggcacgcattgaagaacttgaagaggaactagaagcagagcgtacagcaagagctaaggtagaaaagctcaggtctgacctctcacgcgagttggaggagattagtgaacggttagaagaagctggtggcgccacatcagtccaaattgaaatgaataagaaacgagaagccgagtttcagaagatgcgcagagacctagaagaggctaccctgcagcatgaagctaccgccgccgccctcaggaaaaagcatgccgacagtgtcgcagagcttggggagcaaatcgacaatctccagagggttaaacagaagcttgagaaggagaaaagcgaattcaaacttgaactagacgatgtgacctccaacatggaacaaatcattaaggcaaaggccaatctggagaaaatgtgccgcacactcgaggaccagatgaacgagcatcgttccaaggccgaagaaacccagcgcagcgttaatgacctcacttctcagcgggctaagcttcaaactgaaaacggtgagctgagtaggcagctggatgaaaaagaagcactgatctcccagttgactagaggtaagcttacctacacccagcagctggaggatttaaaacgccagctagaggaggaggtaaaggcaaagaacgccctggcgcacgccctccagtccgccaggcacgactgcgatctgctacgggagcagtatgaggaggagacagaagctaaggcagaactgcaaagagtgctgtctaaggcgaatagtgaggttgcacagtggcgtaccaagtatgagaccgatgcgattcagagaaccgaggaactggaagaagccaagaaaaagctggctcagaggctccaggaggcagaagaggcagtggaggcagtgaacgccaagtgttcaagcctggagaagaccaaacaccgtttacagaacgagattgaagacctgatggtcgatgtggaacgaagtaacgccgctgccgcagctttggataaaaagcagcgtaacttcgataagatattggcggagtggaagcagaagtacgaggaatcacagtcagagctggagagctcgcagaaagaagcacggagtctgtctactgaactgtttaaactgaaaaacgcgtacgaggagtcactagaacacttggagacatttaagcgagagaataagaatctccaggaagagatctcagacctcactgaacagttgggtagttccggcaaaacaatccacgagcttgagaaggttcgcaaacaacttgaagccgaaaagatggaactccagagcgctttggaagaagcggaggccagccttgaacacgaggaggggaaaattcttagagctcagttagaattcaaccaaattaaggctgagatagaaaggaaattggctgagaaggacgaggaaatggagcaggctaagcgcaaccatctgagggtagtggattccctccagacttcactcgacgcagagactcgttcccgaaatgaggctctgcgtgtgaaaaagaagatggaaggagacctgaacgagatggagattcagctgagccacgctaacagaatggccgccgaagcccagaagcaggtaaaatcattacagtcattgctcaaggacacccaaattcagcttgatgatgctgtgcgcgcgaatgacgatcttaaggagaacattgccattgtggagcggagaaacaatctgttgcaggctgagctggaggaactgcgcgccgtcgtagaacagaccgagcggtcccgaaaattggctgagcaggaactgatcgaaacctccgaacgcgttcagctgttacatagtcagaacacctccctgatcaaccagaagaaaaagatggacgctgacctttcacaactgcagaccgaagttgaggaagccgtgcaggagtgccgaaatgcagaggaaaaagctaagaaggctattacagacgccgccatgatggccgaggaactcaaaaaggagcaagatacatcagcgcatttggaaagaatgaagaagaacatggagcaaactatcaaagacctgcagcaccggcttgatgaagccgaacagattgctttgaaaggtgggaaaaagcagctgcagaaattagaggcccgggtgcgagagctagagaatgagctggaagccgaacagaaacggaacgctgagagtgtgaagggcatgaggaagtccgaacgcagaatcaaggaactgacatatcaaacagaagaggatcgaaagaatttgctccgacttcaagaccttgtagacaaactccaactgaaagtaaaagcctataagcgccaggcggaggaggcagaagagcaagctaacactaacttgtccaagttcagaaaggttcagcatgagcttgacgaggccgaagagagagccgatattgccgagagccaggttaataaactgcgtgcaaaaagccgggatattggcacaaaggggcttaacgaggagtag

SEQ ID NO: 5734 - DNA, 5823 bp, Artificial Sequence
  derived and/or modified sequence
atgggcgattctgagatggccgtgttcggcgctgccgccccttacctccgcaagagcgagaaagaaagactggaggcacagactagacctttcgacctgaagaaagatgtgttcgtacccgatgataaacaggagttcgtgaaagcgaagattgtctcgcgagaggggggaaaggtaaccgcagagaccgaatatggaaaaaccgtcaccgttaaggaggaccaggtcatgcaacagaacccacctaagtttgataagattgaagatatggcgatgctaacgttcttacacgaacctgccgtgctctacaatttgaaagatcgctatggttcctggatgatctacacctattctgggttgttctgcgtcaccgtgaacccttataagtggttgccggtgtacacacctgaggtcgtcgccgcgtaccgggggaagaagcgtagtgaagccccgccacatatatttagtatttccgataatgcgtaccagtacatgctgacagatagagaaaatcagtcaatcttaatcaccggcgaaagcggggccggcaagaccgttaacactaagcgagtcattcaatattttgccgtcattgccgctatcggcgatcggtctaagaaagatcagtctccggggaaagggacgctcgaagaccagatcattcaggctaacccagccctggaagccttcggcaatgcaaaaacagtccgcaatgacaacagttcccggtttgggaaatttatccggattcacttcggggctactgggaagctggcatctgcagacatcgaaacgtatctactggaaaagtccagggtgatctttcagctcaaggcagaaagagactaccatatcttttaccagatactgagtaacaaaaaacccgagctgctggacatgctgctgataaccaataacccatatgattacgcattcatctctcagggagagacgacggtcgccagtatcgacgatgcagaggagctgatggctaccgacaatgccttcgacgttttgggcttcacctctgaagagaagaacagcatgtacaaattgacaggagccatcatgcattttggcaatatgaagtttaagctcaagcagcgcgaagaacaagccgagcctgatgggaccgaagaagctgataaatccgcttatctgatgggcttaaattctgccgacctgctgaaaggtttgtgccaccccagggtcaaggtagggaatgagtatgtgactaaaggacagaatgttcagcaagtgatttacgctactggagcactcgctaaagccgtgtacgaaagaatgttcaactggatggtcacacgcattaacgcgacactggaaacgaaacagccccgtcagtatttcattggagttttggatatcgctggctttgagatttttgactttaactcttttgagcagctttgcatcaactttaccaatgaaaaattgcagcagttcttcaatcaccacatgttcgtgttggaacaggaggagtataaaaaggaggggattgagtggacttttattgactttggcatggatctgcaagcttgcatcgaccttatagagaagcccatggggatcatgtctatcctcgaggaggaatgtatgtttcctaaggcaacggacatgactttcaaggctaagctatttgataaccacttgggaaaatctgccaatttccagaaaccacgtaacatcaaaggcaaacctgaagctcactttagcctcatccattacgcaggaatagttgactacaatattatcgggtggctccagaagaataaagaccccttaaacgagactgtggtgggtctctaccagaaatcttccttgaaactgctgtccaccctcttcgccaattatgcgggcgccgacgcccccattgaaaaagggaagggtaaagccaagaagggctcctctttccagactgtgtcagccctgcacagagaaaatctcaacaagcttatgactaacctaaggtcaacacaccctcactttgttcggtgcatcattcctaacgagactaagtccccaggagtaatggacaacccattagtcatgcaccagttaagatgcaacggagtcctggagggaatccgtatttgccgcaaggggtttcccaatcgtatcctctacggagacttcagacagcggtatcgaattctgaacccagcggcaatccctgaagggcagttcatcgactctagaaagggggctgaaaagctcttaagcagtcttgatattgatcacaaccagtacaagtttggacataccaaggtctttttcaaggcgggtctacttggattgttagaggagatgagggatgaaagattgagccgaatcatcacacgaattcaggcccagtcgaggggggtattagcaagaatggaatacaagaagctgctagagcgacgagatagtctgctggtgattcagtggaatattcgcgcctttatgggggtcaaaaattggccatggatgaagctttacttcaaaatcaaaccactgctgaagagcgccgaacgggaaaaggagatggcatctatgaaagaagagttcacccgcctgaaggaagccctggaaaagtccgaggcaagaagaaaagagctggaggagaagatggtaagtcttttgcaggagaagaatgaccttcaactgcaagtgcaggccgagcaggacaacttagcagacgctgaggaaagatgtgaccaactaatcaagaacaaaatccaactcgaagccaaggtcaaagagatgaacgaacggctggaagatgaagaagaaatgaatgctgaactgacggcgaaaaaaagaaaactggaggacgaatgtagtgagctcaaaagagacatcgatgacctggagctaaccttagcaaaggtcgaaaaagagaaacacgccacggagaacaaagtcaaaaaccttaccgaggagatggctggcctggacgagattatagccaagctgaccaaggaaaaaaaggccttgcaggaagcacaccagcaggctctggatgatctacaggctgaagaggataaagtgaataccctcactaaagccaaagtcaagctcgagcagcaggtggatgatctggaaggtagtttagaacaggagaagaaggtgagaatggaccttgagcgcgcaaaaaggaagctggaaggggatctgaagctgacccaggagtccattatggatctggaaaatgacaaacagcagcttgacgagcgtctcaagaagaaggatttcgagctgaacgctctgaacgcacgcatagaagacgaacaagcgctgggtagccagcttcagaagaaactcaaggagctgcaggcgagaatagaggagctggaggaggaacttgaagccgaacgaacggctagagcaaaagtagagaaactcaggagtgatctttctcgcgaacttgaggagataagtgaacggctggaagaggcaggaggagcaacgagcgttcagatcgaaatgaacaaaaagagagaggcagagttccagaaaatgcgacgggatctcgaggaggccaccctgcagcatgaggccactgctgcagctctccggaaaaagcacgcagactcggtagcagagctgggggagcagattgataatttgcaaagggtgaaacagaagctggagaaagaaaaatctgagttcaagttggaactcgatgatgctctcctcggactgccaagctcaaactttctcctgcccccaccattgtccgccaacctagagaaaatgtgcaggacactggaagatcaaatgaacgagcaccgctcaaaggccgaagagacacaacggagtgtgaacgatctcacttcacagcgcgctaaacttcagaccgagaatggcgaacttagccgacaactggacgagaaagaggccttaatttcccagctgacgcgtgggaaactgacctatactcaacagctggaagacctgaagcggcagcttgaggaggaggttaaagccaaaaatgccctggcacacgctttacaatcggcacgccatgactgtgacctgctgcgggagcagtacgaggaggagacagaagccaaggccgaattgcagcgggtgctgtccaaagccaatagtgaagtcgcgcagtggcggacaaagtacgagaccgacgcgatccagcggactgaggaactcgaggaggctaagaagaagctggcccaaagactccaggaggcagaagaagctgttgaggctgttaatgctaagtgtagctccctcgagaagacgaagcatcgcctccagaacgaaatcgaggatctaatggtggatgtggaacgcagcaacgctgcagccgccgcgctggacaaaaagcagaggaactttgataagattcttgctgagtggaaacagaaatacgaggagtcccagtcggaactggaatcatcccagaaggaggcgcggtctttgtccactgagctgttcaagttgaagaacgcttatgaagaaagtttagagcatctcgaaactttcaaaagggaaaacaagaacctgcaggaagagatttcggacctgactgagcaacttgggagctcgggtaaaaccattcatgagctggagaaggtgaggaagcagttggaggctgagaagatggagctccagtcagcactggaagaggcagaagcatctctggaacatgaagaagggaagatcctcagggcgcagctggaattcaatcagattaaggcagaaattgaaaggaaactggcagaaaaagacgaggagatggagcaggccaagcggaaccacctgcgagtggtggattccttgcagacaagtcttgatgccgagacccggagtaggaatgaagccctccgggtgaaaaagaaaatggagggagacctcaacgagatggagattcagttgagtcacgctaaccgaatggcggccgaagcccagaagcaagtcaagtcactgcagtcactcctaaaggacactcaaattcagttagatgatgccgttcgtgccaacgacgacctgaaagaaaatatcgcgatcgtggagaggcgtaacaacctgttgcaagccgagctcgaagaactgagggcggtggtggagcaaaccgaacgcagcagaaagctcgcggaacaggagctgattgaaacatccgaacgggtgcagctgctgcatagccagaatacaagtttgattaaccaaaagaaaaaaatggatgccgatctgtcacagctgcagacagaagtggaggaagctgttcaagagtgcagaaatgccgaagagaaagccaagaaggccattaccgatgctgctatgatggctgaggagctgaaaaaggagcaggacaccagcgcccacctggagcggatgaagaagaatatggagcagactatcaaggatctccagcaccggctcgatgaagcagaacagatagccctgaaagggggaaagaaacaactgcagaagctcgaagccagagtaagggaactggaaaatgagcttgaggccgagcagaaacgcaacgcagagagtgtgaaggggatgcggaaaagcgagcgaagaattaaggagctgacataccagaccgaagaggaccgcaaaaaccttctaaggcttcaggacttggtagacaaactgcagctgaaagtcaaggcttataagaggcaagctgaggaagccgaggaacaggctaatactaatctgagcaaattcagaaaagtacagcacgagctggacgaggctgaggagcgtgctgatattgctgagtctcaggtgaacaagctgcgcgctaaaagtcgggacatcggaaccaaaggtctgaatgaagaatag

SEQ ID NO: 5735 - DNA, 5808 bp, Artificial Sequence
  derived and/or modified sequence
atgggagacagcgagatggctgtgtttggagctgctgccccctacctgaggaagtctgagaaggagcggctggaggcccagacccggccctttgacctgaagaaggatgtgtttgtgcctgatgacaagcaggagtttgtgaaggccaagatcgtgtcccgggagggcggcaaggtgacagctgagacagaatatggcaagacagtgacagtgaaggaggaccaggtgatgcagcagaacccccccaagtttgacaagattgaggacatggccatgctgaccttcctgcacgagcctgctgtgctgtacaacctgaaggacagatatggctcctggatgatctacacctacagcggcctcttctgtgtgacagtgaacccctacaagtggctgcctgtgtacaccccagaggtggtggccgcctaccggggcaagaagaggtctgaggccccaccccacatcttcagcatcagtgacaatgcctaccagtacatgctgacagaccgggagaaccagagcatcctgatcactggagagagcggggccggcaagacagtgaacaccaagagggtcatccagtactttgctgtgattgctgccatcggggacaggagcaagaaggaccagagccctgggaagggcaccctggaggaccagatcatccaggccaacccagccctggaggcctttggaaatgccaagacagtgagaaatgacaacagcagcagatttgggaagttcatccgcatccactttggagccaccgggaagctggccagcgctgacatcgagacctacctgctggagaagagcagggtcatcttccagctgaaggccgagcgggactaccacatcttctaccagatcctgagcaacaagaagccagagctgctggacatgctgctgatcaccaacaacccctatgactatgccttcatcagccagggcgagaccaccgtggccagcattgatgatgctgaggagctgatggccacagacaatgcctttgatgtgctgggcttcaccagcgaggagaagaacagcatgtacaagctgactggagccatcatgcactttggaaacatgaagttcaagctgaagcagcgggaggagcaggccgagccagatggaacagaggaggccgacaagagcgcctacctgatgggcctgaacagcgctgacctgctgaagggcctgtgccacccccgggtgaaggtgggcaatgaatatgtgaccaagggccagaatgtgcagcaggtgatctatgccaccggggccctggccaaggctgtgtatgaaagaatgttcaactggatggtgacccgcatcaatgccaccctggagaccaagcagccccggcagtacttcatcggcgtgctggacattgctggctttgagatctttgacttcaacagctttgagcagctgtgcatcaacttcaccaatgagaagctgcagcagttcttcaaccaccacatgtttgtgctggagcaggaggagtacaagaaggagggcatcgagtggaccttcatcgactttggcatggacctgcaggcctgcatcgacctgattgagaagcccatgggcatcatgagcatcctggaggaggagtgcatgttccccaaggccacagacatgaccttcaaggccaagctgtttgacaaccacctgggcaagagcgccaacttccagaagcccaggaacatcaagggcaagccagaggcccacttcagcctcatccactacgccggcatcgtggactacaacatcatcggctggctgcagaagaacaaggaccccctgaatgagaccgtggtgggcctgtaccagaagagcagcctgaagctgctgagcaccctgtttgccaactatgctggagcagatgcccccatcgagaagggcaagggcaaggccaagaagggcagcagcttccagacagtgtctgccctgcaccgggagaacctgaacaagctgatgaccaacctgcggagcacccacccccactttgtgcgctgcatcatccccaatgagaccaagagccctggggtgatggacaaccccctggtgatgcaccagctgcgctgcaatggagtgctggagggcatccgcatctgcaggaagggcttccccaaccgcatcctgtatggagacttccggcagcgctaccgcatcctgaacccagctgccatccctgagggccagttcatcgacagcaggaaaggagctgagaagctgctgagcagcctggacatcgaccacaaccagtacaagtttggccacaccaaggtgttcttcaaggccggcctgctgggcctgctggaggagatgagagatgagcggctgagccgcatcatcacccgcatccaggcccagagccggggcgtgctggccaggatggagtacaagaagctgctggagcggcgggacagcctgctggtgatccagtggaacatccgggccttcatgggcgtgaagaactggccctggatgaagctgtacttcaagatcaagcccctgctgaagtctgctgagcgggagaaggagatggcctccatgaaggaggagttcacccggctgaaggaggccctggagaagtctgaggcccggaggaaggagctggaggagaagatggtgtccctgctgcaggagaagaatgacctgcagctgcaggtgcaggccgagcaggacaacctggctgatgctgaggagcgctgtgaccagctgatcaagaacaagatccagctggaggccaaggtgaaggagatgaatgaaaggctggaggatgaggaggagatgaatgctgagctgacagccaagaagaggaagctggaggatgagtgcagcgagctgaagagggacattgatgacctggagctgaccctggccaaggtggagaaggagaagcacgccacagagaacaaggtgaagaacctgacagaggagatggccggcctggatgagatcatcgccaagctgaccaaggagaagaaggccctgcaggaggcccaccagcaggccctggatgacctgcaggccgaggaggacaaggtgaacaccctgaccaaggccaaggtgaagctggagcagcaggtggatgacctggagggcagcctggagcaggagaagaaggtgaggatggacctggagcgggccaagaggaagctggagggggacctgaagctgacccaggagagcatcatggacctggagaatgacaagcagcagctggatgagcggctgaagaagaaggactttgagctgaatgccctgaatgccagaattgaagatgagcaggccctgggcagccagctgcagaagaagctgaaggagctgcaggccagaattgaggagctggaggaggagctggaggccgagaggacagcccgggccaaggtggagaagctgcggagtgacctgagccgggagctggaggagatcagcgagcggctggaggaggccggcggggccacctctgtgcagatcgagatgaacaagaagcgggaggccgagttccagaagatgagaagagacctggaggaggccaccctgcagcacgaggccacagctgctgccctgaggaagaagcatgctgacagcgtggccgagctgggggagcagattgacaacctgcagagggtgaagcagaagctggagaaggagaagtctgagttcaagctggagctggatgatgtgaccagcaacatggagcagatcatcaaggccaaggccaacctggagaagatgtgcaggaccctggaggaccagatgaatgagcacaggagcaaggccgaggagacccagaggtctgtgaatgacctgaccagccagagggccaagctgcagacagaaaatggagagctgagccggcagctggatgagaaggaggccctgatcagccagctgacccggggcaagctgacctacacccagcagctggaggacctgaagaggcagctggaggaggaggtgaaggccaagaatgccctggcccacgccctgcagagcgcccggcatgactgtgacctgctgcgggagcagtatgaggaggagacagaggccaaggccgagctgcagagggtgctgagcaaggccaacagcgaggtggcccagtggaggaccaagtatgaaacagatgccatccagaggacagaggagctggaggaggccaagaagaagctggcccagaggctgcaggaggccgaggaggccgtggaggccgtgaatgccaagtgcagcagcctggagaagaccaagcaccggctgcagaatgaaattgaggacctgatggtggatgtggagaggagcaatgctgctgctgctgccctggacaagaagcagaggaactttgacaagatcctggccgagtggaagcagaagtatgaggagagccagagcgagctggagagcagccagaaggaggcccggagcctgagcacagagctgttcaagctgaagaatgcctatgaggagagcctggagcacctggagaccttcaagcgggagaacaagaacctgcaggaggagatcagtgacctgacagagcagctgggcagcagcggcaagaccatccacgagctggagaaggtgaggaagcagctggaggccgagaagatggagctgcagagcgccctggaggaggccgaggccagcctggagcacgaggagggcaagatcctgcgggcccagctggagttcaaccagatcaaggccgagattgaaaggaagctggccgagaaggatgaggagatggagcaggccaagaggaaccacctgcgggtggtggacagcctgcagaccagcctggatgctgagaccaggagcagaaatgaggccctgcgggtgaagaagaagatggagggggacctgaatgagatggagatccagctgagccacgccaacaggatggctgctgaggcccagaagcaggtgaagagcctgcagagcctgctgaaggacacccagatccagctggatgatgctgtgcgggccaatgatgacctgaaggaaaatattgccatcgtggagaggaggaacaacctgctgcaggccgagctggaggagctgcgggctgtggtggagcagacagagaggagcaggaagctggccgagcaggagctgattgagaccagcgagcgggtgcagctgctgcacagccagaacaccagcctcatcaaccagaagaagaagatggatgctgacctgagccagctgcagacagaggtggaggaggccgtgcaggagtgcagaaatgctgaggagaaggccaagaaggccatcacagatgctgccatgatggccgaggagctgaagaaggagcaggacaccagcgcccacctggagaggatgaagaagaacatggagcagaccatcaaggacctgcagcaccggctggatgaggccgagcagatcgccctgaagggcggcaagaagcagctgcagaagctggaggcccgggtgcgggagctggagaatgagctggaggccgagcagaagagaaatgctgagagcgtgaagggcatgaggaagtcagaaagacgcatcaaggagctgacctaccagacagaggaggacaggaagaacctgctgcggctgcaggacctggtggacaagctgcagctgaaggtgaaggcctacaagaggcaggccgaggaggccgaggagcaggccaacaccaacctgagcaagttcaggaaggtgcagcacgagctggatgaggccgaggagagagctgacattgctgagagccaggtgaacaagctgcgggccaagagccgggacatcggcaccaagggcctgaatgaggagtag

SEQ ID NO: 5736 - DNA, 5823 bp, Artificial Sequence
  derived and/or modified sequence
atgggagacagcgagatggctgtgtttggagctgctgccccctacctgaggaagtctgagaaggagcggctggaggcccagacccggccctttgacctgaagaaggatgtgtttgtgcctgatgacaagcaggagtttgtgaaggccaagatcgtgtcccgggagggcggcaaggtgacagctgagacagaatatggcaagacagtgacagtgaaggaggaccaggtgatgcagcagaacccccccaagtttgacaagattgaggacatggccatgctgaccttcctgcacgagcctgctgtgctgtacaacctgaaggacagatatggctcctggatgatctacacctacagcggcctcttctgtgtgacagtgaacccctacaagtggctgcctgtgtacaccccagaggtggtggccgcctaccggggcaagaagaggtctgaggccccaccccacatcttcagcatcagtgacaatgcctaccagtacatgctgacagaccgggagaaccagagcatcctgatcactggagagagcggggccggcaagacagtgaacaccaagagggtcatccagtactttgctgtgattgctgccatcggggacaggagcaagaaggaccagagccctgggaagggcaccctggaggaccagatcatccaggccaacccagccctggaggcctttggaaatgccaagacagtgagaaatgacaacagcagcagatttgggaagttcatccgcatccactttggagccaccgggaagctggccagcgctgacatcgagacctacctgctggagaagagcagggtcatcttccagctgaaggccgagcgggactaccacatcttctaccagatcctgagcaacaagaagccagagctgctggacatgctgctgatcaccaacaacccctatgactatgccttcatcagccagggcgagaccaccgtggccagcattgatgatgctgaggagctgatggccacagacaatgcctttgatgtgctgggcttcaccagcgaggagaagaacagcatgtacaagctgactggagccatcatgcactttggaaacatgaagttcaagctgaagcagcgggaggagcaggccgagccagatggaacagaggaggccgacaagagcgcctacctgatgggcctgaacagcgctgacctgctgaagggcctgtgccacccccgggtgaaggtgggcaatgaatatgtgaccaagggccagaatgtgcagcaggtgatctatgccaccggggccctggccaaggctgtgtatgaaagaatgttcaactggatggtgacccgcatcaatgccaccctggagaccaagcagccccggcagtacttcatcggcgtgctggacattgctggctttgagatctttgacttcaacagctttgagcagctgtgcatcaacttcaccaatgagaagctgcagcagttcttcaaccaccacatgtttgtgctggagcaggaggagtacaagaaggagggcatcgagtggaccttcatcgactttggcatggacctgcaggcctgcatcgacctgattgagaagcccatgggcatcatgagcatcctggaggaggagtgcatgttccccaaggccacagacatgaccttcaaggccaagctgtttgacaaccacctgggcaagagcgccaacttccagaagcccaggaacatcaagggcaagccagaggcccacttcagcctcatccactacgccggcatcgtggactacaacatcatcggctggctgcagaagaacaaggaccccctgaatgagaccgtggtgggcctgtaccagaagagcagcctgaagctgctgagcaccctgtttgccaactatgctggagcagatgcccccatcgagaagggcaagggcaaggccaagaagggcagcagcttccagacagtgtctgccctgcaccgggagaacctgaacaagctgatgaccaacctgcggagcacccacccccactttgtgcgctgcatcatccccaatgagaccaagagccctggggtgatggacaaccccctggtgatgcaccagctgcgctgcaatggagtgctggagggcatccgcatctgcaggaagggcttccccaaccgcatcctgtatggagacttccggcagcgctaccgcatcctgaacccagctgccatccctgagggccagttcatcgacagcaggaaaggagctgagaagctgctgagcagcctggacatcgaccacaaccagtacaagtttggccacaccaaggtgttcttcaaggccggcctgctgggcctgctggaggagatgagagatgagcggctgagccgcatcatcacccgcatccaggcccagagccggggcgtgctggccaggatggagtacaagaagctgctggagcggcgggacagcctgctggtgatccagtggaacatccgggccttcatgggcgtgaagaactggccctggatgaagctgtacttcaagatcaagcccctgctgaagtctgctgagcgggagaaggagatggcctccatgaaggaggagttcacccggctgaaggaggccctggagaagtctgaggcccggaggaaggagctggaggagaagatggtgtccctgctgcaggagaagaatgacctgcagctgcaggtgcaggccgagcaggacaacctggctgatgctgaggagcgctgtgaccagctgatcaagaacaagatccagctggaggccaaggtgaaggagatgaatgaaaggctggaggatgaggaggagatgaatgctgagctgacagccaagaagaggaagctggaggatgagtgcagcgagctgaagagggacattgatgacctggagctgaccctggccaaggtggagaaggagaagcacgccacagagaacaaggtgaagaacctgacagaggagatggccggcctggatgagatcatcgccaagctgaccaaggagaagaaggccctgcaggaggcccaccagcaggccctggatgacctgcaggccgaggaggacaaggtgaacaccctgaccaaggccaaggtgaagctggagcagcaggtggatgacctggagggcagcctggagcaggagaagaaggtgaggatggacctggagcgggccaagaggaagctggagggggacctgaagctgacccaggagagcatcatggacctggagaatgacaagcagcagctggatgagcggctgaagaagaaggactttgagctgaatgccctgaatgccagaattgaagatgagcaggccctgggcagccagctgcagaagaagctgaaggagctgcaggccagaattgaggagctggaggaggagctggaggccgagaggacagcccgggccaaggtggagaagctgcggagtgacctgagccgggagctggaggagatcagcgagcggctggaggaggccggcggggccacctctgtgcagatcgagatgaacaagaagcgggaggccgagttccagaagatgagaagagacctggaggaggccaccctgcagcacgaggccacagctgctgccctgaggaagaagcatgctgacagcgtggccgagctgggggagcagattgacaacctgcagagggtgaagcagaagctggagaaggagaagtctgagttcaagctggagctggatgatgccctgctgggcctgcccagcagcaacttcctgctgcccccacccctgagcgccaacctggagaagatgtgcaggaccctggaggaccagatgaatgagcacaggagcaaggccgaggagacccagaggtctgtgaatgacctgaccagccagagggccaagctgcagacagaaaatggagagctgagccggcagctggatgagaaggaggccctgatcagccagctgacccggggcaagctgacctacacccagcagctggaggacctgaagaggcagctggaggaggaggtgaaggccaagaatgccctggcccacgccctgcagagcgcccggcatgactgtgacctgctgcgggagcagtatgaggaggagacagaggccaaggccgagctgcagagggtgctgagcaaggccaacagcgaggtggcccagtggaggaccaagtatgaaacagatgccatccagaggacagaggagctggaggaggccaagaagaagctggcccagaggctgcaggaggccgaggaggccgtggaggccgtgaatgccaagtgcagcagcctggagaagaccaagcaccggctgcagaatgaaattgaggacctgatggtggatgtggagaggagcaatgctgctgctgctgccctggacaagaagcagaggaactttgacaagatcctggccgagtggaagcagaagtatgaggagagccagagcgagctggagagcagccagaaggaggcccggagcctgagcacagagctgttcaagctgaagaatgcctatgaggagagcctggagcacctggagaccttcaagcgggagaacaagaacctgcaggaggagatcagtgacctgacagagcagctgggcagcagcggcaagaccatccacgagctggagaaggtgaggaagcagctggaggccgagaagatggagctgcagagcgccctggaggaggccgaggccagcctggagcacgaggagggcaagatcctgcgggcccagctggagttcaaccagatcaaggccgagattgaaaggaagctggccgagaaggatgaggagatggagcaggccaagaggaaccacctgcgggtggtggacagcctgcagaccagcctggatgctgagaccaggagcagaaatgaggccctgcgggtgaagaagaagatggagggggacctgaatgagatggagatccagctgagccacgccaacaggatggctgctgaggcccagaagcaggtgaagagcctgcagagcctgctgaaggacacccagatccagctggatgatgctgtgcgggccaatgatgacctgaaggagaacatcgccatcgtggagaggaggaacaacctgctgcaggccgagctggaggagctgcgggctgtggtggagcagacagagaggagcaggaagctggccgagcaggagctgattgagaccagcgagcgggtgcagctgctgcacagccagaacaccagcctcatcaaccagaagaagaagatggatgctgacctgagccagctgcagacagaggtggaggaggccgtgcaggagtgcagaaatgctgaggagaaggccaagaaggccatcacagatgctgccatgatggccgaggagctgaagaaggagcaggacaccagcgcccacctggagaggatgaagaagaacatggagcagaccatcaaggacctgcagcaccggctggatgaagctgagcagatcgccctgaagggcggcaagaagcagctgcagaagctggaggcccgggtgcgggagctggagaatgagctggaggccgagcagaagagaaatgctgagagcgtgaagggcatgaggaagtctgagcggcgcatcaaggagctgacctaccagacagaggaggacaggaagaacctgctgcggctgcaggacctggtggacaagctgcagctgaaggtgaaggcctacaagaggcaggccgaggaggccgaggagcaggccaacaccaacctgagcaagttcaggaaggtgcagcacgagctggatgaagctgaggagagagctgacattgctgagagccaggtgaacaagctgcgggccaagagccgggacatcggcaccaagggcctgaatgaggagtag

SEQ ID NO: 5737 - DNA, 6087 bp, Artificial Sequence
  derived and/or modified sequence
gggggtgggggtgccctgctgccccatatatacagcccctgagaccaggtctggctccacagctctgtcctgctctgtgtctttccctgctgctctcaggtcccctgcaggccttggcccctttcctcatctgtagacacacttgagtagcccaggcacagccatgggagattcggagatggcagtctttggggctgccgccccctacctgcgcaagtcagagaaggagcggctagaagcgcagaccaggccttttgacctcaagaaggatgtcttcgtgcctgatgacaaacaggagtttgtcaaggccaagatcgtgtctcgagagggtggcaaagtcactgccgagaccgagtatggcaagacagtgaccgtgaaggaggaccaggtgatgcagcagaacccacccaagttcgacaaaatcgaggacatggccatgctgaccttcctgcatgagcccgcggtgctctacaacctcaaggatcgctacggctcctggatgatctacacctactcgggcctcttctgtgtcaccgtcaacccttacaagtggctgccggtgtacactcctgaggtggtggctgcctaccggggcaagaagaggagcgaggccccgccccacatcttctccatctccgacaacgcctatcagtacatgctgacagacagagaaaaccagtccatcctgatcaccggagaatccggagcagggaagacagtcaacaccaagagggtcatccagtactttgctgttattgcagccattggggaccgcagcaagaaggaccagagcccgggcaagggcaccctggaggaccagatcatccaggccaaccctgctctggaggcctttggcaatgccaagaccgtccggaacgacaactcctcccgcttcgggaaattcattcgaattcattttggggcaacaggaaagttggcatctgcagacatagagacctatcttctggaaaaatccagagttattttccagctgaaagcagagagagattatcacattttctaccaaatcctgtctaacaaaaagcctgagctgctggacatgctgctgatcaccaacaacccctacgattatgcattcatctcccaaggagagaccaccgtggcctccattgatgacgctgaggagctcatggccactgataacgcttttgatgtgctgggcttcacttcagaggagaaaaactccatgtataagctgacaggcgccatcatgcactttggaaacatgaagttcaagctgaagcagcgggaggagcaggcggagccagacggcactgaagaggctgacaagtctgcctacctcatggggctgaactcagccgacctgctcaaggggctgtgccaccctcgggtgaaagtgggcaatgagtacgtcaccaaggggcagaatgtccagcaggtgatatatgccactggggcactggccaaggcagtgtatgagaggatgttcaactggatggtgacgcgcatcaatgccaccctggagaccaagcagccacgccagtacttcataggagtcctggacatcgctggcttcgagatcttcgatttcaacagctttgagcagctctgcatcaacttcaccaacgagaagctgcagcagttcttcaaccaccacatgtttgtgctggagcaggaggagtacaagaaggagggcatcgagtggacattcattgactttggcatggacctgcaggcctgcattgacctcatcgagaagcccatgggcatcatgtccatcctggaagaggagtgcatgttccccaaggccaccgacatgaccttcaaggccaagctgtttgacaaccacctgggcaaatccgccaacttccagaagccacgcaatatcaaggggaagcctgaagcccacttctccctgatccactatgccggcatcgtggactacaacatcattggctggctgcagaagaacaaggatcctctcaatgagactgtcgtgggcttgtatcagaagtcttccctcaagctgctcagcaccctgtttgccaactatgctggggctgatgcgcctattgagaagggcaaaggcaaggccaagaaaggctcgtcctttcagactgtgtcagctctgcacagggaaaatctgaacaagctgatgaccaacttgcgctccacccatccccactttgtacgttgtatcatccctaatgagacaaagtctccaggggtgatggacaaccccctggtcatgcaccagctgcgctgcaatggtgtgctggagggcatccgcatctgcaggaaaggcttccccaaccgcatcctctacggggacttccggcagaggtatcgcatcctgaacccagcggccatccctgagggacagttcattgatagcaggaagggggcagagaagctgctcagctccctggacattgatcacaaccagtacaagtttggccacaccaaggtgttcttcaaggccgggctgctggggctgctggaggaaatgagggacgagaggctgagccgcatcatcacgcgtatccaggcccagtcccgaggtgtgctcgccagaatggagtacaaaaagctgctggaacgtagagactccctgctggtaatccagtggaacattcgggccttcatgggggtcaagaattggccctggatgaagctctacttcaagatcaagccgctgctgaagagtgcagaaagagagaaggagatggcctccatgaaggaggagttcacacgcctcaaagaggcgctagagaagtccgaggctcgccgcaaggagctggaggagaagatggtgtccctgctgcaggagaagaatgacctgcagctccaagtgcaggcggaacaagacaacctggcagatgctgaggagcgctgtgatcagctgatcaaaaacaagattcagctggaggccaaggtgaaggagatgaacgagaggctggaggatgaggaggagatgaatgctgagctcactgccaagaagcgcaagctggaagatgagtgctcagagctcaaaagggacatcgatgatctggagctgacactggccaaagtggagaaggagaaacacgcaacagagaacaaggtgaaaaacctgacagaggagatggctgggctggatgagatcattgccaagctgaccaaggagaagaaagctctgcaagaggcccaccaacaggctctggatgaccttcaggccgaggaggacaaggtcaacaccctgactaaggccaaagtcaagctggagcagcaagtggatgatctggaaggatccctggagcaagagaagaaggtgcgcatggacctggagcgagcgaagcggaagctggagggcgacctgaagctgacccaggagagcatcatggacctggagaatgacaagcagcagctggatgagcggctgaaaaaaaaagactttgagctgaatgctctcaacgcaaggattgaggatgaacaggccctcggcagccagctgcagaagaagctcaaggagcttcaggcacgcatcgaggagctggaggaggagctggaggccgagcgcaccgccagggctaaggtggagaagctgcgctcagacctgtctcgggagctggaggagatcagcgagcggctggaagaggccggcggggccacgtccgtgcagatcgagatgaacaagaagcgcgaggccgagttccagaagatgcggcgggacctggaggaggccacgctgcagcacgaggccactgccgcggccctgcgcaagaagcacgccgacagcgtggccgagctgggcgagcagatcgacaacctgcagcgggtgaagcagaagctggagaaggagaagagcgagttcaagctggagctggatgacgtcacctccaacatggagcagatcatcaaggccaaggctaacctggagaagatgtgccggaccttggaagaccagatgaatgagcaccggagcaaggcggaggagacccagcgttctgtcaacgacctcaccagccagcgggccaagttgcaaaccgagaatggtgagctgtcccggcagctggatgagaaggaggcactgatctcccagctgacccgaggcaagctcacctacacccagcagctggaggacctcaagaggcagctggaggaggaggttaaggcgaagaacgccctggcccacgcactgcagtcggcccggcatgactgcgacctgctgcgggagcagtacgaggaggagacggaggccaaggccgagctgcagcgcgtcctttccaaggccaactcggaggtggcccagtggaggaccaagtatgagacggacgccattcagcggactgaggagctcgaggaggccaagaagaagctggcccagcggctgcaggaagctgaggaggccgtggaggctgttaatgccaagtgctcctcgctggagaagaccaagcaccggctacagaatgagatcgaggacttgatggtggacgtagagcgctccaatgctgctgctgcagccctggacaagaagcagaggaacttcgacaagatcctggccgagtggaagcagaagtatgaggagtcgcagtcggagctggagtcctcgcagaaggaggctcgctccctcagcacagagctcttcaaactcaagaacgcctatgaggagtccctggaacatctggagaccttcaagcgggagaacaaaaacctgcaggaggagatctccgacttgactgagcagttgggttccagcggaaagactatccatgagctggagaaggtccgaaagcagctggaggccgagaagatggagctgcagtcagccctggaggaggccgaggcctccctggagcacgaggagggcaagatcctccgggcccagctggagttcaaccagatcaaggcagagatcgagcggaagctggcagagaaggacgaggagatggaacaggccaagcgcaaccacctgcgggtggtggactcgctgcagacctccctggacgcagagacacgcagccgcaacgaggccctgagggtgaagaagaagatggaaggagacctcaatgagatggagatccagctcagccacgccaaccgcatggccgccgaggcccagaagcaagtcaagagcctccagagcttgttgaaggacacccagattcagctggacgatgcagtccgtgccaacgacgacctgaaggagaacatcgccatcgtggagcggcgcaacaacctgctgcaggctgagctggaggagttgcgtgccgtggtggagcagacagagcggtcccggaagctggcggagcaggagctgattgagactagtgagcgggtgcagctgctgcattcccagaacaccagcctcatcaaccagaagaagaagatggatgctgacctgtcccagctccagactgaagtggaggaggcagtgcaggagtgcaggaatgctgaggagaaggccaagaaggccatcacggatgccgccatgatggcagaggagctgaagaaggagcaggacaccagcgcccacctggagcgcatgaagaagaacatggaacagaccattaaggacctgcagcaccggctggacgaagccgagcagatcgccctcaagggcggcaagaagcagctgcagaagctggaagcgcgggtgcgggagctggagaatgagctggaggccgagcagaagcgcaacgcagagtcggtgaagggcatgaggaagagcgagcggcgcatcaaggagctcacctaccagacggaggaggacaggaaaaacctgctgcggctgcaggacctggtagacaagctgcagctaaaggtcaaggcctacaagcgccaggccgaggaggcggaggagcaagccaacaccaacctgtccaagttccgcaaggtgcagcacgagctggatgaggcagaggagcgggcggacatcgccgagtcccaggtcaacaagctgcgggccaagagccgtgacattggcacgaagggcttgaatgaggagtagctttgccacatcttgatctgctcagccctggaggtgccagcaaagccccatgctggagcctgtgtaacagctccttgggaggaagcagaataaagcaattttccttgaagccgaga

SEQ ID NO: 5738 - DNA, 6042 bp, Artificial Sequence
  derived and/or modified sequence
cacagctctgtcctgctctgtgtctttccctgctgctctcaggtcccctgcaggccttggcccctttcctcatctgtagacacacttgagtagcccaggcacagccatgggagattcggagatggcagtctttggggctgccgccccctacctgcgcaagtcagagaaggagcggctagaagcgcagaccaggccttttgacctcaagaaggatgtcttcgtgcctgatgacaaacaggagtttgtcaaggccaagatcgtgtctcgagagggtggcaaagtcactgccgagaccgagtatggcaagacagtgaccgtgaaggaggaccaggtgatgcagcagaacccacccaagttcgacaaaatcgaggacatggccatgctgaccttcctgcatgagcccgcggtgctctacaacctcaaggatcgctacggctcctggatgatctacacctactcgggcctcttctgtgtcaccgtcaacccttacaagtggctgccggtgtacactcctgaggtggtggctgcctaccggggcaagaagaggagcgaggccccgccccacatcttctccatctccgacaacgcctatcagtacatgctgacagacagagaaaaccagtccatcctgatcaccggagaatccggagcagggaagacagtcaacaccaagagggtcatccagtactttgctgttattgcagccattggggaccgcagcaagaaggaccagagcccgggcaagggcaccctggaggaccagatcatccaggccaaccctgctctggaggcctttggcaatgccaagaccgtccggaacgacaactcctcccgcttcgggaaattcattcgaattcattttggggcaacaggaaagttggcatctgcagacatagagacctatcttctggaaaaatccagagttattttccagctgaaagcagagagagattatcacattttctaccaaatcctgtctaacaaaaagcctgagctgctggacatgctgctgatcaccaacaacccctacgattatgcattcatctcccaaggagagaccaccgtggcctccattgatgacgctgaggagctcatggccactgataacgcttttgatgtgctgggcttcacttcagaggagaaaaactccatgtataagctgacaggcgccatcatgcactttggaaacatgaagttcaagctgaagcagcgggaggagcaggcggagccagacggcactgaagaggctgacaagtctgcctacctcatggggctgaactcagccgacctgctcaaggggctgtgccaccctcgggtgaaagtgggcaatgagtacgtcaccaaggggcagaatgtccagcaggtgatatatgccactggggcactggccaaggcagtgtatgagaggatgttcaactggatggtgacgcgcatcaatgccaccctggagaccaagcagccacgccagtacttcataggagtcctggacatcgctggcttcgagatcttcgatttcaacagctttgagcagctctgcatcaacttcaccaacgagaagctgcagcagttcttcaaccaccacatgtttgtgctggagcaggaggagtacaagaaggagggcatcgagtggacattcattgactttggcatggacctgcaggcctgcattgacctcatcgagaagcccatgggcatcatgtccatcctggaagaggagtgcatgttccccaaggccaccgacatgaccttcaaggccaagctgtttgacaaccacctgggcaaatccgccaacttccagaagccacgcaatatcaaggggaagcctgaagcccacttctccctgatccactatgccggcatcgtggactacaacatcattggctggctgcagaagaacaaggatcctctcaatgagactgtcgtgggcttgtatcagaagtcttccctcaagctgctcagcaccctgtttgccaactatgctggggctgatgcgcctattgagaagggcaaaggcaaggccaagaaaggctcgtcctttcagactgtgtcagctctgcacagggaaaatctgaacaagctgatgaccaacttgcgctccacccatccccactttgtacgttgtatcatccctaatgagacaaagtctccaggggtgatggacaaccccctggtcatgcaccagctgcgctgcaatggtgtgctggagggcatccgcatctgcaggaaaggcttccccaaccgcatcctctacggggacttccggcagaggtatcgcatcctgaacccagcggccatccctgagggacagttcattgatagcaggaagggggcagagaagctgctcagctccctggacattgatcacaaccagtacaagtttggccacaccaaggtgttcttcaaggccgggctgctggggctgctggaggaaatgagggacgagaggctgagccgcatcatcacgcgtatccaggcccagtcccgaggtgtgctcgccagaatggagtacaaaaagctgctggaacgtagagactccctgctggtaatccagtggaacattcgggccttcatgggggtcaagaattggccctggatgaagctctacttcaagatcaagccgctgctgaagagtgcagaaagagagaaggagatggcctccatgaaggaggagttcacacgcctcaaagaggcgctagagaagtccgaggctcgccgcaaggagctggaggagaagatggtgtccctgctgcaggagaagaatgacctgcagctccaagtgcaggcggaacaagacaacctggcagatgctgaggagcgctgtgatcagctgatcaaaaacaagattcagctggaggccaaggtgaaggagatgaacgagaggctggaggatgaggaggagatgaatgctgagctcactgccaagaagcgcaagctggaagatgagtgctcagagctcaaaagggacatcgatgatctggagctgacactggccaaagtggagaaggagaaacacgcaacagagaacaaggtgaaaaacctgacagaggagatggctgggctggatgagatcattgccaagctgaccaaggagaagaaagctctgcaagaggcccaccaacaggctctggatgaccttcaggccgaggaggacaaggtcaacaccctgactaaggccaaagtcaagctggagcagcaagtggatgatctggaaggatccctggagcaagagaagaaggtgcgcatggacctggagcgagcgaagcggaagctggagggcgacctgaagctgacccaggagagcatcatggacctggagaatgacaagcagcagctggatgagcggctgaaaaaaaaagactttgagctgaatgctctcaacgcaaggattgaggatgaacaggccctcggcagccagctgcagaagaagctcaaggagcttcaggcacgcatcgaggagctggaggaggagctggaggccgagcgcaccgccagggctaaggtggagaagctgcgctcagacctgtctcgggagctggaggagatcagcgagcggctggaagaggccggcggggccacgtccgtgcagatcgagatgaacaagaagcgcgaggccgagttccagaagatgcggcgggacctggaggaggccacgctgcagcacgaggccactgccgcggccctgcgcaagaagcacgccgacagcgtggccgagctgggcgagcagatcgacaacctgcagcgggtgaagcagaagctggagaaggagaagagcgagttcaagctggagctggatgacgctctgctcggcctcccctcctccaacttcctcctcccacctcccctttctgctaacctggagaagatgtgccggaccttggaagaccagatgaatgagcaccggagcaaggcggaggagacccagcgttctgtcaacgacctcaccagccagcgggccaagttgcaaaccgagaatggtgagctgtcccggcagctggatgagaaggaggcactgatctcccagctgacccgaggcaagctcacctacacccagcagctggaggacctcaagaggcagctggaggaggaggttaaggcgaagaacgccctggcccacgcactgcagtcggcccggcatgactgcgacctgctgcgggagcagtacgaggaggagacggaggccaaggccgagctgcagcgcgtcctttccaaggccaactcggaggtggcccagtggaggaccaagtatgagacggacgccattcagcggactgaggagctcgaggaggccaagaagaagctggcccagcggctgcaggaagctgaggaggccgtggaggctgttaatgccaagtgctcctcgctggagaagaccaagcaccggctacagaatgagatcgaggacttgatggtggacgtagagcgctccaatgctgctgctgcagccctggacaagaagcagaggaacttcgacaagatcctggccgagtggaagcagaagtatgaggagtcgcagtcggagctggagtcctcgcagaaggaggctcgctccctcagcacagagctcttcaaactcaagaacgcctatgaggagtccctggaacatctggagaccttcaagcgggagaacaaaaacctgcaggaggagatctccgacttgactgagcagttgggttccagcggaaagactatccatgagctggagaaggtccgaaagcagctggaggccgagaagatggagctgcagtcagccctggaggaggccgaggcctccctggagcacgaggagggcaagatcctccgggcccagctggagttcaaccagatcaaggcagagatcgagcggaagctggcagagaaggacgaggagatggaacaggccaagcgcaaccacctgcgggtggtggactcgctgcagacctccctggacgcagagacacgcagccgcaacgaggccctgagggtgaagaagaagatggaaggagacctcaatgagatggagatccagctcagccacgccaaccgcatggccgccgaggcccagaagcaagtcaagagcctccagagcttgttgaaggacacccagattcagctggacgatgcagtccgtgccaacgacgacctgaaggagaacatcgccatcgtggagcggcgcaacaacctgctgcaggctgagctggaggagttgcgtgccgtggtggagcagacagagcggtcccggaagctggcggagcaggagctgattgagactagtgagcgggtgcagctgctgcattcccagaacaccagcctcatcaaccagaagaagaagatggatgctgacctgtcccagctccagactgaagtggaggaggcagtgcaggagtgcaggaatgctgaggagaaggccaagaaggccatcacggatgccgccatgatggcagaggagctgaagaaggagcaggacaccagcgcccacctggagcgcatgaagaagaacatggaacagaccattaaggacctgcagcaccggctggacgaagccgagcagatcgccctcaagggcggcaagaagcagctgcagaagctggaagcgcgggtgcgggagctggagaatgagctggaggccgagcagaagcgcaacgcagagtcggtgaagggcatgaggaagagcgagcggcgcatcaaggagctcacctaccagacggaggaggacaggaaaaacctgctgcggctgcaggacctggtagacaagctgcagctaaaggtcaaggcctacaagcgccaggccgaggaggcggaggagcaagccaacaccaacctgtccaagttccgcaaggtgcagcacgagctggatgaggcagaggagcgggcggacatcgccgagtcccaggtcaacaagctgcgggccaagagccgtgacattggcacgaagggcttgaatgaggagtagctttgccacatcttgatctgctcagccctggaggtgccagcaaagccccatgctggagcctgtgtaacagctccttgggaggaagcagaataaagcaattttccttgaagccg

SEQ ID NO: 5739 - DNA, 5808 bp, Artificial Sequence
  derived and/or modified sequence
atgggcgacagcgagatggccgtgttcggcgccgccgccccctacctaaggaaaagtgagaaggagcgtctggaagcacagacccgccctttcgatctgaagaaggatgtgttcgttccagacgacaagcaggaatttgtgaaagcaaagatagtgtccagggaaggtgggaaggtgactgccgaaaccgagtacggcaagactgtaaccgtgaaagaggatcaagtgatgcaacagaacccacctaagtttgacaagatagaagacatggctatgctgacctttctccatgagcctgccgttctctataacctaaaagacaggtacgggagttggatgatctatacatattccggtctcttctgcgtgacggtgaacccatacaagtggctgcctgtctacacacctgaggtagttgccgcttatcggggcaaaaaacgaagtgaggccccccctcacatcttctcgatttccgataacgcatatcaatacatgctcaccgaccgcgagaaccagtcgatcctgatcactggggaatcgggagctggcaagacagtcaatactaaacgggttattcaatacttcgcagtgatcgccgcgatcggcgatcggagcaagaaggatcaaagccccggaaaaggcactctggaagatcagatcatccaagccaatcctgccctcgaagcgtttggcaacgccaaaaccgtacggaatgacaatagtagccgcttcggcaaattcattcggatccatttcggagcaacaggtaagctagcatctgcggatatagagacttatctgctggagaagtctagagttatctttcagctgaaagccgaaagggattaccatatcttctatcagattctgtccaacaagaagcccgagctgctggacatgttattaatcacaaacaacccctatgactatgcctttattagtcagggtgagacaacagtggccagtatcgacgacgctgaggagctcatggccacagataacgcgtttgacgtgctgggcttcacctccgaggagaagaacagcatgtacaaactcactggggctataatgcatttcggaaacatgaagttcaaactcaaacagcgtgaggagcaggcagaacccgacggcacagaggaagcggataagagcgcttatttgatgggcctcaatagtgctgatctgctgaagggattgtgtcaccctcgagtgaaggttggcaacgagtatgttaccaaaggacagaacgtgcagcaggtgatctatgccacaggggctctagccaaggccgtgtacgagaggatgttcaactggatggtcactcgaatcaacgcaacactggagacaaaacagcctagacagtacttcatcggtgtgctggacatagccggattcgagatcttcgatttcaacagcttcgagcagctgtgtatcaattttacaaacgagaaactccagcaattcttcaatcaccacatgtttgtccttgagcaggaggagtacaaaaaagagggaatcgaatggaccttcattgacttcgggatggacctccaggcatgtatcgacctcattgaaaagcctatgggaatcatgagcattttggaagaggaatgtatgttccccaaggctactgacatgactttcaaggccaaactttttgacaaccatctgggtaaaagcgctaacttccagaagccacggaatattaagggcaagcctgaggcccacttcagccttatccattacgcaggcattgtggattataatataatcgggtggctgcagaagaataaggatcccctaaacgagaccgtggttggcctgtaccagaaaagttcgctcaagctcttaagcacccttttcgcaaattacgccggtgcggacgctccaatagaaaagggcaaaggcaaagccaagaagggaagtagcttccagaccgtgtctgcactgcacagagagaatctgaacaagctgatgaccaacctcaggagcacgcatccacactttgtacgctgcattattccaaatgagaccaaatcccccggcgttatggacaatcccctggtgatgcaccagctccgatgcaatggagtgctggaggggattagaatatgcaggaaaggcttccccaaccggattttatacggtgatttcagacagcgatatcgcattcttaaccctgcagcaatcccagagggacagtttattgactcacgaaagggtgcagagaagctgctcagctcattggacatagaccacaaccaatataagttcggccataccaaggtgttttttaaggctggactgctgggcctgctcgaagagatgcgggatgagagactgagtagaatcattactcgcatccaggcacagtcccggggtgtcctcgctaggatggagtacaagaagctcctggagcggcgtgatagtctgttagttattcaatggaatattagggcctttatgggagtgaaaaattggccatggatgaagctgtactttaagattaagcccctcctcaagtccgccgagcgagaaaaagaaatggcatccatgaaggaagaatttacaagattgaaggaagctctcgagaaatccgaagcaaggcggaaggagctcgaagagaaaatggttagcctgctgcaagaaaaaaatgatttacagctccaggttcaggctgaacaggataacctggctgacgctgaggagaggtgcgaccagctcataaagaacaaaatccagctggaagctaaagtcaaagagatgaatgaaagactggaggacgaggaagagatgaatgcagaattaacagccaagaagagaaagctcgaggatgagtgcagtgagttgaaaagggatattgatgaccttgaacttacactcgccaaggtggagaaggaaaaacacgcgaccgaaaacaaagttaagaacctaacagaagaaatggccggcctggatgaaatcatcgctaagctgacaaaggagaaaaaagctctccaagaagctcaccagcaggccctcgacgacctgcaggctgaagaggacaaagttaacacccttaccaaggctaaagtcaagctggagcagcaggtcgacgacctggaggggagcttggagcaggagaagaaagtgcggatggatcttgagcgagccaagcggaagttagaaggagatctcaagctaacccaggagtccattatggacctcgaaaatgacaaacagcagctcgatgagcgactgaagaaaaaagactttgagctcaacgctctcaacgctcgtattgaggatgagcaggctctgggctcacagcttcagaagaagctgaaagaattgcaggcaagaatcgaagagctggaggaggaactggaggccgaacgcacagcccgcgcaaaggtagaaaagcttcggtcggaccttagcagggagctagaagaaatatctgagaggctagaggaggctggtggcgctacaagtgtgcagattgaaatgaataagaagcgggaggcagagtttcaaaagatgcgccgggatctcgaggaggcaaccctccaacatgaggcaacagccgccgcacttagaaagaaacatgctgactctgttgctgagctgggagaacaaattgacaacctgcagcgtgtgaagcagaagttggagaaggagaagagcgaatttaagttggagctggacgacgttacatcaaatatggaacagataattaaagccaaggcaaacttggagaagatgtgccgcaccctggaagatcaaatgaatgagcaccgtagcaaggccgaggagactcagaggtccgtgaatgatctaacctcccagcgcgctaagttgcagaccgaaaacggagagctgtccaggcagctggatgagaaggaagcattgatttcacagctgacgagaggaaagctgacgtacacgcagcaactagaagatctcaaacgtcagctggaggaagaagtgaaggctaagaacgctctggcacacgcactgcagtccgcacgtcacgattgtgacctcctgagagagcagtacgaggaagaaacagaggccaaggctgagttacaacgcgtcctctcaaaggcaaatagcgaggtcgctcagtggagaacgaaatacgaaaccgatgccatccaacgcaccgaggagctggaagaggccaaaaagaaattggctcaacgccttcaagaagctgaggaggccgtcgaagcagtgaatgccaaatgttccagcctggagaagactaaacatcggctccagaatgagatcgaggatttgatggtggatgtggagcgatctaacgcagcagcagcggctcttgacaaaaaacaacgcaactttgacaaaatattggcagagtggaagcagaagtacgaagaatcgcagtctgaactcgagagctcacagaaggaagcacggagcctctctaccgagctttttaagctgaagaacgcctatgaagagtctttggaacatctagaaacatttaagcgggagaacaagaacctgcaggaggagatttctgacttgaccgagcagttgggtagcagcggtaagacaatccacgagttagagaaggtgagaaagcagttggaggcagagaaaatggagctgcagagcgcgcttgaggaggcagaagcttcattggaacacgaggaaggtaaaattttacgtgcgcagcttgagttcaaccagattaaggccgaaatcgaacgcaagctcgccgaaaaagacgaagaaatggagcaagccaaaagaaatcatttacgcgtggtggacagcctgcagacttctctggacgcagagactcgtagccgaaatgaggccttaagggttaagaagaaaatggaaggggacctgaatgaaatggaaatccagttgagccacgcgaatcgtatggcagcagaggcgcagaagcaagtgaagtcgttgcagtctctgctgaaggatacacaaatccagctcgatgatgccgtccgcgctaacgatgatctaaaagaaaacatcgcgatcgtcgagcgcaggaataacttgctccaagccgaattggaagagctcagggcagtggtggaacagacagagcgcagccggaagttagccgaacaggagcttatcgaaacctcagagcgcgtgcaacttcttcacagtcaaaacactagcctcattaatcagaagaaaaagatggatgcggatctgtcgcagctgcaaacagaggtagaggaggccgtgcaggaatgccggaacgctgaagagaaagcaaagaaagccatcaccgacgccgctatgatggcagaagagctgaaaaaagaacaggacacctctgcacacctagaacggatgaagaagaatatggagcaaacaattaaggacctccaacatcgactggacgaggccgaacagattgccctgaaaggagggaaaaaacagctccagaagttggaggcccgggttagggaattagagaatgaactcgaagctgaacagaaacggaatgcagagtcagtgaagggaatgcgcaagtcagaacgacgcatcaaggagctcacataccagaccgaggaagaccggaaaaatctgctccgattgcaggatctggtggacaagctgcaacttaaagttaaagcttataagcgacaagctgaagaggcggaggaacaagcaaataccaatctctcaaaattccggaaggttcaacatgaactcgacgaggccgaagagagggctgacatcgcggaaagccaagttaacaagctccgggccaaatctagagatataggaacaaaggggcttaatgaggaatag

SEQ ID NO: 5740 - DNA, 5823 bp, Artificial Sequence
  derived and/or modified sequence
atgggcgacagcgagatggccgtgttcggcgccgccgccccctaccttagaaagtccgagaaagagcggctggaagcccagaccagacccttcgacctcaagaaggatgtttttgtgcccgacgataagcaagagtttgtgaaagcgaaaattgtctcccgcgaggggggaaaggtgacggccgagactgagtatggcaaaacagttaccgtgaaggaggaccaggtgatgcaacagaaccccccgaaatttgacaagatcgaagatatggctatgctcacttttctgcacgaacccgccgttctctataacttaaaagatcgatatggatcgtggatgatctatacttactctggcttgttttgtgtgaccgtaaatccatataagtggctacccgtgtacaccccagaagtggttgcagcttatagaggtaagaagaggtctgaagcaccccctcacatcttctcaattagcgacaacgcataccaatatatgctaaccgatagggaaaatcagtcgatcctgatcaccggcgaaagcggcgccgggaaaaccgtgaataccaaaagggtgattcagtactttgcggtgatcgccgcgattggcgaccggtctaagaaagatcagtctccaggcaagggcacacttgaggaccaaatcatccaggctaatcccgcactggaagcatttggtaatgcgaaaactgtgagaaatgataacagctcacgcttcggaaaattcataagaatccactttggagccaccggaaagttggccagcgctgacattgaaacctatcttctggagaagtccagagtgatttttcagttgaaggctgagcgcgattatcacatattctaccaaattcttagcaacaaaaagcccgagctgctggacatgctgctgattaccaataatccatacgactacgcctttatctctcagggcgaaacaaccgtggctagcattgacgacgctgaagaacttatggccaccgacaatgcattcgatgtactgggattcacctccgaagagaagaattcgatgtacaagttgacaggcgctattatgcatttcggaaatatgaagttcaaactcaaacagagggaagaacaagcagaaccggatggcactgaggaggccgacaagtcagcataccttatggggctgaatagcgcagacctgctgaaggggttgtgtcaccccagggtgaaagttggaaacgagtatgttactaaagggcagaacgtgcagcaggttatctacgccacaggggcgctcgccaaagctgtgtacgaacggatgttcaattggatggtgacacgtatcaatgcaactttagaaacaaagcagccccgccagtattttatcggggttctagacatcgccggcttcgaaattttcgacttcaactcatttgagcagttatgtattaacttcacaaacgagaagctgcagcagttcttcaaccaccatatgttcgtgttagaacaggaagaatacaagaaggaaggaatcgaatggaccttcatcgacttcggaatggatctgcaggcgtgtattgatcttatcgagaaacccatggggatcatgagcatcctcgaggaggagtgtatgtttcctaaggccactgacatgactttcaaggctaaattattcgataaccacctaggaaagtctgccaattttcagaaaccccggaacatcaagggaaagccagaagctcatttttccttgatccactatgccgggattgtggattacaacattattggatggttacagaaaaataaggatcccctcaatgagaccgtggtgggtctgtatcagaagagcagcctcaagctgctcagtacactgttcgcaaattacgcaggggcagacgcaccaattgaaaaggggaaaggcaaggccaagaagggcagctcgttccagacggtgtcagcgctccatcgcgagaacctgaacaagctgatgacaaatctgcggtccacccacccccattttgttaggtgtattataccaaatgagactaagtcccctggggtgatggataacccactggtcatgcatcagttgcgttgtaacggcgttttggaggggatccggatctgcagaaagggcttcccgaaccggatcctgtacggcgacttcagacagcggtaccgcatcctaaatcctgcagctattccagaggggcaatttatcgactccaggaaaggagctgagaaactgctgtcatcgctggatatagaccacaaccaatacaaattcgggcataccaaagtttttttcaaagcaggcctgctgggattgttagaggaaatgcgggacgagcgactcagcagaataataacacggatccaagcacaatcgcgaggagtcctggccaggatggagtacaagaaactgctcgagcgcagagatagtttgttggtcattcagtggaacatccgcgctttcatgggcgtgaaaaactggccctggatgaagttgtatttcaagatcaagccgctgcttaaatctgccgagagggagaaagagatggcgagtatgaaagaggaattcacaaggcttaaggaagccctcgagaaatcggaggctcgacgcaaagaactcgaggaaaaaatggtgtccttactccaggagaaaaatgacctccaattgcaagtgcaggcagagcaggacaatctcgcagatgctgaggaacgctgtgaccagctaatcaagaacaagatacagctggaggctaaagttaaggagatgaatgaaagattagaagacgaagaggagatgaatgccgagctgaccgcgaagaagcgcaaactcgaagacgaatgctctgagctgaaaagggatatcgacgacttggagttaactctggccaaagtagagaaagagaaacatgcgaccgagaacaaggttaagaatctgactgaagagatggctgggctggatgagatcatcgccaaactgaccaaagagaagaaggctctgcaggaggctcatcagcaggccctggatgatctgcaagctgaagaagacaaggtgaacacactcaccaaggcaaaagtgaagctggagcagcaggtggatgacctggaaggatctctggaacaggagaaaaaggtacgcatggacttagagcgggccaagcgcaaacttgagggggatctgaagctgacacaggagtccataatggacctggagaatgataagcagcagctggacgaacggctgaaaaagaaagactttgaactgaacgccctgaatgctagaatcgaagacgagcaggctctgggttcccagctgcaaaagaagttgaaagaactgcaagcgcgcatcgaagaactggaggaagagttagaggcggagagaaccgcccgtgccaaagtggagaagttgcggtctgacttgtcacgtgagttggaggagatctcagagcggctggaagaggcagggggggccactagcgtgcagatcgagatgaataaaaagagagaggccgaatttcagaaaatgcggcgtgacctggaggaagctacattgcagcacgaggccaccgccgccgcacttcgcaaaaagcatgccgacagcgtggcagagctgggcgaacagatagataaccttcagagagtgaaacagaagctcgagaaagagaaaagtgagttcaaactggaactagatgacgcactgttgggactaccttcgagtaacttcctgcttccacccccactcagcgctaatctggaaaagatgtgtcgtaccctggaggatcagatgaacgagcaccggtcaaaggctgaggaaactcagaggtccgtaaatgatttaacgagtcagagagcaaagttgcagacagaaaacggcgaactgagccgccagcttgacgaaaaagaagcgcttatttcacagcttacgcggggcaaactcacgtatacccagcaactggaggatttgaagaggcagctggaagaggaggtcaaagccaagaatgcgttggctcacgcgctccagtctgcacgccacgattgtgacctgctacgtgagcagtacgaagaagagacggaagcaaaggctgaattacagcgcgtcctgagcaaggccaactccgaagtcgcacagtggaggacgaaatacgaaaccgatgctattcagagaactgaggagcttgaggaagccaagaaaaaactcgcccagagattgcaagaagccgaggaggccgtggaagctgttaatgctaaatgctcttccttggagaagacaaaacacaggctgcagaatgaaatagaggacctcatggttgacgtcgaacgatccaacgctgccgccgctgcactggacaagaaacagagaaactttgacaagatactggccgaatggaaacagaaatacgaggaatctcaatccgaactggaaagcagccaaaaggaggcacggtcccttagcactgaactctttaagctgaagaacgcctatgaagaaagcctcgagcacctcgaaacattcaagagggagaataagaacctccaggaggagatctcggatctcacagagcaactgggctcttcagggaagactatccacgagctcgaaaaagtcagaaaacagctcgaggcggagaagatggagcttcaatccgccctggaggaggctgaggcctcgctggagcatgaggaaggaaaaatattacgggcgcagctggaatttaaccagataaaggcagagatagaaagaaagcttgctgaaaaggacgaagagatggaacaggctaaacgtaatcatctgcgggtagttgactccctgcaaaccagccttgacgcagagacccggagtagaaacgaagctctacgtgtcaaaaagaagatggagggcgatctgaacgaaatggagatccaactgtcccacgccaataggatggctgctgaagcacagaaacaggtgaagagtctccagagcctgctgaaggatacccaaatacaactcgacgacgctgtgcgcgcaaacgacgacttgaaggaaaatatcgccatcgtggaacggagaaataatctgctgcaggcggaactcgaggaactgcgagcagtagtggaacaaacggaaagatccaggaaactggccgaacaggaattgattgagacctccgaaagggtgcagcttctgcattcacaaaacacttcgctcattaaccagaagaaaaagatggatgccgatctctcgcagttacagactgaggtggaggaggctgtgcaggaatgccggaacgctgaggagaaagcgaagaaggcaattaccgacgccgcaatgatggccgaggaactaaagaaggagcaagacacctccgctcacctcgagcggatgaagaaaaacatggaacaaactatcaaggatctgcagcatcgcctggacgaggccgagcagatagcattaaaagggggtaaaaaacagctgcaaaagttggaggctagggttcgtgaactggaaaatgaactcgaggccgagcagaagcgaaatgcggagtcggtgaaagggatgaggaagtctgaacggagaattaaagaactgacttatcagacagaagaagacaggaagaacctgctgcggctacaagacctggtggataaactacaacttaaagtgaaggcctataagagacaggcagaagaggccgaagagcaggccaacacgaatctgagtaagttcagaaaggtgcagcatgagctcgacgaggcagaggagcgagcagatatagccgagagtcaggtaaataagttgcgtgctaagagtcgtgacatcggcacaaagggccttaatgaggaatag

SEQ ID NO: 5741 - DNA, 5807 bp, Artificial Sequence
  derived and/or modified sequence
atgggtgactcggagatggccgtattcggggctgcagccccttacttgcgcaagtctgagaaggagaggctggaagctcaaacacggccttttgatttgaaaaaagacgtgttcgttcccgatgataagcaagagtttgtgaaagcgaaaatcgtgtcccgtgaggggggtaaagtgacagccgagactgagtatgggaaaaccgtgaccgtgaaagaggaccaggtcatgcaacagaatcccccaaagttcgataaaattgaggacatggctatgctgacttttctgcatgagccagcggtgttgtataacctcaaggaccggtacggcagctggatgatttatacttacagcggtctattttgtgtgacagtgaatccctataagtggttacctgtgtacacacccgaggtggtggctgcctacaggggtaaaaagcgcagcgaagccccaccacacatcttcagtatcagtgacaacgcatatcagtacatgcttacagaccgggaaaaccagtccatattgataacgggggaatccggtgccggaaaaactgtaaatactaagcgcgttattcaatactttgccgtgattgccgctattggcgacaggtccaagaaagatcagagccccggtaaaggtactctagaggaccagataatacaggccaatcccgctctcgaagcctttggtaacgctaaaaccgttcgcaacgataacagtagccggttcgggaagttcattcggattcactttggggctacagggaagttggcctcagctgacatagagacatatctgctggagaaaagtcgggtgatatttcagctgaaggccgaaagagattaccacatcttctaccagatcttatccaacaagaagcccgagctcctagatatgttgctgatcacaaacaatccctacgattatgcttttatctcacagggtgagactacagtggcatcaattgacgatgcagaggaactgatggcaactgacaatgcttttgatgtgctgggttttacatctgaagagaaaaatagcatgtacaaattgaccggagcgataatgcattttggtaatatgaagtttaagttaaaacagcgcgaagaacaagccgagccagatggcaccgaagaggctgataagtctgcctacctcatgggtctgaactcggcggatttgctcaaaggtttgtgccacccacgcgtgaaggtgggaaacgaatacgtgactaaaggtcagaatgtgcaacaggtgatctacgccactggggcacttgctaaggcagtatacgagaggatgttcaactggatggtgacccgcataaacgcaacattggaaaccaaacagccaagacagtactttatcggagtgttggacattgccggatttgagatcttcgatttcaattctttcgagcagctatgtattaacttcaccaacgagaaattacagcagttctttaaccatcatatgtttgtactggaacaggaagagtataaaaaggagggaattgagtggacattcatagatttcgggatggacctgcaagcttgcatcgacctgatcgagaaacccatgggcatcatgtccattctggaagaagaatgcatgttcccaaaagccactgatatgacctttaaagccaaactgttcgataatcacctggggaaatccgctaattttcagaagccgaggaacatcaaaggcaagcctgaagcacacttctcccttatccattatgcagggattgtggactataacatcatcggatggctccagaagaacaaggacccactgaacgaaaccgtggttggactttatcagaagagcagtctgaaactgttatcgaccctcttcgcaaattatgctggcgctgacgccccaatcgagaaaggaaagggaaaggccaaaaagggcagtagctttcagacggtgagtgcacttcatagagaaaacctgaataaattaatgacaaacctcagatctacccatccacacttcgtgcgctgtataatcccaaatgagacaaagagtcccggtgtcatggacaaccctctggttatgcatcagcttagatgtaacggcgtcttagaggggatccgaatttgtcgaaagggcttcccgaatcgcattctctacggcgacttcaggcagcgttatcgcattttaaatccagctgccattcctgaagggcagttcattgatagccgcaagggagcagaaaaactgctgtcctcactagatatcgatcataatcagtacaaattcggccacactaaagtgttttttaaagcaggattattgggcctcctggaagagatgcgcgacgaaagactgagccgcatcatcacaagaatacaggcccagagcaggggcgtgcttgcaagaatggaatacaagaaactcctggagagacgcgatagcctgctggtgattcagtggaacataagggccttcatgggtgtcaagaattggccatggatgaagctatactttaagattaagcctcttctcaaatctgctgagcgggagaaagagatggctagcatgaaggaggagtttaccaggctcaaagaggccctggagaagtccgaagctcgtaggaaggagcttgaggagaagatggtctccctcctgcaggagaagaatgatttacaattgcaggtgcaggctgaacaggacaatctggcagacgccgaggagcgttgcgaccagctcatcaagaataagatccaattggaggccaaggttaaagagatgaacgaacgattagaagatgaggaggaaatgaacgcagagcttaccgctaagaaaagaaagctggaggacgagtgtagcgaactgaaacgggacattgacgacttggaactgacactggcgaaagtcgagaaggagaaacacgccacagaaaataaagtgaagaatctcaccgaggagatggccggactcgacgagatcatcgctaagttaactaaagagaagaaggccctccaggaggctcaccagcaagcattggatgatctccaggcagaggaggacaaggtaaatactctgacaaaagcgaaggtcaaactggagcagcaagtggacgatttagagggctccttggagcaggagaaaaaggtgcgcatggatcttgaacgggcaaagcggaagttggagggtgacctcaagctgacccaggaaagcatcatggatctggaaaatgacaaacagcagctcgacgagcgcctgaagaagaaggacttcgagctcaacgccttaaacgcccgaatagaggacgaacaggccctgggatcccagctgcagaagaagctcaaagaactgcaagctcggattgaggagctggaggaggaactcgaagctgagagaacagcccgtgcaaaggtggaaaaactccgtagtgacctgagtagagagctggaggaaatctctgaacgcctcgaagaagcaggtggtgcaacctcggttcagatcgagatgaacaagaagcgcgaggcggagttccaaaagatgcgaagagatctcgaggaggccactctgcagcatgaagcaacggctgccgcactgcgtaagaaacatgccgacagcgtggcagaattgggagaacagattgataatttgcagcgggtgaagcagaaactagaaaaggagaaatcagaatttaaacttgaactggatgatgtcacaagcaatatggagcagatcattaaggcaaaagctaatcttgaaaagatgtgccggaccctggaagaccagatgaatgagcaccggagcaaagccgaagaaacacagcggagcgtcaacgacctaacgagccagcgggctaaacttcaaactgagaacggggaattgagccgacaattggacgaaaaagaggctctgatcagtcagctgacaagaggcaagctgacttacacgcagcagctggaggatctcaagaggcagcttgaggaggaggttaaagctaagaacgcattagcccatgccctccaaagtgccagacacgactgcgatctactaagagagcagtacgaggaggagacagaggcgaaagccgaactccaaagggttctgagtaaggcgaactcagaggtggcccagtggagaactaaatatgaaactgatgcgattcagcggaccgaggaacttgaggaagcaaagaaaaaactcgcacagcgactgcaggaggcggaagaggccgtagaagctgtgaacgccaaatgctcctctctggaaaaaactaaacacagattgcagaatgaaattgaggacttgatggtcgacgtggaaaggtccaatgccgcagccgctgccctcgataagaaacagcggaatttcgataaaattctggccgagtggaagcagaagtacgaagagagtcagtctgagctagaaagctcccaaaaggaagcacgatcgctatccaccgaactgttcaagctgaagaacgcttacgaagagagcctggaacatctggagaccttcaaacgcgagaataaaaatttacaggaggaaataagcgacctgactgagcagctgggaagctcaggtaagacgatccacgaactggagaaggtgcgtaagcagctggaagctgagaaaatggaattgcagtccgccctcgaggaagcagaggctagtctggagcacgaggaagggaagatactccgggctcaattggagttcaatcagatcaaggctgagatcgagcgtaagcttgctgaaaaggacgaggagatggaacaggccaaaaggaaccatctacgtgtggtggactccttacagaccagcctggacgcagaaactagatcacgcaatgaagcccttagagtcaagaaaaaaatggaaggggacttaaatgagatggaaatccagcttagccacgccaacagaatggcggcagaagcccagaagcaggttaaatctctccagagcctgttaaaggatactcagatccagctggacgatgcagtgagggctaacgatgacttgaaggagaacatcgcaatcgtggagaggcggaacaacctgctacaggcggagctggaggaactgcgcgctgttgtagaacagactgaacgcagtcgcaaactcgcggaacaggagttgatcgagactagcgaacgtgtgcagcttctccatagccagaacaccagcctgatcaatcagaagaagaagatggacgccgacctgtctcagctacagacagaagtcgaagaagcggtccaggaatgcagaaacgccgaagaaaaagcaaagaaggcgatcaccgacgcggcaatgatggctgaagagcttaaaaaggagcaggacacctcagcacacctggagcgcatgaagaaaaatatggagcagaccattaaggaccttcagcacaggttggacgaggcagagcagatcgctctgaaaggcggtaagaagcagctacagaaacttgaagctagagtcagggagctggaaaacgagctcgaagccgaacagaagcgcaacgcggagagcgtaaaaggtatgcgaaaaagcgagagaagaatcaaggagttgacttatcagacagaggaagatcggaagaatctgctccgcctccaagacctagttgacaaactgcagcttaaggtgaaggcctacaaaagacaggccgaagaagcagaggagcaggcaaatacaaatttgtccaagttccggaaggtacagcatgaattggacgaagccgaggagcgagcggatatcgccgagtcccaggtgaataaactgcgggcaaagtctcgggatattggcaccaaagggcttaatgaagaata

SEQ ID NO: 5742 - DNA, 5822 bp, Artificial Sequence
  derived and/or modified sequence
atgggtgactctgaaatggcagtgtttggcgctgccgcaccgtatctgcggaagagtgaaaaagagcggttggaggcgcagaccaggccattcgacctcaaaaaggacgtctttgtgcctgatgacaagcaggagtttgttaaagccaagatcgtatctagggaaggaggtaaggtcaccgctgaaactgaatatggaaaaacggtgacagtcaaggaggaccaggtgatgcagcagaaccccccaaaatttgataagatcgaagacatggctatgctaacctttctgcacgaacccgctgtgctgtacaatttgaaagatagatatggatcatggatgatttacacctactccggacttttctgcgtaacagtgaacccatacaaatggcttccagtgtacactcccgaggtggtcgccgcatatcgagggaaaaagcggtctgaggcaccccctcatatcttttctattagcgacaatgcctaccagtacatgttaacagatagagaaaaccagtccatattgattacgggcgagtctggcgctggcaagacagtgaatactaaacgagtgatccaatattttgccgtcatcgctgccatcggagacagatccaagaaagaccagagtcccggaaagggcacattggaagatcagataattcaggcgaatcccgctctggaagcattcgggaatgcgaagacagtgcggaatgataacagttcacggttcggcaagtttattcgaattcactttggtgccactgggaaattagcctcggctgatatagagacttatctcctcgagaagagccgggtgatctttcaactgaaagctgagagggattatcacatcttttaccaaatcctttctaataaaaaacctgagcttttggatatgctccttatcaccaataacccttacgactatgcttttataagccagggagagaccaccgttgcctccatcgacgacgcagaggagctgatggccaccgacaatgcttttgatgtcctcgggttcaccagcgaagagaaaaacagtatgtataagttgactggcgcaattatgcatttcggcaacatgaaatttaagctgaaacagagagaggaacaggcagagccagatggaaccgaagaagctgataagtccgcatatctgatgggactcaatagcgccgatttgttaaaaggtctgtgccaccccagggtcaaggtcggtaacgaatacgtgaccaagggccagaatgtgcagcaggtcatttatgctacaggggcactcgcaaaagctgtgtacgagaggatgttcaactggatggttacccgaattaatgccacattggaaactaagcagccacgccagtacttcatcggcgtgcttgacatcgccggattcgagattttcgactttaattcatttgaacagctgtgcattaactttacaaatgagaagttacaacagttctttaatcaccacatgttcgtgcttgaacaggaggagtacaagaaagagggcattgaatggacatttatcgattttgggatggatctgcaggcttgtatagatctcatcgaaaaacctatgggcattatgtcaatccttgaggaagaatgtatgtttcccaaggccacagatatgacattcaaggctaagcttttcgataatcatctaggcaagagtgcaaattttcagaagcctcgaaacataaagggcaaacccgaggcccacttctccctgatccactatgctggaatcgtcgactataatataatcggatggctgcagaaaaataaagatcccttaaatgagactgtggtgggcttgtaccagaagagtagtctgaagcttctgtccaccctcttcgccaattacgctggggctgatgcgcctattgagaaaggaaaagggaaagccaaaaaaggaagctcttttcagactgtgtcggccctgcatagagagaatctgaataagttgatgactaatttacggagtacacacccccacttcgtgcggtgcattatccctaatgagaccaagtcacctggcgttatggataatcccctcgttatgcatcagctccggtgtaacggcgtgctcgaggggatcagaatctgccgaaaaggatttcctaataggattctctatggggatttccggcagagatacaggatcttgaatcccgctgccatccctgaggggcaattcattgacagccggaagggcgcagaaaaactgttaagcagtctggatatagatcataaccagtacaagttcgggcacactaaagtctttttcaaggctgggcttctcgggctactggaagagatgagagacgaaaggctgagcagaatcattacgcgaatacaggctcagtctagaggtgttttagccagaatggaatacaaaaaactgctcgagagacgcgattcactgctggtgatccaatggaatatccgtgcctttatgggagttaaaaattggccatggatgaaactctactttaagataaagccgctcctaaagtccgctgagagagaaaaggagatggcatctatgaaggaagaatttacccgactcaaagaggccctggagaaatcagaagccaggagaaaagagctggaggagaagatggtgagtctgctccaggagaaaaatgatttgcagcttcaggtacaggctgaacaggacaacctggcggatgccgaggagcgctgcgatcagctcataaagaataagatacaactggaagcgaaagtgaaagagatgaacgagcggctcgaggacgaggaagagatgaatgcggagctcacagccaaaaaacgcaagcttgaggatgagtgcagtgaattgaagcgggatatcgacgaccttgagctgacacttgccaaggtggagaaggagaaacatgccacagaaaataaagtcaaaaatcttactgaagaaatggcaggccttgatgaaatcatcgccaaactgactaaagagaagaaagctttacaagaggcccaccagcaggccctggacgatctacaggctgaggaagacaaagtgaacaccttgaccaaggccaaggtgaaactcgaacagcaggtagatgacttggaaggatctctcgagcaggagaaaaaagtcaggatggacttagaaagagcaaagcgcaaattggagggtgacttgaaactcacccaggagtctattatggacttggaaaatgacaagcaacagttggacgaacggctgaaaaaaaaagactttgaactcaatgccctcaacgcgcgtatcgaagacgagcaggctcttggttcacaactgcagaaaaagttgaaggaattacaagccagaatcgaggagttggaagaggagctcgaggccgagcggaccgcaagagcaaaggtagagaagctcagatctgacctctcccgcgagttggaggagatcagtgagagactggaagaagccggaggtgccacgagcgtgcagattgagatgaataagaagcgtgaagccgaattccaaaaaatgaggcgcgatctggaggaagccaccctgcagcatgaggcaactgccgcagctctgcgcaaaaaacacgctgattctgtggcagagcttggagagcagattgacaatctgcagagggtgaagcaaaagctggaaaaagagaaaagcgaattcaagctggaactagacgacgcactgctcgggctcccgagttccaattttttgttgcccccacccctgtctgctaacctcgagaaaatgtgtcgaacgttggaggatcaaatgaacgaacacaggtccaaggctgaggagacccagaggagtgtcaatgacctgacgagtcagcgggcaaagctgcagactgaaaatggcgaactgagtcgccagctggacgaaaaggaggcccttattagccagctaactcgcggtaagctgacatacacacagcaactcgaagatctgaagcgccagctggaggaggaagttaaagccaaaaacgctcttgcccatgccttacagagcgccagacacgactgtgatctccttagggaacagtacgaggaagaaaccgaagctaaggccgaactgcagcgggtgctgtcgaaggcaaatagcgaggtcgctcaatggaggactaaatacgagacggatgctatccaaagaacggaggaactggaagaagccaaaaaaaagctggcccagcgactgcaagaggcagaggaagccgtggaggccgtgaatgctaagtgcagctcgctggaaaagacaaagcatagactccagaacgagatcgaggacctgatggtggacgtagagaggagcaatgccgctgccgctgctctggataaaaaacagcgcaatttcgacaaaatcctcgctgagtggaagcagaaatacgaggagagtcagtccgaactggagtcgtcacagaaggaagcgcgatccctatcaaccgaattattcaagctgaagaacgcgtacgaggagtccttggaacacctggaaactttcaagcgtgagaataaaaatttacaggaggaaatctccgacctgacagaacagctggggagttcagggaaaactattcacgaactagagaaggtaagaaagcaactggaagcagagaagatggaattgcagtctgccttagaggaggccgaggcttctctggaacatgaggaaggcaagatcctccgcgctcagctggaatttaaccaaattaaggcagaaatcgagaggaagctggccgaaaaagacgaggagatggagcaagctaaacggaatcatctgagagttgtcgacagtctgcagacgagcctagatgcagaaacgcggtccaggaatgaggctcttcgggttaagaagaagatggagggggatctcaatgaaatggagatccagctgtcccacgccaacaggatggctgccgaggcccaaaagcaggtaaaaagtctccagtcccttcttaaggacactcaaatccagctagatgatgccgtccgcgctaatgacgacctcaaagaaaatatcgccatcgtggaaagaagaaacaatctccttcaggcagagttggaggaactgagagctgtggtggagcagaccgagagaagtaggaagctagctgaacaagaactgattgagacgagcgaacgagtgcagcttctgcactctcagaacacgtccttgattaaccagaaaaaaaagatggacgcagacctgtcccagctgcaaacggaagtggaagaggctgtgcaggagtgcagaaacgctgaagagaaggccaaaaaggccatcacagatgctgcgatgatggctgaggaacttaaaaaggagcaggacacgtctgcgcacctggaaagaatgaagaagaacatggaacagacgatcaaggaccttcagcatcggctggacgaggcagagcagatcgctttgaagggaggcaagaagcaactacagaaactggaggcccgagtcagggagttggagaacgaactggaggctgaacaaaaaaggaatgctgaaagcgtgaagggcatgaggaaatccgagagaaggataaaagaactgacttaccagactgaggaggatagaaaaaacctgctgaggctgcaggacctcgtggataagctgcagcttaaggtgaaagcttacaaaaggcaggccgaggaggcagaagagcaggcgaatactaacttatccaaatttcggaaggttcagcacgaattagatgaagccgaagaacgggcagacatcgccgagtcccaggtcaataagctgagggcaaaatcccgggatataggcacaaaaggtctgaatgaggagta

SEQ ID NO: 5743 - DNA, 5808 bp, Artificial Sequence
  derived and/or modified sequence
atgggcgacagcgagatggccgtgttcggcgccgccgccccctacctgagaaagagcgagaaggagagactggaggcccagaccagacccttcgacctgaagaaggacgtgttcgtgcccgacgacaagcaggagttcgtgaaggccaagatcgtgagcagagagggcggcaaggtgaccgccgagaccgagtacggcaagaccgtgaccgtgaaggaggaccaggtgatgcagcagaacccccccaagttcgacaagatcgaggacatggccatgctgaccttcctgcacgagcccgccgtgctgtacaacctgaaggacagatacggcagctggatgatctacacctacagcggcctgttctgcgtgaccgtgaacccctacaagtggctgcccgtgtacacccccgaggtggtggccgcctacagaggcaagaagagaagcgaggcccccccccacatcttcagcatcagcgacaacgcctaccagtacatgctgaccgacagagagaaccagagcatcctgatcaccggcgagagcggcgccggcaagaccgtgaacaccaagagagtgatccagtacttcgccgtgatcgccgccatcggcgacagaagcaagaaggaccagagccccggcaagggcaccctggaggaccagatcatccaggccaaccccgccctggaggccttcggcaacgccaagaccgtgagaaacgacaacagcagcagattcggcaagttcatcagaatccacttcggcgccaccggcaagctggccagcgccgacatcgagacctacctgctggagaagagcagagtgatcttccagctgaaggccgagagagactaccacatcttctaccagatcctgagcaacaagaagcccgagctgctggacatgctgctgatcaccaacaacccctacgactacgccttcatcagccagggcgagaccaccgtggccagcatcgacgacgccgaggagctgatggccaccgacaacgccttcgacgtgctgggcttcaccagcgaggagaagaacagcatgtacaagctgaccggcgccatcatgcacttcggcaacatgaagttcaagctgaagcagagagaggagcaggccgagcccgacggcaccgaggaggccgacaagagcgcctacctgatgggcctgaacagcgccgacctgctgaagggcctgtgccaccccagagtgaaggtgggcaacgagtacgtgaccaagggccagaacgtgcagcaggtgatctacgccaccggcgccctggccaaggccgtgtacgagagaatgttcaactggatggtgaccagaatcaacgccaccctggagaccaagcagcccagacagtacttcatcggcgtgctggacatcgccggcttcgagatcttcgacttcaacagcttcgagcagctgtgcatcaacttcaccaacgagaagctgcagcagttcttcaaccaccacatgttcgtgctggagcaggaggagtacaagaaggagggcatcgagtggaccttcatcgacttcggcatggacctgcaggcctgcatcgacctgatcgagaagcccatgggcatcatgagcatcctggaggaggagtgcatgttccccaaggccaccgacatgaccttcaaggccaagctgttcgacaaccacctgggcaagagcgccaacttccagaagcccagaaacatcaagggcaagcccgaggcccacttcagcctgatccactacgccggcatcgtggactacaacatcatcggctggctgcagaagaacaaggaccccctgaacgagaccgtggtgggcctgtaccagaagagcagcctgaagctgctgagcaccctgttcgccaactacgccggcgccgacgcccccatcgagaagggcaagggcaaggccaagaagggcagcagcttccagaccgtgagcgccctgcacagagagaacctgaacaagctgatgaccaacctgagaagcacccacccccacttcgtgagatgcatcatccccaacgagaccaagagccccggcgtgatggacaaccccctggtgatgcaccagctgagatgcaacggcgtgctggagggcatcagaatctgcagaaagggcttccccaacagaatcctgtacggcgacttcagacagagatacagaatcctgaaccccgccgccatccccgagggccagttcatcgacagcagaaagggcgccgagaagctgctgagcagcctggacatcgaccacaaccagtacaagttcggccacaccaaggtgttcttcaaggccggcctgctgggcctgctggaggagatgagagacgagagactgagcagaatcatcaccagaatccaggcccagagcagaggcgtgctggccagaatggagtacaagaagctgctggagagaagagacagcctgctggtgatccagtggaacatcagagccttcatgggcgtgaagaactggccctggatgaagctgtacttcaagatcaagcccctgctgaagagcgccgagagagagaaggagatggccagcatgaaggaggagttcaccagactgaaggaggccctggagaagagcgaggccagaagaaaggagctggaggagaagatggtgagcctgctgcaggagaagaacgacctgcagctgcaggtgcaggccgagcaggacaacctggccgacgccgaggagagatgcgaccagctgatcaagaacaagatccagctggaggccaaggtgaaggagatgaacgagagactggaggacgaggaggagatgaacgccgagctgaccgccaagaagagaaagctggaggacgagtgcagcgagctgaagagagacatcgacgacctggagctgaccctggccaaggtggagaaggagaagcacgccaccgagaacaaggtgaagaacctgaccgaggagatggccggcctggacgagatcatcgccaagctgaccaaggagaagaaggccctgcaggaggcccaccagcaggccctggacgacctgcaggccgaggaggacaaggtgaacaccctgaccaaggccaaggtgaagctggagcagcaggtggacgacctggagggcagcctggagcaggagaagaaggtgagaatggacctggagagagccaagagaaagctggagggcgacctgaagctgacccaggagagcatcatggacctggagaacgacaagcagcagctggacgagagactgaagaagaaggacttcgagctgaacgccctgaacgccagaatcgaggacgagcaggccctgggcagccagctgcagaagaagctgaaggagctgcaggccagaatcgaggagctggaggaggagctggaggccgagagaaccgccagagccaaggtggagaagctgagaagcgacctgagcagagagctggaggagatcagcgagagactggaggaggccggcggcgccaccagcgtgcagatcgagatgaacaagaagagagaggccgagttccagaagatgagaagagacctggaggaggccaccctgcagcacgaggccaccgccgccgccctgagaaagaagcacgccgacagcgtggccgagctgggcgagcagatcgacaacctgcagagagtgaagcagaagctggagaaggagaagagcgagttcaagctggagctggacgacgtgaccagcaacatggagcagatcatcaaggccaaggccaacctggagaagatgtgcagaaccctggaggaccagatgaacgagcacagaagcaaggccgaggagacccagagaagcgtgaacgacctgaccagccagagagccaagctgcagaccgagaacggcgagctgagcagacagctggacgagaaggaggccctgatcagccagctgaccagaggcaagctgacctacacccagcagctggaggacctgaagagacagctggaggaggaggtgaaggccaagaacgccctggcccacgccctgcagagcgccagacacgactgcgacctgctgagagagcagtacgaggaggagaccgaggccaaggccgagctgcagagagtgctgagcaaggccaacagcgaggtggcccagtggagaaccaagtacgagaccgacgccatccagagaaccgaggagctggaggaggccaagaagaagctggcccagagactgcaggaggccgaggaggccgtggaggccgtgaacgccaagtgcagcagcctggagaagaccaagcacagactgcagaacgagatcgaggacctgatggtggacgtggagagaagcaacgccgccgccgccgccctggacaagaagcagagaaacttcgacaagatcctggccgagtggaagcagaagtacgaggagagccagagcgagctggagagcagccagaaggaggccagaagcctgagcaccgagctgttcaagctgaagaacgcctacgaggagagcctggagcacctggagaccttcaagagagagaacaagaacctgcaggaggagatcagcgacctgaccgagcagctgggcagcagcggcaagaccatccacgagctggagaaggtgagaaagcagctggaggccgagaagatggagctgcagagcgccctggaggaggccgaggccagcctggagcacgaggagggcaagatcctgagagcccagctggagttcaaccagatcaaggccgagatcgagagaaagctggccgagaaggacgaggagatggagcaggccaagagaaaccacctgagagtggtggacagcctgcagaccagcctggacgccgagaccagaagcagaaacgaggccctgagagtgaagaagaagatggagggcgacctgaacgagatggagatccagctgagccacgccaacagaatggccgccgaggcccagaagcaggtgaagagcctgcagagcctgctgaaggacacccagatccagctggacgacgccgtgagagccaacgacgacctgaaggagaacatcgccatcgtggagagaagaaacaacctgctgcaggccgagctggaggagctgagagccgtggtggagcagaccgagagaagcagaaagctggccgagcaggagctgatcgagaccagcgagagagtgcagctgctgcacagccagaacaccagcctgatcaaccagaagaagaagatggacgccgacctgagccagctgcagaccgaggtggaggaggccgtgcaggagtgcagaaacgccgaggagaaggccaagaaggccatcaccgacgccgccatgatggccgaggagctgaagaaggagcaggacaccagcgcccacctggagagaatgaagaagaacatggagcagaccatcaaggacctgcagcacagactggacgaggccgagcagatcgccctgaagggcggcaagaagcagctgcagaagctggaggccagagtgagagagctggagaacgagctggaggccgagcagaagagaaacgccgagagcgtgaagggcatgagaaagagcgagagaagaatcaaggagctgacctaccagaccgaggaggacagaaagaacctgctgagactgcaggacctggtggacaagctgcagctgaaggtgaaggcctacaagagacaggccgaggaggccgaggagcaggccaacaccaacctgagcaagttcagaaaggtgcagcacgagctggacgaggccgaggagagagccgacatcgccgagagccaggtgaacaagctgagagccaagagcagagacatcggcaccaagggcctgaacgaggagtag

SEQ ID NO: 5744 - DNA, 5823 bp, Artificial Sequence
  derived and/or modified sequence
atgggcgacagcgagatggccgtgttcggcgccgccgccccctacctgagaaagagcgagaaggagagactggaggcccagaccagacccttcgacctgaagaaggacgtgttcgtgcccgacgacaagcaggagttcgtgaaggccaagatcgtgagcagagagggcggcaaggtgaccgccgagaccgagtacggcaagaccgtgaccgtgaaggaggaccaggtgatgcagcagaacccccccaagttcgacaagatcgaggacatggccatgctgaccttcctgcacgagcccgccgtgctgtacaacctgaaggacagatacggcagctggatgatctacacctacagcggcctgttctgcgtgaccgtgaacccctacaagtggctgcccgtgtacacccccgaggtggtggccgcctacagaggcaagaagagaagcgaggcccccccccacatcttcagcatcagcgacaacgcctaccagtacatgctgaccgacagagagaaccagagcatcctgatcaccggcgagagcggcgccggcaagaccgtgaacaccaagagagtgatccagtacttcgccgtgatcgccgccatcggcgacagaagcaagaaggaccagagccccggcaagggcaccctggaggaccagatcatccaggccaaccccgccctggaggccttcggcaacgccaagaccgtgagaaacgacaacagcagcagattcggcaagttcatcagaatccacttcggcgccaccggcaagctggccagcgccgacatcgagacctacctgctggagaagagcagagtgatcttccagctgaaggccgagagagactaccacatcttctaccagatcctgagcaacaagaagcccgagctgctggacatgctgctgatcaccaacaacccctacgactacgccttcatcagccagggcgagaccaccgtggccagcatcgacgacgccgaggagctgatggccaccgacaacgccttcgacgtgctgggcttcaccagcgaggagaagaacagcatgtacaagctgaccggcgccatcatgcacttcggcaacatgaagttcaagctgaagcagagagaggagcaggccgagcccgacggcaccgaggaggccgacaagagcgcctacctgatgggcctgaacagcgccgacctgctgaagggcctgtgccaccccagagtgaaggtgggcaacgagtacgtgaccaagggccagaacgtgcagcaggtgatctacgccaccggcgccctggccaaggccgtgtacgagagaatgttcaactggatggtgaccagaatcaacgccaccctggagaccaagcagcccagacagtacttcatcggcgtgctggacatcgccggcttcgagatcttcgacttcaacagcttcgagcagctgtgcatcaacttcaccaacgagaagctgcagcagttcttcaaccaccacatgttcgtgctggagcaggaggagtacaagaaggagggcatcgagtggaccttcatcgacttcggcatggacctgcaggcctgcatcgacctgatcgagaagcccatgggcatcatgagcatcctggaggaggagtgcatgttccccaaggccaccgacatgaccttcaaggccaagctgttcgacaaccacctgggcaagagcgccaacttccagaagcccagaaacatcaagggcaagcccgaggcccacttcagcctgatccactacgccggcatcgtggactacaacatcatcggctggctgcagaagaacaaggaccccctgaacgagaccgtggtgggcctgtaccagaagagcagcctgaagctgctgagcaccctgttcgccaactacgccggcgccgacgcccccatcgagaagggcaagggcaaggccaagaagggcagcagcttccagaccgtgagcgccctgcacagagagaacctgaacaagctgatgaccaacctgagaagcacccacccccacttcgtgagatgcatcatccccaacgagaccaagagccccggcgtgatggacaaccccctggtgatgcaccagctgagatgcaacggcgtgctggagggcatcagaatctgcagaaagggcttccccaacagaatcctgtacggcgacttcagacagagatacagaatcctgaaccccgccgccatccccgagggccagttcatcgacagcagaaagggcgccgagaagctgctgagcagcctggacatcgaccacaaccagtacaagttcggccacaccaaggtgttcttcaaggccggcctgctgggcctgctggaggagatgagagacgagagactgagcagaatcatcaccagaatccaggcccagagcagaggcgtgctggccagaatggagtacaagaagctgctggagagaagagacagcctgctggtgatccagtggaacatcagagccttcatgggcgtgaagaactggccctggatgaagctgtacttcaagatcaagcccctgctgaagagcgccgagagagagaaggagatggccagcatgaaggaggagttcaccagactgaaggaggccctggagaagagcgaggccagaagaaaggagctggaggagaagatggtgagcctgctgcaggagaagaacgacctgcagctgcaggtgcaggccgagcaggacaacctggccgacgccgaggagagatgcgaccagctgatcaagaacaagatccagctggaggccaaggtgaaggagatgaacgagagactggaggacgaggaggagatgaacgccgagctgaccgccaagaagagaaagctggaggacgagtgcagcgagctgaagagagacatcgacgacctggagctgaccctggccaaggtggagaaggagaagcacgccaccgagaacaaggtgaagaacctgaccgaggagatggccggcctggacgagatcatcgccaagctgaccaaggagaagaaggccctgcaggaggcccaccagcaggccctggacgacctgcaggccgaggaggacaaggtgaacaccctgaccaaggccaaggtgaagctggagcagcaggtggacgacctggagggcagcctggagcaggagaagaaggtgagaatggacctggagagagccaagagaaagctggagggcgacctgaagctgacccaggagagcatcatggacctggagaacgacaagcagcagctggacgagagactgaagaagaaggacttcgagctgaacgccctgaacgccagaatcgaggacgagcaggccctgggcagccagctgcagaagaagctgaaggagctgcaggccagaatcgaggagctggaggaggagctggaggccgagagaaccgccagagccaaggtggagaagctgagaagcgacctgagcagagagctggaggagatcagcgagagactggaggaggccggcggcgccaccagcgtgcagatcgagatgaacaagaagagagaggccgagttccagaagatgagaagagacctggaggaggccaccctgcagcacgaggccaccgccgccgccctgagaaagaagcacgccgacagcgtggccgagctgggcgagcagatcgacaacctgcagagagtgaagcagaagctggagaaggagaagagcgagttcaagctggagctggacgacgccctgctgggcctgcccagcagcaacttcctgctgcccccccccctgagcgccaacctggagaagatgtgcagaaccctggaggaccagatgaacgagcacagaagcaaggccgaggagacccagagaagcgtgaacgacctgaccagccagagagccaagctgcagaccgagaacggcgagctgagcagacagctggacgagaaggaggccctgatcagccagctgaccagaggcaagctgacctacacccagcagctggaggacctgaagagacagctggaggaggaggtgaaggccaagaacgccctggcccacgccctgcagagcgccagacacgactgcgacctgctgagagagcagtacgaggaggagaccgaggccaaggccgagctgcagagagtgctgagcaaggccaacagcgaggtggcccagtggagaaccaagtacgagaccgacgccatccagagaaccgaggagctggaggaggccaagaagaagctggcccagagactgcaggaggccgaggaggccgtggaggccgtgaacgccaagtgcagcagcctggagaagaccaagcacagactgcagaacgagatcgaggacctgatggtggacgtggagagaagcaacgccgccgccgccgccctggacaagaagcagagaaacttcgacaagatcctggccgagtggaagcagaagtacgaggagagccagagcgagctggagagcagccagaaggaggccagaagcctgagcaccgagctgttcaagctgaagaacgcctacgaggagagcctggagcacctggagaccttcaagagagagaacaagaacctgcaggaggagatcagcgacctgaccgagcagctgggcagcagcggcaagaccatccacgagctggagaaggtgagaaagcagctggaggccgagaagatggagctgcagagcgccctggaggaggccgaggccagcctggagcacgaggagggcaagatcctgagagcccagctggagttcaaccagatcaaggccgagatcgagagaaagctggccgagaaggacgaggagatggagcaggccaagagaaaccacctgagagtggtggacagcctgcagaccagcctggacgccgagaccagaagcagaaacgaggccctgagagtgaagaagaagatggagggcgacctgaacgagatggagatccagctgagccacgccaacagaatggccgccgaggcccagaagcaggtgaagagcctgcagagcctgctgaaggacacccagatccagctggacgacgccgtgagagccaacgacgacctgaaggagaacatcgccatcgtggagagaagaaacaacctgctgcaggccgagctggaggagctgagagccgtggtggagcagaccgagagaagcagaaagctggccgagcaggagctgatcgagaccagcgagagagtgcagctgctgcacagccagaacaccagcctgatcaaccagaagaagaagatggacgccgacctgagccagctgcagaccgaggtggaggaggccgtgcaggagtgcagaaacgccgaggagaaggccaagaaggccatcaccgacgccgccatgatggccgaggagctgaagaaggagcaggacaccagcgcccacctggagagaatgaagaagaacatggagcagaccatcaaggacctgcagcacagactggacgaggccgagcagatcgccctgaagggcggcaagaagcagctgcagaagctggaggccagagtgagagagctggagaacgagctggaggccgagcagaagagaaacgccgagagcgtgaagggcatgagaaagagcgagagaagaatcaaggagctgacctaccagaccgaggaggacagaaagaacctgctgagactgcaggacctggtggacaagctgcagctgaaggtgaaggcctacaagagacaggccgaggaggccgaggagcaggccaacaccaacctgagcaagttcagaaaggtgcagcacgagctggacgaggccgaggagagagccgacatcgccgagagccaggtgaacaagctgagagccaagagcagagacatcggcaccaagggcctgaacgaggagtag

SEQ ID NO: 5745 - protein, 195 aa, Artificial Sequence
  derived and/or modified sequence
MAPKKPEPKKDDAKAAPKAAPAPAPPPEPERPKEVEFDASKIKIEFTPEQIEEFKEAFMLFDRTPKCEMKITYGQCGDVLRALGQNPTQAEVLRVLGKPRQEELNTKMMDFETFLPMLQHISKNKDTGTYEDFVEGLRVFDKEGNGTVMGAELRHVLATLGERLTEDEVEKLMAGQEDSNGCINYEAFVKHIMSS

SEQ ID NO: 5746 - protein, 46 aa, Artificial Sequence
  derived and/or modified sequence
MAPKKPEPKKDDAKAAPKAAPAPAPPPEPERPKEVEFDASKIKIEF

SEQ ID NO: 5747 - DNA, 588 bp, Artificial Sequence
  derived and/or modified sequence
atggcccctaaaaaaccagagcccaagaaagacgacgctaaggccgcgccgaaagccgccccggctcctgctcctccgcccgaaccagaacggccaaaggaagtggaatttgatgccagcaaaatcaagattgagtttactcctgaacagattgaagagttcaaggaggccttcatgctgttcgacagaactccgaaatgcgaaatgaaaattacttatgggcagtgtggggacgtgctcagagctctcggtcagaacccgactcaggccgaggtcctgcgagtgctgggcaagccacggcaggaggagcttaacacgaaaatgatggatttcgaaaccttcttgcccatgctccagcatatcagcaagaataaagacacagggacttatgaggattttgtagaagggctgcgtgtcttcgacaaggaggggaacggcaccgttatgggggctgaactccgccacgtgctggccacgctcggcgagcgcctgaccgaggatgaggtcgagaagctgatggccggtcaggaggactctaatggatgtatcaactatgaagcgtttgttaagcacattatgagcagctag

SEQ ID NO: 5748 - DNA, 588 bp, Artificial Sequence
  derived and/or modified sequence
atggccccaaagaagcccgagccaaaaaaagacgatgctaaagccgcaccaaaagccgcccccgccccagcaccaccccctgagcctgagagacccaaggaggtcgagttcgacgcctccaagatcaaaattgagtttacccctgagcagattgaagagttcaaggaagccttcatgctgttcgatcgcacaccaaagtgcgagatgaagatcacatacgggcaatgtggcgatgtgttgcgagccctgggtcagaaccccacacaggccgaagtgctgcgcgtgctcggaaaacctcggcaggaagaactcaataccaaaatgatggattttgagactttcttgccgatgctgcagcatattagtaaaaataaagacaccggcacatatgaggactttgtcgagggcttaagagtgtttgataaagaggggaacggaaccgtcatgggagccgagctgcgccatgtgctggcaaccctcggcgaacgcttgaccgaggatgaggttgagaaactgatggccggccaggaggattcaaacgggtgcataaattatgaggctttcgttaagcatatcatgtcaagctag

SEQ ID NO: 5749 - DNA, 141 bp, Artificial Sequence
  derived and/or modified sequence
atggccccaaagaaaccggagcctaagaaagacgacgctaaagctgcaccaaaggcggctccagcccctgcgccccctcctgagccggagcggccgaaggaggtggaatttgatgcttcgaaaataaagatcgaattctag

SEQ ID NO: 5750 - DNA, 588 bp, Artificial Sequence
  derived and/or modified sequence
atggcccccaagaagccagagcccaagaaggatgatgccaaggccgcccccaaggccgccccagccccagcccctcctcctgagcctgagcggcccaaggaggtggagtttgatgccagcaagatcaagattgagttcaccccagagcagatcgaggagttcaaggaggccttcatgctgtttgacaggacccccaagtgtgagatgaagatcacctacggccagtgtggagatgtgctgcgggccctgggccagaaccccacccaggccgaggtgctgcgggtgctgggcaagccccggcaggaggagctgaacaccaagatgatggactttgagaccttcctgcccatgctgcagcacatcagcaagaacaaggacaccggcacctatgaagattttgtggagggcctgcgggtgtttgacaaggagggcaatggaacagtgatgggcgctgagctgcggcacgtgctggccaccctgggggagcggctgacagaagatgaggtggagaagctgatggccggccaggaggacagcaatggctgcatcaactatgaggcctttgtgaagcacatcatgagcagctag

SEQ ID NO: 5751 - DNA, 924 bp, Artificial Sequence
  derived and/or modified sequence
atccgggcaggataaaggcctgggtgaggcggctcacctaccctgctttctgcattcttctctccacatccctctctgtacttacagcccccaatggcccccaaaaagccagagcccaagaaggatgatgccaaggcagcccccaaggcagctccagctcccgcacctccccctgagcctgagcgccctaaggaggtcgagtttgatgcttccaagatcaagattgagttcacacctgagcagattgaagagttcaaggaagccttcatgctgttcgaccgcacacccaagtgtgagatgaagatcacctacgggcagtgtggggatgtcctgcgggcgctgggccagaaccccacacaggcagaagtgctccgtgtcctggggaagccaagacaggaagagctcaataccaagatgatggactttgaaactttcctgcctatgctccagcacatttccaagaacaaggacacaggcacctatgaggacttcgtggaggggctgcgggtcttcgacaaggagggcaatggcactgtcatgggtgctgagcttcgccacgtgctggccacgctgggtgagaggctgacagaagacgaagtggagaagttgatggctgggcaagaggactccaatggctgcatcaactatgaagcatttgtgaagcacatcatgtccagctaaacctcgtgcccaggaagcccagggaaggctgtgcagggacgtctcatctcccatgtgtgatgctgacaccagcggcctggagtcgtgggaaggaggggagccttaccaagactcctgcaaaaacccttggacctctccacgtggttgccgtctctggcccctctcaggctgtgcttacctgtgacagcagctctgtccccaccccatgggcctcatgaataaatggcttcttgccggccttcc

SEQ ID NO: 5752 - DNA, 1012 bp, Artificial Sequence
  derived and/or modified sequence
cctgctttctgcattcttctctccacatccctctctgtacttacagcccccaatggcccccaaaaagccagagcccaagaaggatgatgccaaggcagcccccaaggcagctccagctcccgcacctccccctgagcctgagcgccctaaggaggtcgagtttgatgcttccaagatcaagattgagttcacacctgagcagattgaagagttcaaggaagccttcatgctgttcgaccgcacacccaagtgtgagatgaagatcacctacgggcagtgtggggatgtcctgcgggcgctgggccagaaccccacacaggcagaagtgctccgtgtcctggggaagccaagacaggaagagctcaataccaagatgatggactttgaaactttcctgcctatgctccagcacatttccaagaacaaggacacaggcacctatgaggacttcgtggaggggctgcgggtcttcgacaaggagggcaatggcactgtcatgggtgctgagcttcgccacgtgctggccacgctgggtgagaggctgacagaagacgaagtggagaagttgatggctgggcaagaggactccaatggctgcatcaactatgaagcatttgtgaagcacatcatgtccagctaaacctcgtgcccaggtaggcacccactccctcctgaacccgctgctgccacctgcccacactccaccagctgcagtgctcacttgacatcctgctgcctccgtctccctcctcctctgtaatctgcactgcctttgctctcaggaagcccagggaaggctgtgcagggacgtctcatctcccatgtgtgatgctgacaccagcggcctggagtcgtgggaaggaggggagccttaccaagactcctgcaaaaacccttggacctctccacgtggttgccgtctctggcccctctcaggctgtgcttacctgtgacagcagctctgtccccaccccatgggcctcatgaataaatggcttcttgccggccttcc

SEQ ID NO: 5753 - DNA, 588 bp, Artificial Sequence
  derived and/or modified sequence
atggcccccaagaagcccgagcccaagaaggacgacgccaaggccgctcccaaggctgcccccgctcccgctcctccacctgaaccagagcgcccaaaggaagtagagttcgacgcctccaagattaagatagagttcacacccgagcagatcgaagagttcaaggaggcctttatgctgtttgacaggactcccaagtgcgaaatgaagattacttatggacagtgtggtgatgtgcttcgcgcacttgggcagaaccctacgcaggctgaggtgttgcgggttctgggcaagccccgtcaagaggagctcaatacaaaaatgatggatttcgaaacatttcttcctatgctgcaacacatctctaaaaacaaggacactgggacttacgaggacttcgtggagggcctgcgcgtcttcgacaaagagggaaacggcacagtaatgggagccgagctgcgtcacgtactggccaccctgggtgagcggctcacagaggacgaagtcgagaaactcatggccggccaggaggattctaatggttgtattaactacgaagcgttcgtgaagcacataatgtcatcatag

SEQ ID NO: 5754 - DNA, 588 bp, Artificial Sequence
  derived and/or modified sequence
atggcccccaagaagcccgagcccaagaaggacgacgccaaggccgccccgaaagctgcccctgcaccagcgccaccccctgagcctgaaagaccaaaagaggtggaattcgatgcttcaaaaattaaaattgaatttacaccggaacagattgaggaattcaaggaggccttcatgctctttgaccgcactcccaaatgtgaaatgaagattacttacgggcagtgcggcgacgtcctgcgcgcactcgggcagaatcctacccaggccgaggtgctaagagtgttggggaaaccacggcaagaagagttgaacaccaaaatgatggatttcgagacatttctccctatgttacagcatatctccaaaaacaaggatacagggacgtatgaagattttgtggagggcctgcgcgtcttcgacaaggaggggaatggcacagtcatgggggcagagctgcggcacgttctagcaacgctgggcgagcggctgacagaagatgaggtggaaaagctgatggccggccaagaagacagcaacggatgcatcaactatgaggcttttgtgaaacatatcatgtcctcctag

SEQ ID NO: 5755 - DNA, 141 bp, Artificial Sequence
  derived and/or modified sequence
atggcccccaagaagcccgagcccaagaaggacgacgccaaggccgcacccaaggcagcaccggctccagctccaccgcccgagcccgaacgaccaaaggaggttgaattcgacgcgtcaaaaattaagattgagttctag

SEQ ID NO: 5756 - DNA, 588 bp, Artificial Sequence
  derived and/or modified sequence
atggccccaaagaagcctgagcccaagaaggacgatgccaaggcagcccctaaggccgcacccgcacctgcccctcctcctgagcctgaacgtcctaaagaggtggagtttgacgcgagcaaaattaaaatcgaatttacacccgagcaaatcgaggagttcaaggaggccttcatgctcttcgatcgtactcctaaatgcgagatgaagatcacttacggtcagtgcggagacgtattacgggctctggggcaaaatccgacccaggccgaggtgctacgcgtgctcggaaaaccacgccaggaagagttgaatacgaagatgatggactttgagacatttctcccaatgctgcaacacatctccaaaaataaggacaccggcacttacgaggatttcgtggaaggcctaagggtgttcgacaaagaggggaatggcacggtgatgggcgctgagctgcgacacgtcctggcgacgctcggagaaagactgactgaagatgaagttgaaaaattaatggctggtcaagaggactccaatggctgtatcaactacgaggcgttcgtaaaacacataatgtccagctag

SEQ ID NO: 5757 - DNA, 588 bp, Artificial Sequence
  derived and/or modified sequence
atggctcctaagaagcctgagcccaaaaaggacgatgccaaggccgctccgaaggccgctccggctcccgctccgcctcccgaacccgaacgccctaaagaggttgagtttgatgcctctaaaatcaaaatcgagtttacacccgagcaaatcgaagaatttaaagaagcatttatgctcttcgacagaacacccaagtgtgagatgaaaataacctacggacagtgcggtgacgtattgcgggcactcggacagaaccctacacaagccgaggttctgagggtcctgggaaagcctcgtcaggaggagcttaatacaaagatgatggattttgagaccttccttcccatgctccagcatatcagcaaaaacaaggatacaggaacgtatgaagatttcgttgagggtctgcgagtgttcgacaaggagggcaatggcactgtgatgggcgctgagttacgccacgtcctggccactctgggtgagcgcctgacagaggatgaggtagagaagctgatggccggacaggaagacagcaatggatgcatcaattacgaggctttcgttaaacatattatgtcctcctag

SEQ ID NO: 5758 - DNA, 141 bp, Artificial Sequence
  derived and/or modified sequence
atggcacctaagaagccggaacctaaaaaggacgacgcaaaggctgcacccaaggcggctcctgctccagccccacctcctgagccggaacgccctaaggaggtcgagttcgatgctagtaagataaaaattgagttttag

SEQ ID NO: 5759 - DNA, 588 bp, Artificial Sequence
  derived and/or modified sequence
atggcccccaagaagcccgagcccaagaaggacgacgccaaggccgcccccaaggccgcccccgcccccgcccccccccccgagcccgagagacccaaggaggtggagttcgacgccagcaagatcaagatcgagttcacccccgagcagatcgaggagttcaaggaggccttcatgctgttcgacagaacccccaagtgcgagatgaagatcacctacggccagtgcggcgacgtgctgagagccctgggccagaaccccacccaggccgaggtgctgagagtgctgggcaagcccagacaggaggagctgaacaccaagatgatggacttcgagaccttcctgcccatgctgcagcacatcagcaagaacaaggacaccggcacctacgaggacttcgtggagggcctgagagtgttcgacaaggagggcaacggcaccgtgatgggcgccgagctgagacacgtgctggccaccctgggcgagagactgaccgaggacgaggtggagaagctgatggccggccaggaggacagcaacggctgcatcaactacgaggccttcgtgaagcacatcatgagcagctag

SEQ ID NO: 5760 - DNA, 141 bp, Artificial Sequence
  derived and/or modified sequence
atggcccccaagaagcccgagcccaagaaggacgacgccaaggccgcccccaaggccgcccccgcccccgcccccccccccgagcccgagagacccaaggaggtggagttcgacgccagcaagatcaagatcgagttctag

SEQ ID NO: 5761 - protein, 1855 aa, Artificial Sequence
  derived and/or modified sequence
MAASELYTKFARVWIPDPEEVWKSAELLKDYKPGDKVLLLHLEEGKDLEYHLDPKTKELPHLRNPDILVGENDLTALSYLHEPAVLHNLRVRFIDSKLIYTYCGIVLVAINPYEQLPIYGEDIINAYSGQNMGDMDPHIFAVAEEAYKQMARDERNQSIIVSGESGAGKTVSAKYAMRYFATVSGSASEANVEEKVLASNPIMESIGNAKTTRNDNSSRFGKYIEIGFDKRYRIIGANMRTYLLEKSRVVFQAEEERNYHIFYQLCASAKLPEFKMLRLGNADNFNYTKQGGSPVIEGVDDAKEMAHTRQACTLLGISESHQMGIFRILAGILHLGNVGFTSRDADSCTIPPKHEPLCIFCELMGVDYEEMCHWLCHRKLATATETYIKPISKLQATNARDALAKHIYAKLFNWIVDNVNQALHSAVKQHSFIGVLDIYGFETFEINSFEQFCINYANEKLQQQFNMHVFKLEQEEYMKEQIPWTLIDFYDNQPCINLIESKLGILDLLDEECKMPKGTDDTWAQKLYNTHLNKCALFEKPRLSNKAFIIQHFADKVEYQCEGFLEKNKDTVFEEQIKVLKSSKFKMLPELFQDDEKAISPTSATSSGRTPLTRTPAKPTKGRPGQMAKEHKKTVGHQFRNSLHLLMETLNATTPHYVRCIKPNDFKFPFTFDEKRAVQQLRACGVLETIRISAAGFPSRWTYQEFFSRYRVLMKQKDVLSDRKQTCKNVLEKLILDKDKYQFGKTKIFFRAGQVAYLEKLRADKLRAACIRIQKTIRGWLLRKKYLRMRKAAITMQRYVRGYQARCYAKFLRRTKAATIIQKYWRMYVVRRRYKIRRAATIVLQSYLRGFLARNRYRKILREHKAVIIQKRVRGWLARTHYKRSMHAIIYLQCCFRRMMAKRELKKLKIEARSVERYKKLHIGMENKIMQLQRKVDEQNKDYKCLVEKLTNLEGIYNSETEKLRSDLERLQLSEEEAKVATGRVLSLQEEIAKLRKDLEQTRSEKKCIEEHADRYKQETEQLVSNLKEENTLLKQEKEALNHRIVQQAKEMTETMEKKLVEETKQLELDLNDERLRYQNLLNEFSRLEERYDDLKEEMTLMVHVPKPGHKRTDSTHSSNESEYIFSSEIAEMEDIPSRTEEPSEKKVPLDMSLFLKLQKRVTELEQEKQVMQDELDRKEEQVLRSKAKEEERPQIRGAELEYESLKRQELESENKKLKNELNELRKALSEKSAPEVTAPGAPAYRVLMEQLTSVSEELDVRKEEVLILRSQLVSQKEAIQPKDDKNTMTDSTILLEDVQKMKDKGEIAQAYIGLKETNRSSALDYHELNEDGELWLVYEGLKQANRLLESQLQSQKRSHENEAEALRGEIQSLKEENNRQQQLLAQNLQLPPEARIEASLQHEITRLTNENLDLMEQLEKQDKTVRKLKKQLKVFAKKIGELEVGQMENISPGQIIDEPIRPVNIPRKEKDFQGMLEYKKEDEQKLVKNLILELKPRGVAVNLIPGLPAYILFMCVRHADYLNDDQKVRSLLTSTINSIKKVLKKRGDDFETVSFWLSNTCRFLHCLKQYSGEEGFMKHNTSRQNEHCLTNFDLAEYRQVLSDLAIQIYQQLVRVLENILQPMIVSGMLEHETIQGVSGVKPTGLRKRTSSIADEGTYTLDSILRQLNSFHSVMCQHGMDPELIKQVVKQMFYIIGAITLNNLLLRKDMCSWSKGMQIRYNVSQLEEWLRDKNLMNSGAKETLEPLIQAAQLLQVKKKTDDDAEAICSMCNALTTAQIVKVLNLYTPVNEFEERVSVSFIRTIQMRLRDRKDSPQLLMDAKHIFPVTFPFNPSSLALETIQIPASLGLGFISRV

SEQ ID NO: 5762 - DNA, 5568 bp, Artificial Sequence
  derived and/or modified sequence
atggccgcgagcgaactctacaccaagtttgcaagagtgtggattcctgatccagaagaagtgtggaaatccgccgagcttttaaaggattacaaacctggtgataaagtacttctgctccatctcgaggaggggaaagatctggagtaccacctcgaccccaagaccaaggagcttccgcacctgcgaaaccctgatatcctggtgggagaaaatgatcttaccgcactatcttatctgcacgagcctgccgtgctccacaacctgcgcgtgcggttcattgactcaaaacttatttacacatattgcgggattgtccttgttgctataaacccctatgagcagctacctatctacggggaagatataattaatgcctactctgggcagaacatgggagacatggatccccatatcttcgccgtagccgaggaggcgtacaaacagatggcccgcgacgaaaggaatcagagcataattgtctcgggggagtcgggagccggcaagactgtgtccgccaagtacgccatgcgttacttcgcgactgtttccgggtccgccagcgaggctaacgtggaggaaaaagtcttggcctccaatcccatcatggagtcgattggaaacgcgaagaccactcgcaatgacaattctagccgcttcggaaagtacatagaaattggattcgacaagagatacagaattatcggtgcaaacatgcgcacttatttgttggagaaatcgcgcgtggtctttcaggcagaagaggagcggaactatcatatattctatcagttgtgtgcctcggccaaactgccagagtttaaaatgcttaggctgggcaatgccgataactttaactacaccaagcagggagggtccccggtcattgagggggtggacgacgcaaaggaaatggcccatactagacaagcttgcacactgttgggaatctccgaatcacaccagatgggcatctttcgcattctcgccggcattctccacttaggtaatgtgggcttcacctctagagacgctgactcttgtaccatcccgcccaaacacgagccactgtgcattttctgtgagctcatgggcgtggactatgaggagatgtgtcactggctgtgtcacaggaaactagccacagccacagagacctatataaagcctatttctaaactgcaggcgacaaatgctcgagatgcattggcaaagcatatttacgcaaagctgttcaattggatcgtggataatgtgaatcaagctctacacagtgccgtgaagcagcattcctttatcggggtcctggatatttatgggtttgagaccttcgaaatcaacagttttgagcaattttgcatcaattatgccaacgagaagctacagcagcaatttaatatgcacgtgttcaaactggaacaagaagagtatatgaaggagcagatcccttggactctgatcgacttttacgacaaccagccttgtatcaatcttatcgaatccaaacttggcatcctagacctcttagacgaggaatgcaagatgcccaagggtacagatgatacatgggcccaaaagctgtataatacacacctcaacaagtgtgccctgtttgaaaagccccgcctgtccaacaaagcattcatcatacagcattttgccgacaaagtcgagtatcagtgtgaggggtttctggaaaagaacaaggatacggtcttcgaagagcaaatcaaagtgttgaaaagcagtaagttcaaaatgttacccgagctgttccaagacgacgagaaggctatctcccctacaagcgccacttcttccgggaggacacccttgacaaggacccccgctaagccaaccaaaggtcgaccggggcagatggccaaggagcacaagaagaccgtggggcaccagttcagaaacagtctccacctcctgatggaaaccctgaacgcgactaccccccattatgtgcggtgcattaagcctaacgacttcaagttcccctttacgtttgacgagaagcgagccgtgcagcagttgcgggcctgtggagtactcgagacaattagaattagcgctgccggctttccctctcgatggacttatcaggagttcttttctcgctatagggtcttgatgaagcagaaggacgttctgtccgataggaagcagacctgcaagaacgtattggagaaacttattctggacaaggataaatatcaattcggcaagacaaagatattcttcagagctggtcaggtggcctatctggaaaagctccgggcagataaactgagagccgcttgtattcgcatccaaaagacgatcaggggatggttgctcagaaaaaagtacctccgtatgcggaaagcagctattactatgcagcggtacgtccgagggtaccaggctagatgttatgccaaattcctgaggagaacgaaggctgcaacaatcattcaaaaatattggcggatgtacgtcgtgcggcgtaggtataagattcggcgcgccgccaccatagtgctacaatcttatctgcggggtttcttggcaagaaacaggtatcgtaaaattttacgagaacataaggctgtgattattcagaagagagtgagggggtggctagcaagaactcactataagagatctatgcatgccataatctacctgcaatgctgctttcgacgcatgatggccaagagagaactgaagaaactaaaaattgaagcaagaagcgtcgaaagatacaaaaagctccacattggcatggagaacaagattatgcagttacaacggaaagtggacgaacagaacaaggactataaatgcctggtggagaagcttaccaacttggaaggaatctataactcagaaactgaaaaactgcgatccgatcttgagaggctgcaactcagcgaagaagaagcaaaggtcgctactggtagggttctgtcactgcaagaggaaattgccaagctgaggaaggatctggagcagacccgttccgagaaaaaatgtatagaggagcacgccgaccgatataaacaggagaccgagcaattagtctccaatcttaaggaggaaaacacactgctaaagcaggaaaaagaggcactaaaccatagaattgtgcaacaggcgaaggagatgaccgaaacaatggagaaaaagctggtagaagagaccaagcaactcgaactggatttgaatgatgagagactgcgttaccagaatctcttaaatgagttcagccgccttgaggagcgctacgacgacctgaaggaggagatgactctgatggtgcatgttcccaagccagggcacaagcgtaccgactccacccacagctctaacgaatcagagtatattttttctagcgaaattgcggagatggaggatataccgtctcggactgaggagcctagcgagaagaaagtgccgcttgatatgtctctcttcttgaaattacaaaaacgggttaccgagctggaacaggaaaagcaggtgatgcaggatgaacttgacaggaaagaagaacaggttctgcgttccaaggcgaaggaggaggagcggccacagatccgaggcgctgagctcgagtatgagtccctaaaacgacaggagctggagtccgagaacaagaagctaaagaacgagctcaatgagctcaggaaggcactgagtgagaagtcagcccccgaagtgaccgctccaggggcaccagcgtacagggtccttatggaacagctgacatccgtctcagaagagcttgatgtgcgaaaggaggaggtgttgatactgcggtcacagctagtgagccagaaggaagccattcagccaaaggacgacaaaaacacaatgactgatagcacaatattattagaggatgtccagaagatgaaggacaagggtgagatagcacaagcctatataggcctgaaggagactaataggtcctccgcccttgattaccatgagctgaacgaagacggagagctgtggctcgtgtatgagggtctcaaacaggctaatcggcttctcgagagccaactgcaaagtcaaaaaagaagtcatgagaacgaggctgaggcattgcgaggggagatccagagcctcaaagaagaaaacaacaggcagcagcagttgctggctcagaaccttcagctccctcccgaagctcgcatcgaagcctctctgcagcatgaaatcactcgactaacaaatgagaacctcgatctgatggaacagctggagaaacaggataagaccgtgcgaaaactgaagaaacaacttaaagtgtttgcaaagaagatcggagagctggaagtcggccagatggagaacatctcccccggccagatcatcgatgagcccattagaccagtcaacatccctaggaaagagaaagactttcaagggatgctagagtacaagaaggaagatgaacaaaaactggtgaaaaaccttatactggagctcaagccgcggggcgtggccgtaaaccttatccccggtctccccgcttatatactctttatgtgtgtgcgacacgccgattacctgaacgacgaccagaaggtcagatccctgctgacttctaccataaattcaatcaagaaggtgctaaagaaaagaggcgacgattttgagaccgtaagcttttggctgtctaatacttgcagattcctgcactgtcttaaacaatattcgggagaagaaggctttatgaagcacaatacgtccaggcaaaatgagcactgtttgaccaactttgacctggctgaatacaggcaggttttgtctgatcttgctatccaaatctatcaacagcttgtgcgggttctggaaaacattctccagcctatgatcgtgtccggcatgctggaacacgagacgattcaaggagtgagcggagttaagccaacaggcctaagaaaaaggactagcagcatcgccgatgaggggacatatacgctggactcaatcctgaggcagctgaactcctttcatagtgtgatgtgccagcacggcatggacccagaactgataaagcaggtggtgaaacagatgttctacattattggggctatcaccctgaacaatctgttactgagaaaagatatgtgtagctggagcaaaggcatgcaaatcagatataatgtgagccagttggaggaatggctccgagataagaacttgatgaattctggagccaaggagacccttgaaccactgattcaagccgcccagctgttgcaagtgaagaaaaaaacagatgacgatgccgaggccatctgtagcatgtgtaatgctctgactacagcccaaattgtgaaagtgctcaatctctacactcccgtcaacgaatttgaggagcgtgtgagtgtgtcctttatacggacaattcagatgaggctgagggacagaaaggacagtccccagctactcatggatgccaagcatatattccccgtaaccttcccattcaatcccagctccctggccctcgagactatccaaatccccgcctccctcggacttggctttatctcacgcgtgtag

SEQ ID NO: 5763 - DNA, 5559 bp, Artificial Sequence
  derived and/or modified sequence
atggctgccagcgagctatacactaaattcgcacgagtctggatccctgaccctgaagaggtatggaagtccgccgaattgctgaaggactataagcctggagacaaggtcctgctcctccatttagaggagggtaaggatttggagtaccatctggatcccaagaccaaggaactgcctcatctgagaaacccagatattctcgttggcgagaacgatttgaccgctctgagctatctgcatgagcccgccgtactgcataacttgagggtaaggtttatagactcaaagctgatttacacatactgtggcattgtgctggtcgcaattaatccgtatgaacagctaccaatctatggcgaggatataatcaacgcctactcgggacagaacatgggagatatggacccacatatattcgcggtggcagaggaagcctataaacaaatggcacgggatgaaagaaatcagtctattatcgtatccggagagagcggggcggggaaaaccgtgagtgcaaaatacgctatgagatacttcgctacagtctctggtagcgctagcgaagccaacgtcgaggagaaggtgcttgcttccaacccaatcatggagagcattggcaacgccaaaacaacgcgcaacgataacagttcacggtttggcaaatatatcgaaattggctttgataaacgatacaggattatcggcgccaacatgcggacctaccttctcgagaagtcccgcgttgtgtttcaggccgaggaggaacggaattaccacatcttttaccagctgtgcgcttccgccaagctccctgaatttaagatgctgcgcctcggaaacgccgacaattttaattacacaaaacagggtggatctccagtgatagaaggagtagatgatgcgaaggaaatggcacatacgaggcaggcctgtacgcttctgggcatctcagagtcgcatcagatgggaatttttcgcatcctcgctggcattcttcacctgggcaatgtggggttcacatccagggacgcagactcgtgcacaatcccacctaaacatgagcctctgtgcattttttgtgagctaatgggcgtcgactacgaagaaatgtgtcactggctttgccaccggaaactggcaacagcaactgagacctacattaagccaatatcgaagctgcaggccactaacgcccgcgatgctctcgccaaacacatctatgccaaactgttcaattggattgtcgacaatgttaaccaagcactgcattctgcggtaaagcaacattctttcatcggagtcctggacatctatggcttcgaaactttcgagatcaatagctttgagcagttttgcatcaactacgcgaacgagaaactgcagcagcagttcaacatgcatgtgttcaaactggaacaggaggagtacatgaaggagcaaattccttggacactgatcgatttttatgataatcagccatgtatcaatctgatcgagtcgaagctcggtattttagaccttctggatgaagagtgcaagatgccgaagggcacagacgacacgtgggcccagaagctttacaacactcacctgaacaagtgtgcgttattcgaaaagcctcgcctttctaacaaagcattcatcattcaacacttcgccgataaggtcgagtaccagtgcgagggattcctcgagaagaataaggataccgtgttcgaggagcagattaaggtgctgaaatcctctaagttcaaaatgctgcctgaactgttccaagacgacgaaaaagccatcagtccaactagcgcaacaagctcaggccgcacaccattaaccaggacaccagctaaacccaccaagggtcggccagggcaaatggctaaggagcataagaaaactgtcggtcatcagtttagaaattctctccatctgctgatggaaacactgaacgctactactccgcactacgtgaggtgtatcaaaccgaacgattttaagtttcctttcacatttgacgagaagcgtgctgtgcagcaactgcgagcttgcggtgtgttagagacaattagaatttccgctgcgggcttccccagcagatggacctatcaggagttctttagtcgctatagggttctcatgaaacagaaggacgtcctatctgaccgcaagcagacctgcaagaatgttctggaaaaactgattctggataaggataagtatcaatttggaaaaactaaaatcttctttcgagccggccaggtggcctaccttgagaagttgcgggcagacaagctgcgggccgcctgtatcagaatccaaaaaactataagaggttggctgttgcggaaaaaatatttacggatgcgtaaggccgccataactatgcagcgttacgttagaggttatcaggctcgctgctatgccaaatttctgagacggacaaaagcggccacgataatccagaagtattggcgcatgtacgtagtgcgccgccgttacaagataaggagggcagctaccatagttctgcagtcttatcttagaggcttcctggcccgcaacagataccgcaagatcctgagggagcacaaggccgtcattatacaaaaacgcgtccgaggatggctggcaagaacacattacaaaagatcaatgcacgccattatttacctgcaatgctgtttccgcaggatgatggccaagcgcgaacttaaaaaactgaaaattgaggctcggagcgtagagcgctataagaaactgcacatcgggatggaaaataagatcatgcagctacagcggaaagtcgacgaacaaaataaagactataaatgcctagtcgaaaagctcactaatctggaaggtatttacaattcagaaacagagaaactacgctccgatttagagcgtctacagcttagcgaggaggaggccaaggttgccacgggaagagtgctgtcgctccaggaggagatcgctaagctcaggaaggacctggaacaaactcgttccgaaaaaaagtgtattgaggaacacgctgatcgatacaagcaggaaaccgagcagctagtgagcaatctgaaagaagagaacacactgctgaagcaagagaaggaagcactgaatcataggattgtacagcaggcaaaggagatgacagagactatggagaagaagctggtggaagaaacaaagcagttggagctcgatctcaacgacgaaaggcttcggtaccagaatctgttgaatgagtttagcagacttgaggaacgctatgacgatttgaaagaggagatgactctgatggtgcatgtgcctaagccaggccacaaacggaccgacagtacgcactcgtccaatgaatcagaatatatcttcagttctgagatcgccgagatggaagacattccatcccggactgaagagcccagcgaaaagaaggtgcctttggacatgagtctgttccttaagttgcaaaagcgtgtgacagagctggagcaagagaagcaagtaatgcaggacgagcttgataggaaagaggaacaggtcctgcggagcaaggccaaggaagaagaacgcccccaaattaggggtgccgagctggagtatgaaagtctgaaacgccaagaattagagagcgagaataaaaaactgaaaaatgagctgaatgagctgaggaaagctctgagcgaaaaatcagcacccgaggtcacggcgcccggcgctcctgcttaccgggtgctgatggaacagctcacgtcagtttcagaggagttggacgtgaggaaggaagaggtcctgattctgcgaagccaattggttagtcaaaaggaggcgatacagccaaagaataccatgaccgactccaccatcctgttggaggatgtgcagaagatgaaggacaagggcgagatcgctcaagcatatatcggactgaaagaaacaaaccggagttctgcgctggactaccacgagcttaacgaggatggcgagttgtggctggtgtatgagggcctgaagcaggccaaccgcctgctggagagccagctccaaagccagaagcgaagtcacgaaaatgaagcagaggccttaagaggagaaatacaaagcctgaaggaggaaaataatagacaacagcagctgctggcccagaacctccaactaccgccagaagcgcgtatcgaggccagcctgcagcatgagataaccagactgaccaatgagaacctagacctcatggagcagctcgagaagcaagacaagactgtcagaaaactgaaaaagcagctcaaagtgttcgccaagaagattggcgaactcgaggtgggacagatggaaaatatttcacctgggcagataatcgacgagcccattcggcccgtaaacatcccgagaaaagagaaggactttcagggaatgctcgaatataagaaggaggatgaacagaaactggtgaaaaatttaattctcgagcttaagcccaggggcgtggccgttaacctgatcccaggcctcccagcttacatcttgttcatgtgtgtacgtcacgcagactacctaaatgatgatcagaaagttagatctttgctaacctcaacaattaacagcatcaagaaagtcctgaagaaacgaggcgacgattttgaaacagtcagtttttggctgagcaacacctgtaggtttcttcactgcttgaagcaatattcaggagaggagggatttatgaaacacaacacaagtcggcagaacgagcactgcctcaccaacttcgatctggccgagtataggcaggttttaagtgacctggcaattcagatctatcagcaattagtccgagtgctcgaaaatattcttcagcccatgatagtatcaggcatgcttgaacacgaaaccattcagggcgtctccggggtgaagcctacaggactgaggaagaggacctcaagcatagccgatgaggggacttatacactggattccatcctgcgccagctaaattcctttcattctgtcatgtgccagcatggaatggatccggagctgattaagcaagtggtcaagcagatgttttatatcattggcgctatcaccctcaacaatctgttactgcggaaagacatgtgctcctggtcgaagggcatgcagatccggtacaacgtgtcgcagttagaggaatggctgagggataagaacctgatgaattctggcgctaaggaaaccctcgagccgctcatccaagcagcgcaactccttcaagtgaagaagaagacagacgacgatgccgaggcgatttgcagcatgtgcaacgccctgaccacagctcagatcgtgaaagtcttaaatctctacactcctgtaaacgaatttgaggagcgggtcagcgtgtctttcatacggacgatccaaatgcggctccgggaccgcaaggatagtccccaattgttgatggatgctaagcacatcttccccgtcacctttccattcaatccctctagcctggccctggagaccatccagattcctgcaagtctgggactgggctttatctccagggtttag

SEQ ID NO: 5764 - DNA, 5568 bp, Artificial Sequence
  derived and/or modified sequence
atggccgccagcgagctgtacaccaagtttgcccgggtgtggatcccagaccctgaggaggtgtggaagtctgctgagctgctgaaggactacaagccaggggacaaggtgctgctgctgcacctggaggagggcaaggacctggagtaccacctggaccccaagaccaaggagctgccccacctgagaaatccagacatcctggtgggagaaaatgacctgacagccctgagctacctgcacgagcctgctgtgctgcacaacctgcgggtgcgcttcatcgacagcaagctgatctacacctactgcggcatcgtgctggtggccatcaacccctatgagcagctgcccatctatggagaggacatcatcaatgcctacagcggccagaacatgggagacatggacccccacatctttgctgtggccgaggaggcctacaagcagatggccagagatgaaagaaaccagagcatcatcgtgtctggagagagcggggccggcaagacagtgtctgccaagtatgccatgagatactttgccaccgtgtctggcagcgccagcgaggccaacgtggaggagaaggtgctggccagcaaccccatcatggagagcattggaaatgccaagaccaccagaaatgacaacagcagcagatttgggaagtacatcgagatcggctttgacaagcgctaccgcatcattggagccaacatgaggacctacctgctggagaagagccgggtggtgttccaggccgaggaggagaggaactaccacatcttctaccagctgtgtgccagcgccaagctgcctgagttcaagatgctgcggctgggcaatgctgacaacttcaactacaccaagcagggcggcagccctgtgattgagggcgtggatgatgccaaggagatggcccacacccggcaggcctgcaccctgctgggcatcagcgagagccaccagatgggcatcttccgcatcctggccggcatcctgcacctgggcaatgtgggcttcaccagcagagatgctgacagctgcaccatcccccccaagcatgagcccctgtgcatcttctgtgagctgatgggcgtggactatgaggagatgtgccactggctgtgccacaggaagctggccacagccacagagacctacatcaagcccatcagcaagctgcaggccaccaatgccagagatgccctggccaagcacatctatgccaagctgttcaactggatcgtggacaacgtgaaccaggccctgcacagcgctgtgaagcagcacagcttcatcggcgtgctggacatctacggctttgagacctttgagatcaacagctttgagcagttctgcatcaactatgccaatgagaagctgcagcagcagttcaacatgcacgtgttcaagctggagcaggaggagtacatgaaggagcagatcccctggaccctgattgacttctatgacaaccagccctgcatcaacctgattgagagcaagctgggcatcctggacctgctggatgaggagtgcaagatgcccaagggcacagatgacacctgggcccagaagctgtacaacacccacctgaacaagtgtgccctgtttgagaagccccggctgagcaacaaggccttcatcatccagcactttgctgacaaggtggagtaccagtgtgagggcttcctggagaagaacaaggacacagtgtttgaggagcagatcaaggtgctgaagagcagcaagttcaagatgctgcctgagctgttccaggatgatgagaaggccatcagccccaccagcgccaccagcagcggccgcacccccctgaccaggaccccagccaagcccaccaagggccggcccggccagatggccaaggagcacaagaagacagtgggccaccagttcaggaacagcctgcacctgctgatggagaccctgaatgccaccaccccccactacgtgcgctgcatcaagcccaatgacttcaagttccccttcacctttgatgagaagagagctgtgcagcagctgcgggcctgtggggtgctggagaccatccgcatctctgctgctggcttccccagccgctggacctaccaggagttcttcagccgctacagagtgctgatgaagcagaaggatgtgctgagtgacaggaagcagacctgcaagaatgtgctggagaagctgatcctggacaaggacaagtaccagtttgggaagaccaagatcttcttccgggccggccaggtggcctacctggagaagctgcgggctgacaagctgcgggccgcctgcatccgcatccagaagaccatccggggctggctgctgaggaagaagtacctgaggatgaggaaggccgccatcaccatgcagagatatgtgcggggctaccaggcccgctgctacgccaagttcctgcggaggaccaaggccgccaccatcatccagaagtactggaggatgtatgtggtgagaagacgctacaagatcagaagagctgccaccatcgtgctgcagagctacctgcggggcttcctggccaggaaccgctacaggaagatcctgcgggagcacaaggccgtcatcatccagaagagggtgcggggctggctggcccggacccactacaagaggtccatgcacgccatcatctacctgcagtgctgcttccggaggatgatggccaagcgggagctgaagaagctgaagattgaggcccggtctgtggagcgctacaagaagctgcacatcggcatggagaacaagatcatgcagctgcagaggaaggtggatgagcagaacaaggactacaagtgcctggtggagaagctgaccaacctggagggcatctacaacagcgagacagagaagctgcggagtgacctggagcggctgcagctgtctgaggaggaggccaaggtggccaccggccgggtgctgagcctgcaggaggagatcgccaagctgaggaaggacctggagcagaccaggtctgagaagaagtgcatcgaggagcacgccgaccgctacaagcaggagacagagcagctggtgagcaacctgaaggaggagaacaccctgctgaagcaggagaaggaggccctgaaccacagaattgtgcagcaggccaaggagatgacagagaccatggagaagaagctggtggaggagaccaagcagctggagctggacctgaatgatgagcggctgcgctaccagaacctgctgaatgagttcagccggctggaggagagatatgatgacctgaaggaggagatgaccctgatggtgcacgtgcccaagccaggccacaagaggacagacagcacccacagcagcaatgaaagtgagtacatcttcagcagcgagattgctgagatggaggacatccccagcaggacagaggagcccagcgagaagaaggtgcccctggacatgagcctcttcctgaagctgcagaagagggtgacagagctggagcaggagaagcaggtgatgcaggatgagctggacaggaaggaggagcaggtgctgcggagcaaggccaaggaggaggagcggccccagatcagaggagctgagctggagtatgagagcctgaagaggcaggagctggagagcgagaacaagaagctgaagaatgagctgaatgagctgaggaaggccctgtctgagaagagcgcccctgaggtgacagcccctggggccccagcctacagagtgctgatggagcagctgacctctgtgtctgaggagctggatgtgaggaaggaggaggtgctgatcctgcggagccagctggtgtcccagaaggaggccatccagcccaaggatgacaagaacaccatgacagacagcaccatcctgctggaggatgtgcagaagatgaaggacaagggggagatcgcccaggcctacatcggcctgaaggagaccaacagaagcagcgccctggactaccacgagctgaatgaagatggagagctgtggctggtgtatgagggcctgaagcaggccaaccggctgctggagagccagctgcagagccagaagaggagccatgaaaatgaggccgaggccctgcggggggagatccagagcctgaaggaggagaacaaccggcagcagcagctgctggcccagaacctgcagctgcccccagaggccagaattgaggccagcctgcagcacgagatcacccggctgaccaatgaaaacctggacctgatggagcagctggagaagcaggacaagacagtgaggaagctgaagaagcagctgaaggtgtttgccaagaagatcggggagctggaggtgggccagatggagaacatcagccctggccagatcattgatgagcccatccggcctgtgaacatccccaggaaggagaaggacttccagggcatgctggagtacaagaaggaggatgagcagaagctggtgaagaacctgatcctggagctgaagccccggggcgtggccgtgaacctgatccctggcctgcctgcctacatcctcttcatgtgtgtgagacatgctgactacctgaatgatgaccagaaggtgcgcagcctgctgaccagcaccatcaacagcatcaagaaggtgctgaagaagagaggagatgactttgaaacagtgtccttctggctgagcaacacctgccgcttcctgcactgcctgaagcagtacagcggggaggagggcttcatgaagcacaacaccagccggcagaatgagcactgcctgaccaactttgacctggccgagtaccggcaggtgctgagtgacctggccatccagatctaccagcagctggtgcgggtgctggagaacatcctgcagcccatgattgtgtctggcatgctggagcacgagaccatccagggcgtgtctggagtgaagcccaccggcctgaggaagaggaccagcagcattgctgatgagggcacctacaccctggacagcatcctgcggcagctgaacagcttccacagcgtgatgtgccagcacggcatggaccctgagctgatcaagcaggtggtgaagcagatgttctacatcatcggggccatcaccctgaacaacctgctgctgaggaaggacatgtgctcctggagcaagggcatgcagatccgctacaacgtgtcccagctggaggagtggctgcgggacaagaacctgatgaacagcggggccaaggagaccctggagcccctcatccaggccgcccagctgctgcaggtgaagaagaagacagatgatgatgctgaggccatctgcagcatgtgcaatgccctgaccacagcccagatcgtgaaggtgctgaacctgtacacccctgtgaatgaatttgaggagcgggtgtctgtgtccttcatccgcaccatccagatgaggctgcgggacaggaaggacagcccccagctgctgatggatgccaagcacatcttccctgtgaccttccccttcaaccccagcagcctggccctggagaccatccagatcccagccagcctgggcctgggcttcatcagccgggtgtag

SEQ ID NO: 5765 - DNA, 5559 bp, Artificial Sequence
  derived and/or modified sequence
atggccgccagcgagctgtacaccaagtttgcccgggtgtggatcccagaccctgaggaggtgtggaagtctgctgagctgctgaaggactacaagccaggggacaaggtgctgctgctgcacctggaggagggcaaggacctggagtaccacctggaccccaagaccaaggagctgccccacctgagaaatccagacatcctggtgggagaaaatgacctgacagccctgagctacctgcacgagcctgctgtgctgcacaacctgcgggtgcgcttcatcgacagcaagctgatctacacctactgcggcatcgtgctggtggccatcaacccctatgagcagctgcccatctatggagaggacatcatcaatgcctacagcggccagaacatgggagacatggacccccacatctttgctgtggccgaggaggcctacaagcagatggccagagatgaaagaaaccagagcatcatcgtgtctggagagagcggggccggcaagacagtgtctgccaagtatgccatgagatactttgccaccgtgtctggcagcgccagcgaggccaacgtggaggagaaggtgctggccagcaaccccatcatggagagcattggaaatgccaagaccaccagaaatgacaacagcagcagatttgggaagtacatcgagatcggctttgacaagcgctaccgcatcattggagccaacatgaggacctacctgctggagaagagccgggtggtgttccaggccgaggaggagaggaactaccacatcttctaccagctgtgtgccagcgccaagctgcctgagttcaagatgctgcggctgggcaatgctgacaacttcaactacaccaagcagggcggcagccctgtgattgagggcgtggatgatgccaaggagatggcccacacccggcaggcctgcaccctgctgggcatcagcgagagccaccagatgggcatcttccgcatcctggccggcatcctgcacctgggcaatgtgggcttcaccagcagagatgctgacagctgcaccatcccccccaagcatgagcccctgtgcatcttctgtgagctgatgggcgtggactatgaggagatgtgccactggctgtgccacaggaagctggccacagccacagagacctacatcaagcccatcagcaagctgcaggccaccaatgccagagatgccctggccaagcacatctatgccaagctgttcaactggatcgtggacaacgtgaaccaggccctgcacagcgctgtgaagcagcacagcttcatcggcgtgctggacatctacggctttgagacctttgagatcaacagctttgagcagttctgcatcaactatgccaatgagaagctgcagcagcagttcaacatgcacgtgttcaagctggagcaggaggagtacatgaaggagcagatcccctggaccctgattgacttctatgacaaccagccctgcatcaacctgattgagagcaagctgggcatcctggacctgctggatgaggagtgcaagatgcccaagggcacagatgacacctgggcccagaagctgtacaacacccacctgaacaagtgtgccctgtttgagaagccccggctgagcaacaaggccttcatcatccagcactttgctgacaaggtggagtaccagtgtgagggcttcctggagaagaacaaggacacagtgtttgaggagcagatcaaggtgctgaagagcagcaagttcaagatgctgcctgagctgttccaggatgatgagaaggccatcagccccaccagcgccaccagcagcggccgcacccccctgaccaggaccccagccaagcccaccaagggccggcccggccagatggccaaggagcacaagaagacagtgggccaccagttcaggaacagcctgcacctgctgatggagaccctgaatgccaccaccccccactacgtgcgctgcatcaagcccaatgacttcaagttccccttcacctttgatgagaagagagctgtgcagcagctgcgggcctgtggggtgctggagaccatccgcatctctgctgctggcttccccagccgctggacctaccaggagttcttcagccgctacagagtgctgatgaagcagaaggatgtgctgagtgacaggaagcagacctgcaagaatgtgctggagaagctgatcctggacaaggacaagtaccagtttgggaagaccaagatcttcttccgggccggccaggtggcctacctggagaagctgcgggctgacaagctgcgggccgcctgcatccgcatccagaagaccatccggggctggctgctgaggaagaagtacctgaggatgaggaaggccgccatcaccatgcagagatatgtgcggggctaccaggcccgctgctacgccaagttcctgcggaggaccaaggccgccaccatcatccagaagtactggaggatgtatgtggtgagaagacgctacaagatcagaagagctgccaccatcgtgctgcagagctacctgcggggcttcctggccaggaaccgctacaggaagatcctgcgggagcacaaggccgtcatcatccagaagagggtgcggggctggctggcccggacccactacaagaggtccatgcacgccatcatctacctgcagtgctgcttccggaggatgatggccaagcgggagctgaagaagctgaagattgaggcccggtctgtggagcgctacaagaagctgcacatcggcatggagaacaagatcatgcagctgcagaggaaggtggatgagcagaacaaggactacaagtgcctggtggagaagctgaccaacctggagggcatctacaacagcgagacagagaagctgcggagtgacctggagcggctgcagctgtctgaggaggaggccaaggtggccaccggccgggtgctgagcctgcaggaggagatcgccaagctgaggaaggacctggagcagaccaggtctgagaagaagtgcatcgaggagcacgccgaccgctacaagcaggagacagagcagctggtgagcaacctgaaggaggagaacaccctgctgaagcaggagaaggaggccctgaaccacagaattgtgcagcaggccaaggagatgacagagaccatggagaagaagctggtggaggagaccaagcagctggagctggacctgaatgatgagcggctgcgctaccagaacctgctgaatgagttcagccggctggaggagagatatgatgacctgaaggaggagatgaccctgatggtgcacgtgcccaagccaggccacaagaggacagacagcacccacagcagcaatgaaagtgagtacatcttcagcagcgagattgctgagatggaggacatccccagcaggacagaggagcccagcgagaagaaggtgcccctggacatgagcctcttcctgaagctgcagaagagggtgacagagctggagcaggagaagcaggtgatgcaggatgagctggacaggaaggaggagcaggtgctgcggagcaaggccaaggaggaggagcggccccagatcagaggagctgagctggagtatgagagcctgaagaggcaggagctggagagcgagaacaagaagctgaagaatgagctgaatgagctgaggaaggccctgtctgagaagagcgcccctgaggtgacagcccctggggccccagcctacagagtgctgatggagcagctgacctctgtgtctgaggagctggatgtgaggaaggaggaggtgctgatcctgcggagccagctggtgtcccagaaggaggccatccagcccaagaacaccatgacagacagcaccatcctgctggaggatgtgcagaagatgaaggacaagggggagatcgcccaggcctacatcggcctgaaggagaccaacagaagcagcgccctggactaccacgagctgaatgaagatggagagctgtggctggtgtatgagggcctgaagcaggccaaccggctgctggagagccagctgcagagccagaagaggagccatgaaaatgaagctgaggccctgcggggggagatccagagcctgaaggaggagaacaaccggcagcagcagctgctggcccagaacctgcagctgcccccagaggcccgcatcgaggccagcctgcagcacgagatcacccggctgaccaatgaaaacctggacctgatggagcagctggagaagcaggacaagacagtgaggaagctgaagaagcagctgaaggtgtttgccaagaagattggagagctggaggtgggccagatggagaacatcagccctggccagatcattgatgagcccatccggcctgtgaacatccccaggaaggagaaggacttccagggcatgctggagtacaagaaggaggatgagcagaagctggtgaagaacctgatcctggagctgaagccccggggcgtggccgtgaacctgatccctggcctgcctgcctacatcctcttcatgtgtgtgagacatgctgactacctgaatgatgaccagaaggtgcgcagcctgctgaccagcaccatcaacagcatcaagaaggtgctgaagaagagaggagatgactttgagaccgtgtccttctggctgagcaacacctgccgcttcctgcactgcctgaagcagtacagcggggaggagggcttcatgaagcacaacaccagccggcagaatgagcactgcctgaccaactttgacctggccgagtaccggcaggtgctgagtgacctggccatccagatctaccagcagctggtgcgggtgctggagaacatcctgcagcccatgattgtgtctggcatgctggagcacgagaccatccagggcgtgtctggagtgaagcccaccggcctgaggaagaggaccagcagcattgctgatgagggcacctacaccctggacagcatcctgcggcagctgaacagcttccacagcgtgatgtgccagcacggcatggaccctgagctgatcaagcaggtggtgaagcagatgttctacatcattggagccatcaccctgaacaacctgctgctgaggaaggacatgtgctcctggagcaagggcatgcagatccgctacaacgtgtcccagctggaggagtggctgcgggacaagaacctgatgaacagcggggccaaggagaccctggagcccctcatccaggccgcccagctgctgcaggtgaagaagaagacagatgatgatgctgaggccatctgcagcatgtgcaatgccctgaccacagcccagatcgtgaaggtgctgaacctgtacacccctgtgaatgaatttgaggagcgggtgtctgtgtccttcatccgcaccatccagatgaggctgcgggacaggaaggacagcccccagctgctgatggatgccaagcacatcttccctgtgaccttccccttcaaccccagcagcctggccctggagaccatccagatcccagccagcctgggcctgggcttcatcagccgggtgtag

SEQ ID NO: 5766 - DNA, 12225 bp, Artificial Sequence
  derived and/or modified sequence
accccgggcaggtggagcgctcgcggctgctcgcggcgagcccgggagtgatggcgaggcccctgcgggcggccagcgcctgaggcgccccgccccgccccgccccgcgcggccctccccgcccggccctgccctgccctgctccctgccggcggctgcgggcgcttcctagtccgctcgggcggccgcccaggcgaggtgcggcctccgcacaggcggggggcgtaggcgcgcggggcccgccatggctgcgtcggagctctacacaaagtttgccagggtttggatacctgatccagaggaagtctggaagtcagcagagctgctcaaagattataagccaggagataaagtcctcctgcttcacctcgaggaaggaaaggatttggaataccatctagatccaaagaccaaggagctgcctcacttacgaaatcctgacatacttgttggtgaaaatgacctcacagccctcagctatcttcatgagcctgctgtgctccataatctcagagtccgctttattgattccaaacttatttatacgtattgtggtatagtcctagtagctataaatccctatgaacagctgcctatttatggagaagatattattaatgcatacagtggtcagaacatgggtgatatggatccacatatctttgcagtagctgaagaagcttacaagcaaatggccagagatgaacgaaatcagtccatcatcgtaagtggagagtctggggcaggaaaaacagtctcagctaagtatgccatgcgatactttgcaactgtgagtggttctgccagtgaggccaatgtggaggaaaaggtcttggcctccaaccccatcatggagtccattggaaatgctaaaacaaccaggaatgataatagcagccgttttgggaagtatattgagattggttttgataagagatatcgaatcattggtgccaatatgagaacttatcttttagagaaatccagagtggtattccaggcagaagaggagagaaactatcatatcttctatcagctttgtgcctcagcaaagttacctgaatttaaaatgctacgattaggaaatgcagataactttaattacacaaaacaaggaggcagtcctgtgattgaaggagtggatgatgcaaaggagatggcacatactaggcaggcctgcactttgctaggaattagtgaatctcatcaaatgggaattttccgaatacttgctggcatccttcacttaggcaatgttggatttacatcccgagatgcagacagctgcacaatacctcccaagcatgaacctctctgcatcttctgtgaactcatgggtgtggactatgaggagatgtgtcactggctctgccatcggaaactggctactgccacagagacatacatcaagcccatctccaagctgcaggccacaaatgcccgcgatgctttggccaagcacatctatgccaagctctttaactggattgtagataatgtcaatcaggctctccattctgctgtcaaacagcactcttttattggtgtgctagacatttacggatttgaaacatttgagataaatagttttgaacagttttgcataaattatgcaaatgaaaaactacagcaacaattcaatatgcatgtcttcaaattggagcaagaagaatatatgaaggaacaaattccatggacactcatagatttttatgataatcagccttgtattaatcttatagaatcaaaactaggcattctagatttactggatgaggaatgcaagatgcctaaaggcacagatgacacctgggcccaaaaattgtacaacacacatttgaacaaatgtgcactctttgaaaagcctcgtctatcaaacaaagctttcatcatccaacattttgctgacaaagtggaataccagtgtgaaggatttctcgaaaagaataaagacaccgtttttgaagaacaaattaaagttcttaaatcaagcaagtttaagatgctaccagaactatttcaagatgatgagaaggccatcagtccaacttcagccacctcctcagggcgcacacccctcacacgaactcctgcaaagcccaccaaaggcagaccaggccaaatggccaaagagcacaagaaaacagtggggcatcagttcagaaactccctgcacctgcttatggagacactcaatgccactacccctcactatgtgcgctgtatcaagcctaatgacttcaagttcccattcacgtttgatgagaagagggcagtgcagcagctgagagcatgtggtgtcctggaaaccatccgaatcagtgcggccggtttcccctcacggtggacttaccaagaatttttcagccgctaccgtgtcctaatgaagcagaaagatgtgctgagtgacagaaagcaaacatgcaagaatgtgttagagaaactgatactggacaaggacaaataccagtttggtaagacaaagatctttttccgtgccggtcaagtggcctatctagaaaaattgagagctgacaaactgagagctgcctgcatccggatccagaagaccatccgagggtggctgctgagaaagaagtacctacgcatgcggaaggcagccatcaccatgcagagatacgtgcggggctaccaggcccgatgctatgctaagtttctgcgcagaaccaaggcagcaaccatcattcaaaagtactggcgcatgtatgtggtccgcaggaggtacaagattagacgagctgccactatcgttcttcagtcttacttgcgaggcttcttggccagaaataggtatcgcaagatactccgtgagcacaaagcagtcatcattcagaagcgagtccggggctggctggcccgcacacactacaagaggagcatgcatgccatcatctaccttcagtgctgcttcaggcggatgatggccaagcgtgagctaaagaagctcaaaatcgaggctcgctcagtggagcgctataagaagctgcacatcggcatggagaacaagatcatgcagctgcagcgcaaagttgatgagcagaacaaagactacaaatgccttgtggagaaactaaccaatctggaaggaatatacaactctgagactgagaaactacgaagtgacttagaacgtcttcaactaagtgaagaggaagcgaaagttgccactgggcgggtccttagtctgcaggaagaaattgccaagctccggaaagacctggagcaaactcgttcagagaaaaaatgcattgaggaacatgcagatcgatacaaacaagaaacagagcagctggtatcaaatctgaaggaagaaaatactttgctgaagcaagaaaaagaagccctcaatcaccgcatcgtgcagcaggctaaggagatgacagaaactatggagaagaagttagtagaagaaacgaaacaactggaactcgaccttaatgatgaaaggctgagatatcagaaccttctgaatgagttcagtcgcctggaagaaagatatgatgacctcaaggaagagatgacccttatggtgcatgtgcctaagcctggacacaagagaacagactccacccacagcagcaacgagtctgaatatatctttagctctgaaattgcagaaatggaagacattccatcaaggacagaggaaccaagtgagaagaaggtacctctggacatgtcattgttccttaagctccagaagcgggtcacagagctggagcaggagaagcaggtgatgcaggatgagctggaccgcaaggaggagcaggtgctccgcagcaaggccaaggaagaagaaagaccacaaattagaggtgcagaactggaatatgagtcactcaagcgtcaagaactagaatcagaaaacaaaaaactgaagaatgagctaaatgagttgcgcaaggccctcagtgagaaaagtgccccagaggtgaccgccccaggtgcacctgcctaccgtgtcctcatggagcagctgacctctgtgagcgaggagcttgatgtccgcaaggaggaagtcctcatcttaaggtctcaactggtgagccagaaagaggccatccaacccaaggatgacaagaatacaatgacagattccacaatacttttggaagatgtacaaaaaatgaaagataaaggtgaaatagcacaagcatacattggtttgaaagaaacaaatagatcatctgctctggattaccatgagttgaatgaggatggagagctgtggctggtttatgaagggttaaaacaagccaacaggctcctggaatcccagctgcagtcacagaagaggagccatgagaatgaggccgaggccctccgtggggagatccagagcctgaaggaggagaacaaccgacagcagcagctgctggcccagaacctgcagctgcccccagaggcccgcattgaggccagcctgcagcacgagatcacccggctgaccaacgaaaacttggatttgatggaacaacttgaaaaacaggataagacggtccgtaaactgaaaaaacaactgaaagtatttgccaaaaaaattggcgaactagaagtgggccagatggagaacatatccccaggacagatcattgatgaacccatccgaccagtcaacattcccaggaaagaaaaggatttccaagggatgctggaatacaagaaggaggatgagcaaaaacttgttaagaacctgattctggaactgaagccacgtggtgtagcagtcaatttgattccaggattaccggcatatatcctgttcatgtgtgttcgacatgctgactacctgaatgatgatcagaaagtaaggtcgttgctaacatcaacaattaacagcatcaaaaaagtattgaagaaaagaggtgatgattttgaaaccgtctccttctggctctctaacacatgccgatttttgcactgcttgaaacagtacagtggagaagagggctttatgaagcacaacacatctcgccagaatgaacactgcctcaccaattttgacctggctgagtatcggcaggtgctgagtgacttggccattcagatctaccagcagctcgtgcgggtgttagagaacatccttcagccaatgattgtctcaggcatgctggaacatgaaacgattcagggcgtgtctggggtgaagcccacagggttgagaaagcgaacctccagtatcgccgatgagggcacctacacactggactccatcctccggcagctcaactccttccactcggtcatgtgtcagcatggcatggaccctgaactgatcaagcaggtggtcaagcagatgttctacatcataggggccatcaccctgaacaaccttctcctgcggaaggacatgtgctcctggagtaaaggcatgcagatcaggtacaatgtcagtcaactggaagaatggctgcgtgacaagaatctgatgaatagtggggctaaagaaaccctggaacctctcattcaggctgctcaacttttgcaagtgaaaaagaaaacagatgatgatgcagaagccatttgttctatgtgcaatgctttaactactgcccagattgtgaaagtgttgaatttgtatactccagttaatgagtttgaagaaagagtctctgtgtcgttcattcgtactatacagatgcgtttacgagacaggaaagactctccccagctgctcatggatgctaaacacatctttcctgtcacctttcctttcaacccatcttccctcgcactagaaaccatccagattccagccagcctcggcctgggcttcatttcacgggtctgaaagtgatgtccaggcaaaaattgacaatacatttcttgcccgaaataagaacccattatttccagtgagttactgaaaatacatttttaaagagaaagtactgattatctcccaaatgagaagtcattaactggaaatctccctagaatactttcatcactttggaaacaaagataggctctttcgtgctgtgttatctttatagcaacactcatccttaaccaactaggtaccgtgagtttacatacaggagaatgatggaaggaagggaggaaggaaaggaggagaaaaatgtgtcttcagctggcagcatttattttaaatccttagcactgagtttgaatggtataaaaagtataacttccatagatgagctgttgttaggaaggcaccaaagaacctcctctgcactaaacaggagaatggaaagaaaagtctccattgagtacatatcatgtcagtttagtaatcaattatgttgatattgttaaactggttcaaagaaataaactggcaatatgtaaagtaattcctcatttgtgtcactatgatatagagatattaaaggaatgttggtttgctaaatagtatagatgtccatttgtactatagtttactgagcattttaaattgctgctacatactgtcttcttaaaatgtaagtgatattaggcactacaataagtttctcttgtcaattctgtttacaattcaatcagatcacagttttaactggattatatgcaaatacctacagattcacctgcacaagtagcagacactggaaagtcatgtagtaatatgacaaaatgcttgacatttaggggtaggattagacaaagtggctattgttgatgtcattatttattcaggatgtattacattgatgtgctcattaattttccctgggtggatattgcgtcagggtacagtgttctgtgaagtgacttatttttaactaccagatctgattccttcagtgcatattttcaaccttgacaggttttctctcttcttaatttattaagaattaatctcggctgggcgcggtggctcacgcctgtaatcccagcactttgggaagccaaggtgggcggatcacttcaggttaggagttggagaccagcctggccaacatggcgaaaccctgtctctactaaaaatacaaaaattagccgggcgtggtggcacttgcctgtaatcccagctactcgggaggctgaggcacgagaatcgattaaacctgggaggcggagattgcaatgagatcgaaccactgcactccagcctgggtgacagagagagacactgccttggaaaaaaaaagaatctcactcactatctagagaggattgtcagaatattcacgattcaggtcttgaaactttgattatgcaaaagaaggtatataataaatatttcattatgattcagtttttaaggctttgcagcttctataagtgttctcagatgccactagataattttaaaagcatcatattagaaatactttaagaagacttatataagaaatagaagattgttgaattttacagaggatttggttcattaagacccagattctgtaagttttcattctgaaattctagttaaacatattcaccatttttcttaggaatcttatacaataaatccttcaggttgcacaaaagcaaattattagttttcattagaaactctggttctgaattacaatcataggttatataaatttaactgttagatggtctataaatcttattaaaatatgtgcaatatttatggaagtcaaacagcttcatatcagtgataaagattgttattaaaagataaatactgtctgttaatttacatgggcctcaagttcctcgtttataaaataagagagttggacactgattcttaacatctcctccacatttaaaattctctcttctcagcccttagattctagagagaaaaagctgcagttactcagtaagtccattctctgatggaaagaccagtgtgtagtgcctgtcaattccttaggattaatcaaatgtaaaatcacaagtttgtgtagctgtaacctttcttaaatgtacatgatttatgtacatgcttttagaaggtcctactatatttgtattataattagtttaagtaatttttattacatcatgtattgctttattcagtttgaatacatttatttatttatttgcagtatcaaccagaaacactaccaattgcatcaaattctcccagtttttcctggttgtcaatgcggttttcaatgcacaattaagtcatagccatttggttcgtaccaaatgtgtcagaatctaacagcatccgataggctgtaagttggggagttgctaagaaaatgcaacgtggtacaggctgtccgcctcagccctggaaatctcccagacctcccccagcttcatcctgtgtagcacgactcaacgtgcaccctgaatcttctcaggtcttccaggtcatgctgtagctgtcactgccatgcagcccttttttttactccggacagctcatgtactgaagcgtcatgaaagaaaggctgtggtctgagcccttctctcccatctcctgtctttgtcctgtcaagtgctggagccagagctcctacagctgcccttggtggtttctcctgttcagcgatggtggcacaaaggttctgctattccagggctccagcttcctcccaggtctacccagagctccagatgggggtctgaattaacctctcttggtggcctggagatttttagtcattgacaagaataccttgtaaccagggaaccccaaggcccagtaaatgattctgtataccattttcttgaaggtacaagaagattctgccgactatggggatctttgggccagtttgaggattgctttccctctgaggttctttctctctgtcagccacactttctcacccaacttcagacacaccctgccagcctttcccctactcattcactcttccccttccctcaacttaatcgtctatcccgttgcctgctgtttgactgtgcactgaaggcaggtggatggagtcagtcctcagttgcccctgctggccttcctggtgcttaccatcagcccaatctttgcacagtccttgttgttcttacttctctgcatgcattccttcagaagatcagtcatcaactttttcttaattcctctgtgacacacaatgggaattcaaaggaagagatcttaaaagtcacaacagttctttatcttaataatcccctccccattcaccttactacatgcagactcacctcacacccttacaacttgaagctgaaaatttaaaagtaatttccctttttgcagcttttcctcaggttaaggctttgatctgcctgagagtaactctaaaaggagggaagataaatatgggataaaatccacaaagtgtagcttctaattcctttggaagtttaaaaaatttccacatatctgatgcttcttttgtcaggtgcagaagcacaaaaacatattccgaagccaactgatagggaatttggggattattgtcagtttggagaatttgctgtgttatttcttcatttccatggatagctcatagttggctctttctgggtgagtaattatgtgtaatatagatcaaatcttttactaaggttacagctacatgttaggggaggctatgaaaatactatattattataatttcagtgcagtgattgttgtgagaaataactttcatggtaaccctaggaaaatgggcacctgccaccatcctgagaagtcctcacacaatgccctttctctcttacacacacacacacacacatacacacacacacacccccgtcactaattcatagagttccttagcaggcatagtcaaggatcctctgggtaatgtcagctgcttagtgataaaacagagccaaaactagtgcatcctgttgaaagtaatgcagaaacagtacctgggtccagatatgctttcctgcggcgctttcctctgttacctcgtttcatcctcacagcagcatggacggtaggtggggtcgcttctacaatcatttctgatgatagcttgggaatagagataggggcagtgacttgcctgatgtcgcacagccctctggctgtcctgctttcccatatggagcagtggtggtgtgggcacctgtgatgcaggagactttaaaaatgtcgtgaggtcacgtgctgcccctcctggtacgtgtggaatgcccctggccagcaaggggtgcttttttatcagagttggcagctggcatgtgggaaccgagcaagtgctgcgtaccaagttacttgttttaaggagaccaagtgctcagcgccaggtggttttcttttttgtcatagttacttgctataactcagcttgacttctgtcatgaatcagtgctctctgggaggatgcaatactctgtttgggcattaattggtagcaggttgtctcaaccaaaaagacaggaaacagcaaaagcctctctgaaattaagaggaaagttactctccccacacccatcagagtctttattggagccaccaggtgagctgtgcagcctggacaggcctgcagctataggccaccttcccagtttaggtcctcagcacaggggagcccaagtcactgggtgccttccgagggctgtcactgggcaggccatatacaagtcagtgtgtgcgtgggcactgcagtgtgtgcatgccgtaggtgttgatgggtgctaggaggggtgtcgtgtgcatgcgcgttgaagaggatctgtattgccgtgacctctgttcatggatgagtgcattgtaatttgttctcaggctgtgctgtgagggccgccttaacccttgctcccttcccttctagagctgccttaagttctccagaacttttcttctgtaaaggatatcttgcctggaagggatatcttgccctgtttctcaaggttttgtgagagttttgactggatgtggccctgcatgaccctccttctcctgtacttcctctttcctttccaaatgggaattagaactgtggggcagcaacagtctcagagccagtgagaggccagcttagagaatgcttctgagttagtgggactctgtgtcacaagtaagcaaatgaatatatgaaagaaattatggagataagttagattcttggtaatacttaaatgtcttgctttctactaaccttttgttactaaaggtaaagggtataactcaaactttttgtggacattcttttcaaaattttttaagaaccctgtactataaaaggttgagtaaaaacaggaaagcgtgctataagttcaaatctgttgtattaccctaaattagataaaccaacctgaattatagtagatttctcaatagatgaggaactgaaaaatactatgtaaaatatcttccaaaatgctttttatactttttttatttgtaatttggtctatctaaaatgttcgttagcttaacttaatgggcgttattggattcatatgactaacgtttcctcagtattgtaatgcttgaaatatttgaaagaaaaaatgttgttttttagttgaaactggtatatataattcagtgcttggcaggttagtatatttttatgcatttttcagagtcagcagtttcaaatcttattgttatcatgttataaaattttagcccacatttcaggctccgtaaatcatttgagccattattttttcccaacaaatggtgaattttttctttaaatgtggatatatatgttgtaatttatgattcctggttatgtatttttgtgggatcctgcagtaaaattgacttttttgtgtctttgggagatttaaattgcgctaacagtgttgcgcaaaaatgagttcatgccatttaacatattgtattttaattattaactgtattaatttactatgaaatggacatccttttaactaaaatggaattgaacattgcagttttcaaatatttttccttgttgggtctggaaaaggaattctactttgatctgcatagaaaattttgatacaattttttgaaagttcttaggtgaaacatttacccattaaaaaggaagcagaaatactgagacatgaaaggcattatcaactaactctagactctagaacccattctagcatatctcacgtgcaatttttaaaaataagttaataattcatctcatatcaacaaaagcctttgaaacatgggttttcactagatatcacctagtgctaagataaaaaccaaaacaatatcagaattacatttatgctctaaatttgtagttgtccattgttgtgcttagtaaatgtgtgtcattaatgctgtattctcctagctattatggaaacttgtttaaataaagatatggatataaa

SEQ ID NO: 5767 - DNA, 12211 bp, Artificial Sequence
  derived and/or modified sequence
accccgggcaggtggagcgctcgcggctgctcgcggcgagcccgggagtgatggcgaggcccctgcgggcggccagcgcctgaggcgccccgccccgccccgccccgcgcggccctccccgcccggccctgccctgccctgctccctgccggcggctgcgggcgcttcctagtccgctcgggcggccgcccaggcgaggtgcggcctccgcacaggcggggggcgtaggcgcgcggggcccgccatggctgcgtcggagctctacacaaagtttgccagggtttggatacctgatccagaggaagtctggaagtcagcagagctgctcaaagattataagccaggagataaagtcctcctgcttcacctcgaggaaggaaaggatttggaataccatctagatccaaagaccaaggagctgcctcacttacgaaatcctgacatacttgttggtgaaaatgacctcacagccctcagctatcttcatgagcctgctgtgctccataatctcagagtccgctttattgattccaaacttatttatacgtattgtggtatagtcctagtagctataaatccctatgaacagctgcctatttatggagaagatattattaatgcatacagtggtcagaacatgggtgatatggatccacatatctttgcagtagctgaagaagcttacaagcaaatggccagagatgaacgaaatcagtccatcatcgtaagtggagagtctggggcaggaaaaacagtctcagctaagtatgccatgcgatactttgcaactgtgagtggttctgccagtgaggccaatgtggaggaaaaggtcttggcctccaaccccatcatggagtccattggaaatgctaaaacaaccaggaatgataatagcagccgttttgggaagtatattgagattggttttgataagagatatcgaatcattggtgccaatatgagaacttatcttttagagaaatccagagtggtattccaggcagaagaggagagaaactatcatatcttctatcagctttgtgcctcagcaaagttacctgaatttaaaatgctacgattaggaaatgcagataactttaattacacaaaacaaggaggcagtcctgtgattgaaggagtggatgatgcaaaggagatggcacatactaggcaggcctgcactttgctaggaattagtgaatctcatcaaatgggaattttccgaatacttgctggcatccttcacttaggcaatgttggatttacatcccgagatgcagacagctgcacaatacctcccaagcatgaacctctctgcatcttctgtgaactcatgggtgtggactatgaggagatgtgtcactggctctgccatcggaaactggctactgccacagagacatacatcaagcccatctccaagctgcaggccacaaatgcccgcgatgctttggccaagcacatctatgccaagctctttaactggattgtagataatgtcaatcaggctctccattctgctgtcaaacagcactcttttattggtgtgctagacatttacggatttgaaacatttgagataaatagttttgaacagttttgcataaattatgcaaatgaaaaactacagcaacaattcaatatgcatgtcttcaaattggagcaagaagaatatatgaaggaacaaattccatggacactcatagatttttatgataatcagccttgtattaatcttatagaatcaaaactaggcattctagatttactggatgaggaatgcaagatgcctaaaggcacagatgacacctgggcccaaaaattgtacaacacacatttgaacaaatgtgcactctttgaaaagcctcgtctatcaaacaaagctttcatcatccaacattttgctgacaaagtggaataccagtgtgaaggatttctcgaaaagaataaagacaccgtttttgaagaacaaattaaagttcttaaatcaagcaagtttaagatgctaccagaactatttcaagatgatgagaaggccatcagtccaacttcagccacctcctcagggcgcacacccctcacacgaactcctgcaaagcccaccaaaggcagaccaggccaaatggccaaagagcacaagaaaacagtggggcatcagttcagaaactccctgcacctgcttatggagacactcaatgccactacccctcactatgtgcgctgtatcaagcctaatgacttcaagttcccattcacgtttgatgagaagagggcagtgcagcagctgagagcatgtggtgtcctggaaaccatccgaatcagtgcggccggtttcccctcacggtggacttaccaagaatttttcagccgctaccgtgtcctaatgaagcagaaagatgtgctgagtgacagaaagcaaacatgcaagaatgtgttagagaaactgatactggacaaggacaaataccagtttggtaagacaaagatctttttccgtgccggtcaagtggcctatctagaaaaattgagagctgacaaactgagagctgcctgcatccggatccagaagaccatccgagggtggctgctgagaaagaagtacctacgcatgcggaaggcagccatcaccatgcagagatacgtgcggggctaccaggcccgatgctatgctaagtttctgcgcagaaccaaggcagcaaccatcattcaaaagtactggcgcatgtatgtggtccgcaggaggtacaagattagacgagctgccactatcgttcttcagtcttacttgcgaggcttcttggccagaaataggtatcgcaagatactccgtgagcacaaagcagtcatcattcagaagcgagtccggggctggctggcccgcacacactacaagaggagcatgcatgccatcatctaccttcagtgctgcttcaggcggatgatggccaagcgtgagctaaagaagctcaaaatcgaggctcgctcagtggagcgctataagaagctgcacatcggcatggagaacaagatcatgcagctgcagcgcaaagttgatgagcagaacaaagactacaaatgccttgtggagaaactaaccaatctggaaggaatatacaactctgagactgagaaactacgaagtgacttagaacgtcttcaactaagtgaagaggaagcgaaagttgccactgggcgggtccttagtctgcaggaagaaattgccaagctccggaaagacctggagcaaactcgttcagagaaaaaatgcattgaggaacatgcagatcgatacaaacaagaaacagagcagctggtatcaaatctgaaggaagaaaatactttgctgaagcaagaaaaagaagccctcaatcaccgcatcgtgcagcaggctaaggagatgacagaaactatggagaagaagttagtagaagaaacgaaacaactggaactcgaccttaatgatgaaaggctgagatatcagaaccttctgaatgagttcagtcgcctggaagaaagatatgatgacctcaaggaagagatgacccttatggtgcatgtgcctaagcctggacacaagagaacagactccacccacagcagcaacgagtctgaatatatctttagctctgaaattgcagaaatggaagacattccatcaaggacagaggaaccaagtgagaagaaggtacctctggacatgtcattgttccttaagctccagaagcgggtcacagagctggagcaggagaagcaggtgatgcaggatgagctggaccgcaaggaggagcaggtgctccgcagcaaggccaaggaagaagaaagaccacaaattagaggtgcagaactggaatatgagtcactcaagcgtcaagaactagaatcagaaaacaaaaaactgaagaatgagctaaatgagttgcgcaaggccctcagtgagaaaagtgccccagaggtgaccgccccaggtgcacctgcctaccgtgtcctcatggagcagctgacctctgtgagcgaggagcttgatgtccgcaaggaggaagtcctcatcttaaggtctcaactggtgagccagaaagaggccatccaacccaagaatacaatgacagattccacaatacttttggaagatgtacaaaaaatgaaagataaaggtgaaatagcacaagcatacattggtttgaaagaaacaaatagatcatctgctctggattaccatgagttgaatgaggatggagagctgtggctggtttatgaagggttaaaacaagccaacaggctcctggaatcccagctgcagtcacagaagaggagccatgagaatgaggccgaggccctccgtggggagatccagagcctgaaggaggagaacaaccgacagcagcagctgctggcccagaacctgcagctgcccccagaggcccgcattgaggccagcctgcagcacgagatcacccggctgaccaacgaaaacttggatttgatggaacaacttgaaaaacaggataagacggtccgtaaactgaaaaaacaactgaaagtatttgccaaaaaaattggcgaactagaagtgggccagatggagaacatatccccaggacagatcattgatgaacccatccgaccagtcaacattcccaggaaagaaaaggatttccaagggatgctggaatacaagaaggaggatgagcaaaaacttgttaagaacctgattctggaactgaagccacgtggtgtagcagtcaatttgattccaggattaccggcatatatcctgttcatgtgtgttcgacatgctgactacctgaatgatgatcagaaagtaaggtcgttgctaacatcaacaattaacagcatcaaaaaagtattgaagaaaagaggtgatgattttgaaaccgtctccttctggctctctaacacatgccgatttttgcactgcttgaaacagtacagtggagaagagggctttatgaagcacaacacatctcgccagaatgaacactgcctcaccaattttgacctggctgagtatcggcaggtgctgagtgacttggccattcagatctaccagcagctcgtgcgggtgttagagaacatccttcagccaatgattgtctcaggcatgctggaacatgaaacgattcagggcgtgtctggggtgaagcccacagggttgagaaagcgaacctccagtatcgccgatgagggcacctacacactggactccatcctccggcagctcaactccttccactcggtcatgtgtcagcatggcatggaccctgaactgatcaagcaggtggtcaagcagatgttctacatcataggggccatcaccctgaacaaccttctcctgcggaaggacatgtgctcctggagtaaaggcatgcagatcaggtacaatgtcagtcaactggaagaatggctgcgtgacaagaatctgatgaatagtggggctaaagaaaccctggaacctctcattcaggctgctcaacttttgcaagtgaaaaagaaaacagatgatgatgcagaagccatttgttctatgtgcaatgctttaactactgcccagattgtgaaagtgttgaatttgtatactccagttaatgagtttgaagaaagagtctctgtgtcgttcattcgtactatacagatgcgtttacgagacaggaaagactctccccagctgctcatggatgctaaacacatctttcctgtcacctttcctttcaacccatcttccctcgcactagaaaccatccagattccagccagcctcggcctgggcttcatttcacgggtctgaaagtgatgtccaggcaaaaattgacaatacatttcttgcccgaaataagaacccattatttccagtgagttactgaaaatacatttttaaagagaaagtactgattatctcccaaatgagaagtcattaactggaaatctccctagaatactttcatcactttggaaacaaagataggctctttcgtgctgtgttatctttatagcaacactcatccttaaccaactaggtaccgtgagtttacatacaggagaatgatggaaggaagggaggaaggaaaggaggagaaaaatgtgtcttcagctggcagcatttattttaaatccttagcactgagtttgaatggtataaaaagtataacttccatagatgagctgttgttaggaaggcaccaaagaacctcctctgcactaaacaggagaatggaaagaaaagtctccattgagtacatatcatgtcagtttagtaatcaattatgttgatattgttaaactggttcaaagaaataaactggcaatatgtaaagtaattcctcatttgtgtcactatgatatagagatattaaaggaatgttggtttgctaaatagtatagatgtccatttgtactatagtttactgagcattttaaattgctgctacatactgtcttcttaaaatgtaagtgatattaggcactacaataagtttctcttgtcaattctgtttacaattcaatcagatcacagttttaactggattatatgcaaatacctacagattcacctgcacaagtagcagacactggaaagtcatgtagtaatatgacaaaatgcttgacatttaggggtaggattagacaaagtggctattgttgatgtcattatttattcaggatgtattacattgatgtgctcattaattttccctgggtggatattgcgtcagggtacagtgttctgtgaagtgacttatttttaactaccagatctgattccttcagtgcatattttcaaccttgacaggttttctctcttcttaatttattaagaattaatctcggctgggcgcggtggctcacgcctgtaatcccagcactttgggaagccaaggtgggcggatcacttcaggttaggagttggagaccagcctggccaacatggcgaaaccctgtctctactaaaaatacaaaaattagccgggcgtggtggcacttgcctgtaatcccagctactcgggaggctgaggcacgagaatcgattaaacctgggaggcggagattgcaatgagatcgaaccactgcactccagcctgggtgacagagagagacactgccttggaaaaaaaaagaatctcactcactatctagagaggattgtcagaatattcacgattcaggtcttgaaactttgattatgcaaaagaaggtatataataaatatttcattatgattcagtttttaaggctttgcagcttctataagtgttctcagatgccactagataattttaaaagcatcatattagaaatactttaagaagacttatataagaaatagaagattgttgaattttacagaggatttggttcattaagacccagattctgtaagttttcattctgaaattctagttaaacatattcaccatttttcttaggaatcttatacaataaatccttcaggttgcacaaaagcaaattattagttttcattagaaactctggttctgaattacaatcataggttatataaatttaactgttagatggtctataaatcttattaaaatatgtgcaatatttatggaagtcaaacagcttcatatcagtgataaagattgttattaaaagataaatactgtctgttaatttacatgggcctcaagttcctcgtttataaaataagagagttggacactgattcttaacatctcctccacatttaaaattctctcttctcagcccttagattctagagagaaaaagctgcagttactcagtaagtccattctctgatggaaagaccagtgtgtagtgcctgtcaattccttaggattaatcaaatgtaaaatcacaagtttgtgtagctgtaacctttcttaaatgtacatgatttatgtacatgcttttagaaggtcctactatatttgtattataattagtttaagtaatttttattacatcatgtattgctttattcagtttgaatacatttatttatttatttgcagtatcaaccagaaacactaccaattgcatcaaattctcccagtttttcctggttgtcaatgcggttttcaatgcacaattaagtcatagccatttggttcgtaccaaatgtgtcagaatctaacagcatccgataggctgtaagttggggagttgctaagaaaatgcaacgtggtacaggctgtccgcctcagccctggaaatctcccagacctcccccagcttcatcctgtgtagcacgactcaacgtgcaccctgaatcttctcaggtcttccaggtcatgctgtagctgtcactgccatgcagcccttttttttactccggacagctcatgtactgaagcgtcatgaaagaaaggctgtggtctgagcccttctctcccatctcctgtctttgtcctgtcaagtgctggagccagagctcctacagctgcccttggtggtttctcctgttcagcgatggtggcacaaaggttctgctattccagggctccagcttcctcccaggtctacccagagctccagatgggggtctgaattaacctctcttggtggcctggagatttttagtcattgacaagaataccttgtaaccagggaaccccaaggcccagtaaatgattctgtataccattttcttgaaggtacaagaagattctgccgactatggggatctttgggccagtttgaggattgctttccctctgaggttctttctctctgtcagccacactttctcacccaacttcagacacaccctgccagcctttcccctactcattcactcttccccttccctcaacttaatcgtctatcccgttgcctgctgtttgactgtgcactgaaggcaggtggatggagtcagtcctcagttgcccctgctggccttcctggtgcttaccatcagcccaatctttgcacagtccttgttgttcttacttctctgcatgcattccttcagaagatcagtcatcaactttttcttaattcctctgtgacacacaatgggaattcaaaggaagagatcttaaaagtcacaacagttctttatcttaataatcccctccccattcaccttactacatgcagactcacctcacacccttacaacttgaagctgaaaatttaaaagtaatttccctttttgcagcttttcctcaggttaaggctttgatctgcctgagagtaactctaaaaggagggaagataaatatgggataaaatccacaaagtgtagcttctaattcctttggaagtttaaaaaatttccacatatctgatgcttcttttgtcaggtgcagaagcacaaaaacatattccgaagccaactgatagggaatttggggattattgtcagtttggagaatttgctgtgttatttcttcatttccatggatagctcatagttggctctttctgggtgagtaattatgtgtaatatagatcaaatcttttactaaggttacagctacatgttaggggaggctatgaaaatactatattattataatttcagtgcagtgattgttgtgagaaataactttcatggtaaccctaggaaaatgggcacctgccaccatcctgagaagtcctcacacaatgccctttctctcttacacacacacacacacacatacacacacacacacccccgtcactaattcatagagttccttagcaggcatagtcaaggatcctctgggtaatgtcagctgcttagtgataaaacagagccaaaactagtgcatcctgttgaaagtaatgcagaaacagtacctgggtccagatatgctttcctgcggcgctttcctctgttacctcgtttcatcctcacagcagcatggacggtaggtggggtcgcttctacaatcatttctgatgatagcttgggaatagagataggggcagtgacttgcctgatgtcgcacagccctctggctgtcctgctttcccatatggagcagtggtggtgtgggcacctgtgatgcaggagactttaaaaatgtcgtgaggtcacgtgctgcccctcctggtacgtgtggaatgcccctggccagcaaggggtgcttttttatcagagttggcagctggcatgtgggaaccgagcaagtgctgcgtaccaagttacttgttttaaggagaccaagtgctcagcgccaggtggttttcttttttgtcatagttacttgctataactcagcttgacttctgtcatgaatcagtgctctctgggaggatgcaatactctgtttgggcattaattggtagcaggttgtctcaaccaaaaagacaggaaacagcaaaagcctctctgaaattaagaggaaagttactctccccacacccatcagagtctttattggagccaccaggtgagctgtgcagcctggacaggcctgcagctataggccaccttcccagtttaggtcctcagcacaggggagcccaagtcactgggtgccttccgagggctgtcactgggcaggccatatacaagtcagtgtgtgcgtgggcactgcagtgtgtgcatgccgtaggtgttgatgggtgctaggaggggtgtcgtgtgcatgcgcgttgaagaggatctgtattgccgtgacctctgttcatggatgagtgcattgtaatttgttctcaggctgtgctgtgagggccgccttaacccttgctcccttcccttctagagctgccttaagttctccagaacttttcttctgtaaaggatatcttgcctggaagggatatcttgccctgtttctcaaggttttgtgagagttttgactggatgtggccctgcatgaccctccttctcctgtacttcctctttcctttccaaatgggaattagaactgtggggcagcaacagtctcagagccagtgagaggccagcttagagaatgcttctgagttagtgggactctgtgtcacaagtaagcaaatgaatatatgaaagaaattatggagataagttagattcttggtaatacttaaatgtcttgctttctactaaccttttgttactaaaggtaaagggtataactcaaactttttgtggacattcttttcaaaattttttaagaaccctgtactataaaaggttgagtaaaaacaggaaagcgtgctataagttcaaatctgttgtattaccctaaattagataaaccaacctgaattatagtagatttctcaatagatgaggaactgaaaaatactatgtaaaatatcttccaaaatgctttttatactttttttatttgtaatttggtctatctaaaatgttcgttagcttaacttaatgggcgttattggattcatatgactaacgtttcctcagtattgtaatgcttgaaatatttgaaagaaaaaatgttgttttttagttgaaactggtatatataattcagtgcttggcaggttagtatatttttatgcatttttcagagtcagcagtttcaaatcttattgttatcatgttataaaattttagcccacatttcaggctccgtaaatcatttgagccattattttttcccaacaaatggtgaattttttctttaaatgtggatatatatgttgtaatttatgattcctggttatgtatttttgtgggatcctgcagtaaaattgacttttttgtgtctttgggagatttaaattgcgctaacagtgttgcgcaaaaatgagttcatgccatttaacatattgtattttaattattaactgtattaatttactatgaaatggacatccttttaactaaaatggaattgaacattgcagttttcaaatatttttccttgttgggtctggaaaaggaattctactttgatctgcatagaaaattttgatacaattttttgaaagttcttaggtgaaacatttacccattaaaaaggaagcagaaatactgagacatgaaaggcattatcaactaactctagactctagaacccattctagcatatctcacgtgcaatttttaaaaataagttaataattcatctcatatcaacaaaagcctttgaaacatgggttttcactagatatcacctagtgctaagataaaaaccaaaacaatatcagaattacatttatgctctaaatttgtagttgtccattgttgtgcttagtaaatgtgtgtcattaatgctgtattctcctagctattatggaaacttgtttaaataaagatatggat

SEQ ID NO: 5768 - DNA, 5568 bp, Artificial Sequence
  derived and/or modified sequence
atggccgccagcgagctgtacaccaagttcgcccgggtgtggatccccgatcccgaagaagtttggaaaagtgccgagctcctgaaggattacaagccaggagataaggttctactactgcatcttgaagagggtaaagacctcgaatatcatctggatcctaaaactaaggagttgcctcatctccggaatccggatattctcgtgggcgaaaacgaccttacagccctctcttacttacacgagccagcggtgctgcacaacctccgggtccgcttcattgattctaaacttatttacacgtactgcggtatcgtgctcgtggccatcaacccgtatgagcagctcccaatttacggggaagatataattaatgcttactccggacagaacatgggcgacatggacccccatatctttgccgttgccgaggaggcgtacaaacagatggcccgtgatgagcgcaatcagtctatcattgtctccggagagtcaggagctggcaagacagtaagcgccaaatacgcaatgcgctactttgcgaccgtttctggaagtgccagcgaggctaatgtcgaagagaaagtcctggcatccaacccgataatggagagtatagggaacgcaaaaaccacgagaaatgacaattcctcccggtttggcaagtacattgagatcggctttgataagcggtaccggattattggtgccaatatgaggacttatctgcttgaaaagtctcgggtggtgtttcaagcagaggaggagcggaattaccacattttctatcagctctgtgcgtccgctaagctccctgaatttaagatgttgcgtctggggaatgcagacaactttaattatacgaaacagggtggcagccccgtaatagagggggttgatgatgccaaggagatggcacacacccgtcaggcctgtacattgctagggatctccgagagccatcagatggggatattccgaatcctggcaggcattctgcatcttgggaatgtggggttcacctcacgcgatgcagacagttgtactatcccccccaaacacgagcccctgtgtattttctgtgaactgatgggggttgattacgaagagatgtgccactggctctgtcaccgaaaactggcaactgccactgagacatacatcaagccgatctccaagcttcaggcgaccaatgcccgggacgctctcgccaagcacatctacgccaaactatttaattggatagtggataacgtcaaccaagcccttcatagcgccgtgaagcagcattccttcattggggtgcttgacatatatggcttcgagacctttgagatcaacagcttcgagcagttttgtatcaactatgccaatgagaaactgcagcagcagtttaacatgcacgtgtttaaactggagcaggaggaatatatgaaggagcagataccgtggacactgattgacttctacgataatcagccttgcataaaccttatagagtccaagttgggaatacttgatctgcttgacgaggaatgtaagatgccaaaggggacggacgatacgtgggcacagaaactgtataatacccatcttaataagtgcgcgctgtttgagaagccaagactgagtaacaaagccttcataatccagcacttcgcggataaggttgagtaccagtgtgaaggctttcttgagaaaaataaagacactgtgtttgaggagcagatcaaagtcctgaagtctagtaagtttaagatgctacctgagctattccaggatgatgaaaaggccatcagccccacttcagccactagttccgggcgtacgccattgactcgtacaccagccaaacctacaaaagggcgtcctggccagatggcgaaggagcataagaagacggtggggcaccagtttcggaattccctacacctcttgatggaaacactcaatgccaccacacctcattacgtgagatgcattaaacccaacgactttaagtttccttttaccttcgatgagaagcgggctgtccagcaactgagagcatgcggcgtgctagagaccatacggatatccgctgccggcttcccatctaggtggacatatcaggagttcttctcgaggtatagagtcctcatgaagcagaaggacgtgctgtccgacagaaaacaaacctgcaagaacgtactggaaaagctcatcctcgacaaggacaagtatcagtttggcaagaccaaaatcttctttcgcgccgggcaggtcgcttatctggaaaagctgcgggcagataaactacgagccgcctgcattagaattcagaaaacgatcagaggatggctcttaaggaaaaagtatttgaggatgcgcaaagccgccattacgatgcaaaggtatgtgagggggtatcaggcacgttgctatgcgaaatttctgcggagaacaaaagccgcaactataattcagaagtattggaggatgtacgttgtgcggcgccggtataagattagacgcgccgctactattgtattacagtcctacctccgtggctttttggcacggaataggtaccgcaagattctccgtgaacacaaagcagtgatcattcagaaacgggttaggggttggttagcaagaacacactacaagcggtctatgcatgcaattatttatctgcagtgctgcttcaggaggatgatggccaagcgggaacttaagaaattaaaaatagaggctaggtctgtcgagcgctacaagaagctgcacatcgggatggagaataaaatcatgcagttgcaaagaaaagtcgacgaacagaataaggattacaagtgcctagtcgagaaactcactaacttggaggggatttacaactctgaaactgagaagcttcgttcggatttggagcgcctacagctgtctgaagaggaagcaaaagtagctactgggagggtactctcgctccaggaagagattgcaaagttgcggaaagacctcgagcagaccaggtcggaaaaaaaatgcatcgaggagcatgctgatagatataaacaggaaacagaacagctcgtttctaatttaaaggaagaaaacacactacttaagcaggagaaggaggcgttgaatcaccgcatcgtccaacaggctaaggagatgaccgagacaatggagaaaaagctcgtggaagagaccaagcaattggagctagatttgaacgacgaacgcctgaggtaccagaatctcctgaatgagtttagccgcttggaagaacgatacgacgacctaaaagaggagatgaccctcatggttcatgtccccaaacctgggcacaaacgaactgacagtacacactcttccaacgaatcggagtacattttcagcagcgagatcgccgaaatggaggacataccgtctagaaccgaggagccttctgaaaagaaggtccccctggatatgtccctgtttctgaaacttcagaaaagggtgaccgagctggaacaagagaaacaggtgatgcaggacgagcttgaccgcaaggaagaacaagtgctaaggtcaaaggcaaaagaagaggagaggcctcagatcaggggcgctgagctggagtatgaaagcctgaaaagacaagaactcgaaagcgaaaacaagaagctaaaaaacgagctgaacgaactgcgcaaagccctttctgaaaaaagtgctcccgaggttaccgcgcctggcgctccagcctatcgggtgctgatggaacagcttaccagtgtgtcagaggaattggatgttagaaaggaagaggtgctcatactgcgctcgcagttggtcagtcagaaggaggctattcagcccaaggacgataagaacacaatgaccgattctactatcctgttggaggacgtacaaaaaatgaaggacaagggagagattgctcaggcatatatcggactgaaggaaaccaatcgatcttccgccctggactatcacgaactgaacgaggatggagaactgtggctcgtgtacgaggggctgaaacaagctaatcggctcctcgaatcacaactgcagtctcaaaaaaggagtcatgagaacgaggctgaggctcttaggggcgaaatacagtccttaaaggaggagaacaacaggcagcagcagctgctagcccaaaatctgcaactgccacccgaagccagaatcgaagcttcgctgcagcatgagatcacgcgcctaactaatgaaaatctggacctgatggagcaattagaaaaacaggacaagaccgtacggaagctgaaaaaacagctaaaggtttttgctaagaagattggcgagctcgaggttggacagatggagaatatttccccagggcagatcattgatgaacctatccgtccggtgaacatcccacggaaggaaaaagattttcagggaatgcttgagtacaagaaagaagacgaacagaaactggtgaagaacctgattttggaattgaagcctcgtggagtggcggtcaacttgatccctggcctgccagcctatattctgtttatgtgcgtccggcacgcagattatctgaatgatgaccaaaaagtacgcagccttctgacatcgactatcaactctatcaaaaaggtgctcaaaaagcgcggcgacgattttgagactgtctctttttggctgagcaacacctgtagattcttgcactgcctcaagcagtactccggcgaggaaggcttcatgaagcacaatacatcccgacagaacgagcactgcctcacaaacttcgatttagcagaatatagacaggtgctgtcagatctggcgatccagatctatcagcaacttgttagggtgctcgagaacatccttcagccgatgatagtcagtggtatgctggagcacgaaacgattcagggagtgagtggcgtcaagcctactgggcttagaaagagaacctctagcattgctgacgaaggtacttatacactcgactctattctgaggcagctgaattcctttcacagcgtgatgtgccagcatggtatggatcctgaactgatcaagcaggtagtgaagcagatgttctatattattggggctataactctgaacaacttgctccttcggaaggacatgtgctcttggtctaaaggaatgcagattcgatataatgtgagtcaactggaggaatggctgagggataagaacctaatgaactctggagccaaggaaacacttgaaccccttattcaggccgctcagctgcttcaggttaagaagaagactgacgacgatgcggaagcaatctgctctatgtgtaacgccttaacgacggcccagatcgtgaaagtgctgaatctgtacactcccgtcaatgaatttgaggaacgggtcagcgtctcatttatacgtactatacagatgagattgcgggaccgcaaggattccccgcagctccttatggacgccaaacacatttttcctgtcacattcccgttcaaccccagttctctggctctggaaaccattcagatccctgcgagcctgggactcggctttatctctagggtatag

SEQ ID NO: 5769 - DNA, 5559 bp, Artificial Sequence
  derived and/or modified sequence
atggccgccagcgagctgtacaccaagttcgcccgggtgtggatcccagatccagaagaggtgtggaagtctgcggagctgcttaaagactacaaacccggggacaaggtcttgttgttgcatctggaggagggcaaggacctcgaatatcacctggatcctaaaaccaaagagctgcctcatctgcggaaccccgatatactggttggcgagaatgacctgaccgcactctcttatttacacgagcccgctgtgctgcacaatctgagggtgcgatttattgacagcaagttgatttacacctattgtgggatcgtcctcgtggctattaatccctacgaacaattgccaatctacggggaggacattattaacgcctactctggccagaacatgggcgatatggacccccatatctttgccgtcgcagaggaggcatataaacagatggcccgagacgaaagaaaccagtccatcatcgtgtctggcgagtccggcgccggcaaaaccgtctctgcgaagtacgcgatgagatacttcgcaaccgtctccggatcagcatctgaagctaacgtcgaggaaaaggtacttgcttctaacccgattatggagtcaatcggtaacgccaaaacgacacgaaatgacaattcatcgcgctttggtaagtatatcgaaataggctttgacaaacgctatcgaattatcggcgccaatatgcggacttacctgcttgaaaaatctcgcgtggtcttccaggctgaagaggaacggaactatcacatcttctatcagctgtgtgcttcagctaagctccctgagtttaagatgctgcggttaggaaatgcggacaattttaattacaccaagcaaggcggctcccccgtgatagagggggtggatgacgctaaggaaatggcacacacaagacaagcctgtacgctcctgggaatctccgaatctcaccagatgggcatctttagaattctggctggcatcctccacctggggaacgtcggtttcacttccagggacgctgattcgtgcaccatccccccaaaacacgagcccctgtgtattttctgcgaattaatgggtgtcgactatgaggagatgtgtcattggctatgtcaccgcaaactggcaacagctacagagacatacatcaaacccatctctaaactccaagccactaacgcaagggatgcactcgcaaagcatatctacgccaagctttttaactggattgtggacaacgtgaaccaggccctgcactctgcggtgaaacagcattcttttataggagtactcgacatttacgggttcgagacttttgaaattaattctttcgagcagttctgcatcaattacgctaacgagaagctgcagcaacagtttaatatgcatgtgttcaagctggaacaggaagaatacatgaaggaacagatcccatggacactgatagatttctacgataatcagccatgcattaatcttatcgaatcaaaacttggcatccttgacctcctcgatgaggaatgtaagatgccaaaggggaccgacgacacatgggcgcagaaactttacaatacccatctaaacaaatgtgccctattcgagaagcctcggctgtccaataaagcttttattattcagcatttcgcagacaaggtcgagtatcagtgtgaggggttcttagaaaagaataaagacactgtgttcgaggagcagatcaaggttctcaagtcaagtaaattcaagatgctgcccgagctgttccaggacgacgagaaagcgatttctccgaccagtgctacatcatctggcaggacccccttgactcgcacacccgcgaagccaaccaagggccgcccaggccaaatggccaaggagcacaaaaaaaccgtcgggcaccagttcaggaatagtttacatctgctgatggaaaccctgaatgccaccacccctcactacgtgcggtgcatcaaacctaacgacttcaagtttccctttacattcgatgagaagcgcgctgtgcaacaattacgggcctgtggcgtgcttgagacaatcaggatctctgccgctggttttccttctcgctggacttatcaagaattttttagtagatatagggtccttatgaagcagaaggatgtgctgtctgatagaaaacaaacttgtaaaaacgtgcttgagaagctgattttggacaaagataagtatcagtttgggaaaacgaaaattttctttcgcgcaggccaagtggcatacctcgagaagctgagagccgacaagttgagggcagcatgcatcaggatccagaagactataaggggttggctcctgcggaagaaatacctgaggatgcggaaggcggcaattaccatgcagagatacgtaagagggtaccaggcgagatgctacgccaagtttctgaggagaacaaaggctgccacaatcatccagaaatactggaggatgtatgttgtgcgcagacgatataaaattcggagggccgccactattgtcctccaaagttaccttcggggattcctggcccgtaatagatatcgcaagatactccgggaacacaaggccgtgattatccagaagcgggtacgcggttggcttgcaagaactcactacaagcgtagtatgcatgctatcatttaccttcagtgttgtttccgcaggatgatggccaagcgcgaactaaagaagctgaagatcgaggcacggtctgtggagaggtacaaaaaactgcacattggtatggagaataaaatcatgcagctacagagaaaggtcgacgaacagaacaaggattataagtgcctcgtggagaagctgacaaatctggagggaatctataattctgagaccgagaagcttaggagcgatctggagagactgcaattgtccgaggaagaggccaaggtggcgaccggtagagttttatccctgcaggaggaaatcgcaaagctgaggaaagatctggaacagaccaggtcggaaaaaaaatgtatagaagagcatgccgatcgctacaagcaggaaacagagcagcttgtcagcaatctcaaagaggaaaacacactccttaaacaggagaaagaagcacttaaccaccggatcgtccaacaggctaaggaaatgaccgagacaatggagaaaaaactggttgaggaaacaaaacagttagagttggacctgaacgatgagagacttcgctatcaaaacctgctcaatgaatttagtcgactggaggagcggtatgacgatctgaaggaagagatgaccctgatggtccatgtcccgaaacccggtcataaaaggactgacagtactcatagcagcaatgagagtgaatacattttctcttctgagatcgccgaaatggaagatatcccttcacggacagaggagccctccgaaaaaaaggtgccgctggacatgagtctttttctgaagctgcaaaaacgagtaactgagttggagcaggaaaaacaggtgatgcaggacgagttggaccgaaaagaagagcaggtgctgagatcaaaagccaaggaggaagagagaccccagattaggggtgccgagcttgaatacgagtctctgaaaagacaggaactcgagagtgagaacaagaagctgaagaacgagctgaatgagctgcgaaaggccctcagtgagaaatcggctcccgaggtgacagccccaggagctccagcgtacagagtgctgatggaacagctaacatccgtcagtgaggagctggacgtgcggaaagaggaggtgttgattcttcgctcccagctggtttctcagaaggaagctatccagccgaaaaataccatgactgactccactattttgctggaagacgtgcaaaagatgaaggataaaggggaaattgcccaggcttatatcggactcaaagagaccaatcgatccagcgccctggactatcacgagctcaacgaggacggggagctctggttagtgtacgaggggctcaagcaggcaaatcgactgttggagtcgcaattgcaaagccaaaagagaagccatgaaaatgaggcagaagcgcttcggggtgagattcagtctctgaaggaagagaataatcgacaacagcagcttctggctcaaaatctgcagcttcccccagaggccaggattgaagcatcactccaacatgaaattacacgcctgacaaatgaaaacttggacctaatggagcagctcgaaaagcaggacaaaactgtacggaaacttaaaaagcagttgaaagtcttcgcaaaaaagattggtgagcttgaggtggggcagatggagaatatcagccctggtcagataattgatgaacccatccggccagtgaatataccacggaaagagaaagatttccagggaatgctcgaatacaagaaagaagacgagcaaaagctcgttaagaatctgatcctggagttgaaaccaaggggcgtcgctgtgaatctgatacctggcctccctgcgtatatcttgttcatgtgcgtacgccatgctgattacctgaacgatgatcagaaggtacggagcctccttacctcaaccatcaatagtatcaaaaaagtgctgaaaaagaggggcgatgactttgagaccgtgagtttttggctgagtaacacctgtcggtttctgcattgtttgaagcaatattctggggaagagggatttatgaaacacaatactagcagacagaatgaacattgcttaaccaacttcgatcttgccgagtatcgacaggtcctctctgatctggccattcagatataccaacaactagtccgcgtgctcgagaacatcctgcagcccatgattgtgtccgggatgctggaacacgagaccatacagggcgtgtccggggttaagcctacggggctcaggaagcgcacgagcagtattgccgatgaaggcacctacacactagattcaattcttaggcagttaaactcattccattccgtgatgtgccagcacggcatggatccggagctcatcaagcaagtcgtgaagcaaatgttctatataatcggcgcaataacactcaataacctgctcctgagaaaggacatgtgctcatggagtaaagggatgcagatacgatataatgtctcccagttagaggagtggctccgggataagaatctgatgaatagcggcgccaaagagacacttgagcctcttatccaagccgcccagctgcttcaagtaaaaaaaaaaactgacgatgatgccgaagctatatgctctatgtgtaacgctctgacaactgctcagatagtgaaagtactcaacttatacacacccgtaaacgagttcgaggagagagtttccgtgagcttcatccgcactattcagatgcggctgcgcgaccgcaaggattctcctcagctgttgatggatgccaaacatatttttcccgtgactttcccgttcaatcctagttccctggccctcgagacaattcagattccagcatcactcgggcttggtttcatcagtcgggtgtag

SEQ ID NO: 5770 - DNA, 5567 bp, Artificial Sequence
  derived and/or modified sequence
atggctgcctcagaactctacaccaagtttgctcgcgtatggatccctgaccccgaggaagtgtggaagtctgctgagctgctgaaggactacaagcccggtgataaagtcctgctgctgcacttggaggagggcaaggatctcgaataccacctcgatcccaagaccaaagaactccctcacctgagaaaccctgatatactggttggggaaaacgacctgaccgccctcagttatctgcatgaacccgctgttctgcacaaccttcgggtgcggttcattgatagtaaactgatttatacatactgtggcatagtgctagtggccatcaatccatatgaacagctgccaatttacggtgaagacattattaacgcctattcaggccaaaacatgggagacatggatccccacatctttgcggtagctgaggaagcatataaacagatggctcgcgacgaacgcaatcagtccattatagtgagcggggaatccggcgctggtaaaactgtgagtgctaagtacgccatgaggtatttcgccacagtgagcggaagtgcttccgaggctaatgtggaggagaaagtcctcgcatctaaccctataatggagtccatcggcaatgccaagaccacgagaaacgacaattcttccaggtttggaaagtacatcgaaatcggcttcgataagcggtaccggattattggagcgaatatgagaacctatttgcttgagaaatcccgggtcgtgttccaggccgaagaggaaagaaattaccacattttttaccagctctgtgccagcgcgaaattgcccgaatttaagatgctcaggttagggaatgccgacaatttcaactataccaagcaggggggaagccctgtcatcgagggggtggatgatgcaaaggaaatggcacacacccgccaagcgtgtacactcctgggtattagcgagagtcatcagatgggaatctttcgaattcttgctggtatactacatctgggaaacgtaggcttcacatcacgcgatgctgattcttgcactatacctccgaagcatgaacctctctgcattttttgcgagctgatgggagtggattacgaggagatgtgccactggttgtgccaccggaagctggccactgccacagaaacttatattaaaccaatatccaaactccaagctactaatgctagggacgctctcgcaaagcacatctacgccaagctgtttaattggattgtggacaacgtcaaccaggcccttcactccgccgtcaagcagcacagttttatcggtgtgttggacatatacggcttcgagaccttcgagatcaatagtttcgaacagttctgtatcaattacgctaacgagaaactgcagcaacaatttaatatgcacgtttttaaattggaacaggaggagtatatgaaggaacagattccttggaccctgatcgacttttacgacaatcaaccctgtatcaacctgatagaatctaagctcggaatcctggatttgcttgacgaggagtgtaagatgccaaaaggaactgatgacacctgggctcagaagctctataatacccatctgaataaatgcgctttattcgagaaacccagactgtctaacaaagcgttcattatccagcatttcgctgacaaagttgagtatcaatgtgaaggatttcttgaaaagaacaaggacaccgtgtttgaggaacagattaaggtgttgaaatctagcaagtttaaaatgctgcccgaactctttcaggacgacgagaaagctatttcccccacaagtgccacaagttccggcaggacacctctcaccagaactcccgctaaaccaacgaaagggaggcctggccaaatggcaaaggagcataagaagacggtgggccaccagttcaggaactcccttcatctgttgatggagaccctcaacgccacgactccccactacgtccgatgcatcaagcctaacgatttcaagttcccatttacgtttgatgaaaagagggcagtacagcagctccgtgcgtgcggagtgctggaaactatcagaatctcagcagcagggtttccgagccgctggacctatcaagaattcttttcacgatatcgtgtgctgatgaagcagaaggatgtgctgtccgatcgaaagcagacatgtaaaaacgtcttggaaaagttgattctcgataaggataaatatcaattcggcaagaccaagatctttttccgtgccggacaagtggcttacctggagaagctacgtgcagacaaattaagagctgcctgcataagaatccaaaaaacaattcgcggttggcttctccgaaagaaatatctgaggatgcgaaaggcagcgatcacaatgcagcgctatgtgagggggtaccaggctcggtgctatgctaagtttcttaggcgaacaaaagccgcaaccatcatccagaaatattggagaatgtacgtggtacgcagacgctataagatccgacgcgctgcaaccatagtcttacagtcttacctaaggggatttctcgccagaaatagataccgcaagattctgcgagagcacaaagctgtaataattcagaaaagagtgcgtgggtggcttgccagaacacactataagaggagcatgcacgcaattatttatctgcagtgctgcttccgcagaatgatggcaaaaagggagttgaaaaaactgaagatcgaagctcgcagtgtggaaagatacaaaaaactgcacattggcatggaaaacaaaattatgcagctgcagaggaaagtagacgaacagaacaaggattacaaatgcctggtagaaaaattaacgaatctcgaggggatttataatagtgaaaccgaaaagcttcggtccgatctggaacggttgcagctgtcggaggaggaagccaaggtggccactggaagggtgctgagtcttcaagaggaaatagcgaaactgcgtaaagacctggaacaaacaaggtcagagaagaagtgcattgaggaacatgcagaccggtataagcaagagacagaacagctcgtgtccaatctaaaggaggaaaacacccttctcaaacaggagaaggaggctctgaatcaccgtatcgtgcaacaagctaaagaaatgacagaaacgatggaaaagaaactcgtggaagagaccaagcagttagagcttgatctcaacgacgaacgactgagataccagaatcttctcaacgaattttccagacttgaggagagatacgacgacctgaaagaggagatgaccttgatggtccatgttcctaagcctggtcataaacgcacggacagcacccactcatccaatgaatcggagtatatatttagcagtgaaatagccgagatggaagatattcctagccggactgaggagccctctgaaaaaaaggtgcccctagatatgagcttattccttaagctgcaaaagcgggtcactgaactcgaacaggaaaagcaagtcatgcaagatgagctggatcgaaaggaggagcaggtcctccggtcaaaagcaaaggaggaggagaggccccagattagaggcgctgagctcgaatatgagtcactgaagcgtcaagaactagagtcagaaaacaaaaaactcaaaaacgagctgaacgagctgagaaaagcattaagcgagaagagtgcaccagaagtgacagcccctggagcacctgcctatagagtgctaatggagcaactgacctctgtctccgaggagcttgatgtgagaaaggaagaggtgttgatccttcgttcccagctcgtgtcccagaaagaggccattcagcctaaggacgataaaaacaccatgaccgacagcaccatactcctcgaagatgttcagaaaatgaaggacaaaggcgaaatcgcccaggcctacattgggctgaaggaaacgaacaggagttccgccttggactaccatgagctgaatgaggacggtgagctctggttggtatatgaaggactcaaacaggcgaacagattgctggagtcacagctgcagtcgcagaagagaagccacgagaatgaagctgaagccttgcggggagaaattcagagtttaaaggaagagaacaaccgccagcagcaactgctcgcccaaaaccttcagttaccccctgaagctagaatcgaggccagtttgcagcacgagataactagattaaccaatgagaaccttgacctgatggaacagctggagaagcaggacaagacagttcgcaaactgaaaaaacaactgaaagtctttgcaaagaaaattggtgagcttgaagtcggacagatggaaaatatttcacctggtcagatcatcgacgaaccgatccgccctgtcaacataccacggaaagagaaggacttccaggggatgctcgaatacaagaaggaagacgagcagaaactggtgaagaacctcattctggaactcaagccaagaggggtggctgtgaacctgatccccggtctccctgcttacatcctgttcatgtgtgtacgacatgcggattatctcaacgacgatcagaaggttagatcccttctcacctctactattaacagtattaagaaagtgctcaagaagcggggagacgacttcgagacagtcagcttttggttatctaatacttgtcggtttttacactgtctgaaacagtactctggagaagagggatttatgaagcataacacctccagacaaaacgagcactgtttgactaattttgacctggctgagtacagacaggtgcttagcgacctggccatccaaatatatcagcagctggtacgggtcctggaaaacattctgcaacccatgattgtctcaggcatgctagagcatgagactattcagggagtgagcggcgtgaagccaacaggactgcggaaacggacgagttctatagcagatgaagggacttatacactggacagtatcctgcggcaacttaacagctttcattcggtgatgtgtcagcacggaatggaccctgaactgattaagcaagtggtgaagcagatgttctatataatcggggctatcactctcaacaatctgctcctccgcaaggacatgtgcagctggtcaaagggcatgcagattcgctacaacgtttcccagttggaggagtggctgagggacaaaaacctgatgaatagcggggcaaaagaaacccttgaaccgctcatccaggcagctcagctcctacaggtgaagaagaaaacggatgatgacgcggaagcgatttgctccatgtgcaacgccttgactacagctcagattgtgaaggttttaaacctgtatacgcccgtgaacgagttcgaagagcgcgtgagcgtaagttttatacgtactatccagatgaggttgagagatagaaaggactctccacagctgctcatggacgccaaacacatattccccgtgacctttccatttaatccctcctccttggctcttgaaacaatccagatccctgccagtctcggtctgggtttcatcagccgtgtcta

SEQ ID NO: 5771 - DNA, 5558 bp, Artificial Sequence
  derived and/or modified sequence
atggctgcctctgagctgtacaccaaatttgctagggtttggattcctgatccagaggaagtctggaagtctgctgagctgctgaaggattacaagcccggagataaagtactgctcctccacttggaggaaggcaaagacctggaatatcatctcgatccaaagacgaaggaactgcctcatctgaggaatccagacattctggttggcgaaaatgatctgaccgcactaagctacttacatgaacctgccgttctgcacaacttacgcgtgcggtttattgatagcaaattaatttatacctactgcgggatcgtcctggtggccataaacccttatgaacaactcccaatatatggcgaagacatcatcaatgcctacagtgggcaaaatatgggggacatggaccctcatatttttgcagtcgctgaagaggcctacaagcagatggccagggatgagaggaatcaatcgatcattgtgagcggtgaatcaggcgcaggcaaaacggtctcagctaagtacgcaatgcgttacttcgcgactgtgagcggaagcgccagtgaagcgaacgtggaggaaaaggtgctagcaagcaatcccatcatggagtcaataggcaacgctaagactactagaaatgacaatagcagccgctttggtaagtacatcgagattggtttcgacaagcgatatcgaatcataggagcaaatatgagaacctacttgttggaaaagagcagagtagtgtttcaggctgaagaagagagaaattatcacattttttaccaactgtgcgcctctgcgaaactgcccgagttcaaaatgttgcgcctaggtaatgcagacaatttcaactatactaagcagggaggttctcccgtgatcgaaggcgttgacgacgcaaaggaaatggctcatacacgccaggcttgcactctgctaggcatctcagaaagccaccagatggggatcttccggatcctcgccggaatcctgcacctggggaacgtcggatttacctcccgtgacgctgattcatgcaccatcccacctaaacacgagccactgtgtattttttgcgagctgatgggggtcgattatgaggaaatgtgtcactggctctgtcatcggaaactagcaacagccactgagacgtacataaaacccatcagcaagctgcaggctactaacgcaagagacgctctggcaaagcatatctacgccaagctcttcaattggattgtggataatgtgaaccaggcacttcacagcgcagtcaaacagcattcttttatcggagtcctcgacatctatggatttgaaacctttgaaataaactcgttcgagcagttttgtatcaattacgcaaacgagaagctccaacagcagttcaacatgcacgtgtttaaactggaacaggaggaatatatgaaagagcagattccgtggaccctgatagacttttatgacaaccaaccatgtataaatctgatcgagtccaaactaggcattctggatttgctcgatgaagaatgcaagatgcctaagggaacagatgatacatgggctcaaaagctttacaatacgcacctcaacaagtgcgccctgttcgagaaacccaggttgtccaataaggcatttataatacagcacttcgcggacaaagtggagtaccaatgtgaggggttcctcgagaagaacaaagacaccgtatttgaggaacagatcaaagtgcttaaatcatccaaattcaagatgctgcccgaactcttccaggatgatgagaaggctattagcccgaccagtgccacttctagcggtcgcacacctctgacaaggactcctgccaagccgaccaaggggagaccaggacagatggcaaaagagcacaaaaaaactgtgggtcatcaatttcggaatagtctgcaccttctgatggaaacccttaatgcaactacaccacattatgtgcgctgcattaagcccaatgactttaaatttcctttcacttttgacgaaaaacgggcagtacagcagctccgtgcctgcggggtgctggaaacgattaggatctccgcagcagggtttccttctagatggacttatcaggaatttttttccagatatagggtgctgatgaaacagaaggatgtgctgtcagatcgaaagcagacgtgtaagaacgtgctggagaaattgatcctggataaggataaatatcagttcggaaagactaagattttttttagggctggccaagtggcttacctggagaagctgcgcgctgacaagttgcgggcagcctgcattcggatccaaaaaaccattcgaggttggctgctgcgaaaaaagtaccttaggatgaggaaggctgctattaccatgcaacgctatgtgagaggttaccaggcgaggtgctacgccaagttccttcgaaggaccaaagccgctaccataatccagaagtattggaggatgtacgtcgtccggaggaggtataagataaggcgagccgctaccatcgtgctgcagtcttatttgcgaggttttctggccagaaatagatacaggaagattctacgagaacacaaggctgtgatcatccagaagcgcgttagaggctggctggccaggacacattataagaggagcatgcatgcaatcatctacctgcagtgttgttttaggcgcatgatggctaaacgcgagttgaaaaagctcaagatcgaggctaggagtgtggagaggtacaagaaactccatatcggcatggagaacaaaataatgcagctacaacggaaggtggatgaacaaaacaaggactataaatgtcttgtggaaaaactgacaaatctcgagggaatatacaattccgagaccgagaagctcagaagcgatttggagcgactgcagctctccgaggaggaggccaaggtcgctacagggcgagtcctgtctctgcaggaggaaattgccaagttacgaaaagacctcgaacagacaagatcggaaaagaaatgcatagaggagcacgctgaccgctacaaacaggagaccgagcagttggttagcaatctcaaagaggagaatactctcctgaagcaggagaaggaggccctcaaccacaggattgtgcagcaggcaaaagaaatgaccgaaacaatggaaaagaagctagtggaggaaaccaagcagctggaactcgatcttaatgatgagcgcttacgataccagaatctcttgaatgagtttagcagattggaggaacgatacgatgacctgaaggaagaaatgactctcatggttcacgtgccgaagcccggacataagcgcacagattcaacccactctagcaatgagagcgagtatattttttcctccgagatagctgaaatggaggacattccttctaggaccgaggaaccctcagaaaaaaaagtgcccctggacatgagcctcttcctgaagctgcagaaacgcgtgacagaactggagcaggaaaagcaggtgatgcaggacgaactcgaccggaaggaggagcaagtcctgcgatccaaagctaaagaagaagaacgccctcaaattcggggtgccgagctcgaatacgagtccctgaaaagacaggagctggagtcagagaacaagaagttaaaaaatgagcttaatgagctgcgcaaggccctaagcgagaaaagcgcccctgaagtgacggcccctggggctcctgcttatcgcgtgctgatggagcagctgacctcagtttcggaggaattagatgtaaggaaagaggaggtactaatcctgcggtcgcagttggtatcacagaaggaggccattcaacccaaaaataccatgactgattccacaatcttactggaggatgtgcagaaaatgaaagacaaaggcgaaatcgcccaggcctatataggcttgaaagaaaccaacagatccagcgccctggactatcatgagctgaatgaagacggcgagctgtggctggtttacgagggactcaagcaggcaaacaggcttctcgagtcccagctccaatcccagaagcgcagccacgagaacgaagctgaagccctgagaggcgagattcagtccctgaaagaagagaacaaccgacagcagcagctgctggcgcagaatttacagttaccccctgaagccaggatcgaggctagcctgcagcatgagattacccgtctcaccaatgagaatcttgatctgatggaacagctggagaaacaggataagactgttcgtaagctgaaaaagcaattgaaggtctttgctaaaaaaataggcgaattagaggtgggccagatggagaatatttcacctgggcaaataatcgacgagccaattcgcccagtcaacattccccgaaaggaaaaggatttccagggcatgctcgaatataagaaggaggacgagcaaaaactcgttaagaatctgattttagaactgaaacccaggggtgtggccgtaaatcttatccctggactccccgcatacatcctgttcatgtgcgtgcgccacgctgattacctgaacgatgaccagaaagtgcggagcttgctgacatccactatcaatagcattaaaaaggtgctgaagaagcgcggagatgatttcgagacggttagcttttggctcagcaacacttgtcggtttctacactgcttgaagcagtacagtggcgaagagggatttatgaaacataatactagccgacaaaacgaacattgtctgaccaacttcgacctggccgaataccgccaggtgttgtccgacttggccattcagatataccagcagcttgtgcgagtcctggagaacatcctgcagccaatgatcgtgagtggtatgctggaacacgagacgattcagggtgtatcgggggttaaacccaccgggctgcggaaaaggacctcttcaatcgccgacgaggggacctacaccctagattctatccttcgtcagctgaacagctttcactccgtgatgtgccaacatgggatggatcctgagctgattaaacaggtagtcaagcagatgttttacattataggggcaataaccctgaacaatctgttactgagaaaagacatgtgctcctggtcgaaaggcatgcagattcggtacaatgtgagccaactggaagagtggctgcgggacaagaacctgatgaattctggggctaaggagacattggagccacttatccaagccgcacagctgctgcaagtgaaaaagaaaacagacgatgacgccgaagctatctgcagtatgtgtaatgcactgacgactgcccagatcgtgaaagttctgaacttgtacaccccagtgaacgagtttgaagaaagggtgtccgtgagcttcataagaacgatccagatgcgcctacgcgaccgtaaggacagtccccagttgctgatggatgcaaagcatattttccccgttacgttccctttcaacccctcaagtctggctctcgagacaattcaaatccccgcaagcctagggctgggcttcatctcccgcgtgta

SEQ ID NO: 5772 - DNA, 5568 bp, Artificial Sequence
  derived and/or modified sequence
atggccgccagcgagctgtacaccaagttcgccagagtgtggatccccgaccccgaggaggtgtggaagagcgccgagctgctgaaggactacaagcccggcgacaaggtgctgctgctgcacctggaggagggcaaggacctggagtaccacctggaccccaagaccaaggagctgccccacctgagaaaccccgacatcctggtgggcgagaacgacctgaccgccctgagctacctgcacgagcccgccgtgctgcacaacctgagagtgagattcatcgacagcaagctgatctacacctactgcggcatcgtgctggtggccatcaacccctacgagcagctgcccatctacggcgaggacatcatcaacgcctacagcggccagaacatgggcgacatggacccccacatcttcgccgtggccgaggaggcctacaagcagatggccagagacgagagaaaccagagcatcatcgtgagcggcgagagcggcgccggcaagaccgtgagcgccaagtacgccatgagatacttcgccaccgtgagcggcagcgccagcgaggccaacgtggaggagaaggtgctggccagcaaccccatcatggagagcatcggcaacgccaagaccaccagaaacgacaacagcagcagattcggcaagtacatcgagatcggcttcgacaagagatacagaatcatcggcgccaacatgagaacctacctgctggagaagagcagagtggtgttccaggccgaggaggagagaaactaccacatcttctaccagctgtgcgccagcgccaagctgcccgagttcaagatgctgagactgggcaacgccgacaacttcaactacaccaagcagggcggcagccccgtgatcgagggcgtggacgacgccaaggagatggcccacaccagacaggcctgcaccctgctgggcatcagcgagagccaccagatgggcatcttcagaatcctggccggcatcctgcacctgggcaacgtgggcttcaccagcagagacgccgacagctgcaccatcccccccaagcacgagcccctgtgcatcttctgcgagctgatgggcgtggactacgaggagatgtgccactggctgtgccacagaaagctggccaccgccaccgagacctacatcaagcccatcagcaagctgcaggccaccaacgccagagacgccctggccaagcacatctacgccaagctgttcaactggatcgtggacaacgtgaaccaggccctgcacagcgccgtgaagcagcacagcttcatcggcgtgctggacatctacggcttcgagaccttcgagatcaacagcttcgagcagttctgcatcaactacgccaacgagaagctgcagcagcagttcaacatgcacgtgttcaagctggagcaggaggagtacatgaaggagcagatcccctggaccctgatcgacttctacgacaaccagccctgcatcaacctgatcgagagcaagctgggcatcctggacctgctggacgaggagtgcaagatgcccaagggcaccgacgacacctgggcccagaagctgtacaacacccacctgaacaagtgcgccctgttcgagaagcccagactgagcaacaaggccttcatcatccagcacttcgccgacaaggtggagtaccagtgcgagggcttcctggagaagaacaaggacaccgtgttcgaggagcagatcaaggtgctgaagagcagcaagttcaagatgctgcccgagctgttccaggacgacgagaaggccatcagccccaccagcgccaccagcagcggcagaacccccctgaccagaacccccgccaagcccaccaagggcagacccggccagatggccaaggagcacaagaagaccgtgggccaccagttcagaaacagcctgcacctgctgatggagaccctgaacgccaccaccccccactacgtgagatgcatcaagcccaacgacttcaagttccccttcaccttcgacgagaagagagccgtgcagcagctgagagcctgcggcgtgctggagaccatcagaatcagcgccgccggcttccccagcagatggacctaccaggagttcttcagcagatacagagtgctgatgaagcagaaggacgtgctgagcgacagaaagcagacctgcaagaacgtgctggagaagctgatcctggacaaggacaagtaccagttcggcaagaccaagatcttcttcagagccggccaggtggcctacctggagaagctgagagccgacaagctgagagccgcctgcatcagaatccagaagaccatcagaggctggctgctgagaaagaagtacctgagaatgagaaaggccgccatcaccatgcagagatacgtgagaggctaccaggccagatgctacgccaagttcctgagaagaaccaaggccgccaccatcatccagaagtactggagaatgtacgtggtgagaagaagatacaagatcagaagagccgccaccatcgtgctgcagagctacctgagaggcttcctggccagaaacagatacagaaagatcctgagagagcacaaggccgtgatcatccagaagagagtgagaggctggctggccagaacccactacaagagaagcatgcacgccatcatctacctgcagtgctgcttcagaagaatgatggccaagagagagctgaagaagctgaagatcgaggccagaagcgtggagagatacaagaagctgcacatcggcatggagaacaagatcatgcagctgcagagaaaggtggacgagcagaacaaggactacaagtgcctggtggagaagctgaccaacctggagggcatctacaacagcgagaccgagaagctgagaagcgacctggagagactgcagctgagcgaggaggaggccaaggtggccaccggcagagtgctgagcctgcaggaggagatcgccaagctgagaaaggacctggagcagaccagaagcgagaagaagtgcatcgaggagcacgccgacagatacaagcaggagaccgagcagctggtgagcaacctgaaggaggagaacaccctgctgaagcaggagaaggaggccctgaaccacagaatcgtgcagcaggccaaggagatgaccgagaccatggagaagaagctggtggaggagaccaagcagctggagctggacctgaacgacgagagactgagataccagaacctgctgaacgagttcagcagactggaggagagatacgacgacctgaaggaggagatgaccctgatggtgcacgtgcccaagcccggccacaagagaaccgacagcacccacagcagcaacgagagcgagtacatcttcagcagcgagatcgccgagatggaggacatccccagcagaaccgaggagcccagcgagaagaaggtgcccctggacatgagcctgttcctgaagctgcagaagagagtgaccgagctggagcaggagaagcaggtgatgcaggacgagctggacagaaaggaggagcaggtgctgagaagcaaggccaaggaggaggagagaccccagatcagaggcgccgagctggagtacgagagcctgaagagacaggagctggagagcgagaacaagaagctgaagaacgagctgaacgagctgagaaaggccctgagcgagaagagcgcccccgaggtgaccgcccccggcgcccccgcctacagagtgctgatggagcagctgaccagcgtgagcgaggagctggacgtgagaaaggaggaggtgctgatcctgagaagccagctggtgagccagaaggaggccatccagcccaaggacgacaagaacaccatgaccgacagcaccatcctgctggaggacgtgcagaagatgaaggacaagggcgagatcgcccaggcctacatcggcctgaaggagaccaacagaagcagcgccctggactaccacgagctgaacgaggacggcgagctgtggctggtgtacgagggcctgaagcaggccaacagactgctggagagccagctgcagagccagaagagaagccacgagaacgaggccgaggccctgagaggcgagatccagagcctgaaggaggagaacaacagacagcagcagctgctggcccagaacctgcagctgccccccgaggccagaatcgaggccagcctgcagcacgagatcaccagactgaccaacgagaacctggacctgatggagcagctggagaagcaggacaagaccgtgagaaagctgaagaagcagctgaaggtgttcgccaagaagatcggcgagctggaggtgggccagatggagaacatcagccccggccagatcatcgacgagcccatcagacccgtgaacatccccagaaaggagaaggacttccagggcatgctggagtacaagaaggaggacgagcagaagctggtgaagaacctgatcctggagctgaagcccagaggcgtggccgtgaacctgatccccggcctgcccgcctacatcctgttcatgtgcgtgagacacgccgactacctgaacgacgaccagaaggtgagaagcctgctgaccagcaccatcaacagcatcaagaaggtgctgaagaagagaggcgacgacttcgagaccgtgagcttctggctgagcaacacctgcagattcctgcactgcctgaagcagtacagcggcgaggagggcttcatgaagcacaacaccagcagacagaacgagcactgcctgaccaacttcgacctggccgagtacagacaggtgctgagcgacctggccatccagatctaccagcagctggtgagagtgctggagaacatcctgcagcccatgatcgtgagcggcatgctggagcacgagaccatccagggcgtgagcggcgtgaagcccaccggcctgagaaagagaaccagcagcatcgccgacgagggcacctacaccctggacagcatcctgagacagctgaacagcttccacagcgtgatgtgccagcacggcatggaccccgagctgatcaagcaggtggtgaagcagatgttctacatcatcggcgccatcaccctgaacaacctgctgctgagaaaggacatgtgcagctggagcaagggcatgcagatcagatacaacgtgagccagctggaggagtggctgagagacaagaacctgatgaacagcggcgccaaggagaccctggagcccctgatccaggccgcccagctgctgcaggtgaagaagaagaccgacgacgacgccgaggccatctgcagcatgtgcaacgccctgaccaccgcccagatcgtgaaggtgctgaacctgtacacccccgtgaacgagttcgaggagagagtgagcgtgagcttcatcagaaccatccagatgagactgagagacagaaaggacagcccccagctgctgatggacgccaagcacatcttccccgtgaccttccccttcaaccccagcagcctggccctggagaccatccagatccccgccagcctgggcctgggcttcatcagcagagtgtag

SEQ ID NO: 5773 - DNA, 5559 bp, Artificial Sequence
  derived and/or modified sequence
atggccgccagcgagctgtacaccaagttcgccagagtgtggatccccgaccccgaggaggtgtggaagagcgccgagctgctgaaggactacaagcccggcgacaaggtgctgctgctgcacctggaggagggcaaggacctggagtaccacctggaccccaagaccaaggagctgccccacctgagaaaccccgacatcctggtgggcgagaacgacctgaccgccctgagctacctgcacgagcccgccgtgctgcacaacctgagagtgagattcatcgacagcaagctgatctacacctactgcggcatcgtgctggtggccatcaacccctacgagcagctgcccatctacggcgaggacatcatcaacgcctacagcggccagaacatgggcgacatggacccccacatcttcgccgtggccgaggaggcctacaagcagatggccagagacgagagaaaccagagcatcatcgtgagcggcgagagcggcgccggcaagaccgtgagcgccaagtacgccatgagatacttcgccaccgtgagcggcagcgccagcgaggccaacgtggaggagaaggtgctggccagcaaccccatcatggagagcatcggcaacgccaagaccaccagaaacgacaacagcagcagattcggcaagtacatcgagatcggcttcgacaagagatacagaatcatcggcgccaacatgagaacctacctgctggagaagagcagagtggtgttccaggccgaggaggagagaaactaccacatcttctaccagctgtgcgccagcgccaagctgcccgagttcaagatgctgagactgggcaacgccgacaacttcaactacaccaagcagggcggcagccccgtgatcgagggcgtggacgacgccaaggagatggcccacaccagacaggcctgcaccctgctgggcatcagcgagagccaccagatgggcatcttcagaatcctggccggcatcctgcacctgggcaacgtgggcttcaccagcagagacgccgacagctgcaccatcccccccaagcacgagcccctgtgcatcttctgcgagctgatgggcgtggactacgaggagatgtgccactggctgtgccacagaaagctggccaccgccaccgagacctacatcaagcccatcagcaagctgcaggccaccaacgccagagacgccctggccaagcacatctacgccaagctgttcaactggatcgtggacaacgtgaaccaggccctgcacagcgccgtgaagcagcacagcttcatcggcgtgctggacatctacggcttcgagaccttcgagatcaacagcttcgagcagttctgcatcaactacgccaacgagaagctgcagcagcagttcaacatgcacgtgttcaagctggagcaggaggagtacatgaaggagcagatcccctggaccctgatcgacttctacgacaaccagccctgcatcaacctgatcgagagcaagctgggcatcctggacctgctggacgaggagtgcaagatgcccaagggcaccgacgacacctgggcccagaagctgtacaacacccacctgaacaagtgcgccctgttcgagaagcccagactgagcaacaaggccttcatcatccagcacttcgccgacaaggtggagtaccagtgcgagggcttcctggagaagaacaaggacaccgtgttcgaggagcagatcaaggtgctgaagagcagcaagttcaagatgctgcccgagctgttccaggacgacgagaaggccatcagccccaccagcgccaccagcagcggcagaacccccctgaccagaacccccgccaagcccaccaagggcagacccggccagatggccaaggagcacaagaagaccgtgggccaccagttcagaaacagcctgcacctgctgatggagaccctgaacgccaccaccccccactacgtgagatgcatcaagcccaacgacttcaagttccccttcaccttcgacgagaagagagccgtgcagcagctgagagcctgcggcgtgctggagaccatcagaatcagcgccgccggcttccccagcagatggacctaccaggagttcttcagcagatacagagtgctgatgaagcagaaggacgtgctgagcgacagaaagcagacctgcaagaacgtgctggagaagctgatcctggacaaggacaagtaccagttcggcaagaccaagatcttcttcagagccggccaggtggcctacctggagaagctgagagccgacaagctgagagccgcctgcatcagaatccagaagaccatcagaggctggctgctgagaaagaagtacctgagaatgagaaaggccgccatcaccatgcagagatacgtgagaggctaccaggccagatgctacgccaagttcctgagaagaaccaaggccgccaccatcatccagaagtactggagaatgtacgtggtgagaagaagatacaagatcagaagagccgccaccatcgtgctgcagagctacctgagaggcttcctggccagaaacagatacagaaagatcctgagagagcacaaggccgtgatcatccagaagagagtgagaggctggctggccagaacccactacaagagaagcatgcacgccatcatctacctgcagtgctgcttcagaagaatgatggccaagagagagctgaagaagctgaagatcgaggccagaagcgtggagagatacaagaagctgcacatcggcatggagaacaagatcatgcagctgcagagaaaggtggacgagcagaacaaggactacaagtgcctggtggagaagctgaccaacctggagggcatctacaacagcgagaccgagaagctgagaagcgacctggagagactgcagctgagcgaggaggaggccaaggtggccaccggcagagtgctgagcctgcaggaggagatcgccaagctgagaaaggacctggagcagaccagaagcgagaagaagtgcatcgaggagcacgccgacagatacaagcaggagaccgagcagctggtgagcaacctgaaggaggagaacaccctgctgaagcaggagaaggaggccctgaaccacagaatcgtgcagcaggccaaggagatgaccgagaccatggagaagaagctggtggaggagaccaagcagctggagctggacctgaacgacgagagactgagataccagaacctgctgaacgagttcagcagactggaggagagatacgacgacctgaaggaggagatgaccctgatggtgcacgtgcccaagcccggccacaagagaaccgacagcacccacagcagcaacgagagcgagtacatcttcagcagcgagatcgccgagatggaggacatccccagcagaaccgaggagcccagcgagaagaaggtgcccctggacatgagcctgttcctgaagctgcagaagagagtgaccgagctggagcaggagaagcaggtgatgcaggacgagctggacagaaaggaggagcaggtgctgagaagcaaggccaaggaggaggagagaccccagatcagaggcgccgagctggagtacgagagcctgaagagacaggagctggagagcgagaacaagaagctgaagaacgagctgaacgagctgagaaaggccctgagcgagaagagcgcccccgaggtgaccgcccccggcgcccccgcctacagagtgctgatggagcagctgaccagcgtgagcgaggagctggacgtgagaaaggaggaggtgctgatcctgagaagccagctggtgagccagaaggaggccatccagcccaagaacaccatgaccgacagcaccatcctgctggaggacgtgcagaagatgaaggacaagggcgagatcgcccaggcctacatcggcctgaaggagaccaacagaagcagcgccctggactaccacgagctgaacgaggacggcgagctgtggctggtgtacgagggcctgaagcaggccaacagactgctggagagccagctgcagagccagaagagaagccacgagaacgaggccgaggccctgagaggcgagatccagagcctgaaggaggagaacaacagacagcagcagctgctggcccagaacctgcagctgccccccgaggccagaatcgaggccagcctgcagcacgagatcaccagactgaccaacgagaacctggacctgatggagcagctggagaagcaggacaagaccgtgagaaagctgaagaagcagctgaaggtgttcgccaagaagatcggcgagctggaggtgggccagatggagaacatcagccccggccagatcatcgacgagcccatcagacccgtgaacatccccagaaaggagaaggacttccagggcatgctggagtacaagaaggaggacgagcagaagctggtgaagaacctgatcctggagctgaagcccagaggcgtggccgtgaacctgatccccggcctgcccgcctacatcctgttcatgtgcgtgagacacgccgactacctgaacgacgaccagaaggtgagaagcctgctgaccagcaccatcaacagcatcaagaaggtgctgaagaagagaggcgacgacttcgagaccgtgagcttctggctgagcaacacctgcagattcctgcactgcctgaagcagtacagcggcgaggagggcttcatgaagcacaacaccagcagacagaacgagcactgcctgaccaacttcgacctggccgagtacagacaggtgctgagcgacctggccatccagatctaccagcagctggtgagagtgctggagaacatcctgcagcccatgatcgtgagcggcatgctggagcacgagaccatccagggcgtgagcggcgtgaagcccaccggcctgagaaagagaaccagcagcatcgccgacgagggcacctacaccctggacagcatcctgagacagctgaacagcttccacagcgtgatgtgccagcacggcatggaccccgagctgatcaagcaggtggtgaagcagatgttctacatcatcggcgccatcaccctgaacaacctgctgctgagaaaggacatgtgcagctggagcaagggcatgcagatcagatacaacgtgagccagctggaggagtggctgagagacaagaacctgatgaacagcggcgccaaggagaccctggagcccctgatccaggccgcccagctgctgcaggtgaagaagaagaccgacgacgacgccgaggccatctgcagcatgtgcaacgccctgaccaccgcccagatcgtgaaggtgctgaacctgtacacccccgtgaacgagttcgaggagagagtgagcgtgagcttcatcagaaccatccagatgagactgagagacagaaaggacagcccccagctgctgatggacgccaagcacatcttccccgtgaccttccccttcaaccccagcagcctggccctggagaccatccagatccccgccagcctgggcctgggcttcatcagcagagtgtag

SEQ ID NO: 5774 - protein, 2184 aa, Artificial Sequence
  derived and/or modified sequence
ALLQKGDHVWMDLRLGQEFDVPIGAVVKLCDSGQVQVVDDEDNEHWISPQNATHIKPMHPTSVHGVEDMIRLGDLNEAGILRNLLIRYRDHLIYTYTGSILVAVNPYQLLSIYSPEHIRQYTNKKIGEMPPHIFAIADNCYFNMKRNSRDQCCIISGESGAGKTESTKLILQFLAAISGQHSWIEQQVLEATPILEAFGNAKTIRNDNSSRFGKYIDIHFNKRGAIEGAKIEQYLLEKSRVCRQALDERNYHVFYCMLEGMSEDQKKKLGLGQASDYNYLAMGNCITCEGRVDSQEYANIRSAMKVLMFTDTENWEISKLLAAILHLGNLQYEARTFENLDACEVLFSPSLATAASLLEVNPPDLMSCLTSRTLITRGETVSTPLSREQALDVRDAFVKGIYGRLFVWIVDKINAAIYKPPSQDVKNSRRSIGLLDIFGFENFAVNSFEQLCINFANEHLQQFFVRHVFKLEQEEYDLESIDWLHIEFTDNQDALDMIANKPMNIISLIDEESKFPKGTDTTMLHKLNSQHKLNANYIPPKNNHETQFGINHFAGIVYYETQGFLEKNRDTLHGDIIQLVHSSRNKFIKQIFQADVAMGAETRKRSPTLSSQFKRSLELLMRTLGACQPFFVRCIKPNEFKKPMLFDRHLCVRQLRYSGMMETIRIRRAGYPIRYSFVEFVERYRVLLPGVKPAYKQGDLRGTCQRMAEAVLGTHDDWQIGKTKIFLKDHHDMLLEVERDKAITDRVILLQKVIRGFKDRSNFLKLKNAATLIQRHWRGHNCRKNYGLMRLGFLRLQALHRSRKLHQQYRLARQRIIQFQARCRAYLVRKAFRHRLWAVLTVQAYARGMIARRLHQRLRAEYLWRLEAEKMRLAEEEKLRKEMSAKKAKEEAERKHQERLAQLAREDAERELKEKEAARRKKELLEQMERARHEPVNHSDMVDKMFGFLGTSGGLPGQEGQAPSGFEDLERGRREMVEEDLDAALPLPDEDEEDLSEYKFAKFAATYFQGTTTHSYTRRPLKQPLLYHDDEGDQLAALAVWITILRFMGDLPEPKYHTAMSDGSEKIPVMTKIYETLGKKTYKRELQALQGEGEVTKRLHDGESTVQGNSMLEDRPTSNLEKLHFIIGNGILRPALRDEIYCQISKQLTHNPSKSSYARGWILVSLCVGCFAPSEKFVKYLRNFIHGGPPGYAPYCEERLRRTFVNGTRTQPPSWLELQATKSKKPIMLPVTFMDGTTKTLLTDSATTAKELCNALADKISLKDRFGFSLYIALFDKVSSLGSGSDHVMDAISQCEQYAKEQGAQERNAPWRLFFRKEVFTPWHSPSEDNVATNLIYQQVVRGVKFGEYRCEKEDDLAELASQQYFVDYGSEMILERLLNLVPTYIPDREITPLKTLEKWAQLAIAAHKKGIYAQRRTDAQKVKEDVVSYARFKWPLLFSRFYEAYKFSGPSLPKNDVIVAVNWTGVYFVDEQEQVLLELSFPEIMAVSSSRECRVWLSLGCSDLGCAAPHSGWAGLTPAGPCSPCWSCRGAKTTAPSFTLATIKGDEYTFTSSNAEDIRDLVVTFLEGLRKRSKYVVALQDNPNPAGEESGFLSFAKGDLIILDHDTGEQVMNSGWANGINERTKQRGDFPTDSVYVMPTVTMPPREIVALVTMTPDQRQDVVRLLQLRTAEPEVRAKPYTLEEFSYDYFRPPPKHTLSRVMVSKARGKDRLWSHTREPLKQALLKKLLGSEELSQEACLAFIAVLKYMGDYPSKRTRSVNELTDQIFEGPLKAEPLKDEAYVQILKQLTDNHIRYSEERGWELLWLCTGLFPPSNILLPHVQRFLQSRKHCPLAIDCLQRLQKALRNGSRKYPPHLVEVEAIQHKTTQIFHKVYFPDDTDEAFEVESSTKAKDFCQNIATRLLLKSSEGFSLFVKIADKVLSVPENDFFFDFVRHLTDWIKKARPIKDGIVPSLTYQVFFMKKLWTTTVPGKDPMADSIFHYYQELPKYLRGYHKCTREEVLQLGALIYRVKFEEDKSYFPSIPKLLRELVPQDLIRQVSPDDWKRSIVAYFNKHAGKSKEEAKLAFLKLIFKWPTFGSAFFEVKQTTEPNFPEILLIAINKYGVSLIDPKTKDILTTHPFTKISNWSSGNTYFHITIGNLVRGSKLLCETSLGYKMDDLLTSYISQMLTAMSKQRGSRSGK

SEQ ID NO: 5775 - protein, 2214 aa, Artificial Sequence
  derived and/or modified sequence
ALLQKGDHVWMDLRLGQEFDVPIGAVVKLCDSGQVQVVDDEDNEHWISPQNATHIKPMHPTSVHGVEDMIRLGDLNEAGILRNLLIRYRDHLIYTYTGSILVAVNPYQLLSIYSPEHIRQYTNKKIGEMPPHIFAIADNCYFNMKRNSRDQCCIISGESGAGKTESTKLILQFLAAISGQHSWIEQQVLEATPILEAFGNAKTIRNDNSSRFGKYIDIHFNKRGAIEGAKIEQYLLEKSRVCRQALDERNYHVFYCMLEGMSEDQKKKLGLGQASDYNYLAMGNCITCEGRVDSQEYANIRSAMKVLMFTDTENWEISKLLAAILHLGNLQYEARTFENLDACEVLFSPSLATAASLLEVNPPDLMSCLTSRTLITRGETVSTPLSREQALDVRDAFVKGIYGRLFVWIVDKINAAIYKPPSQDVKNSRRSIGLLDIFGFENFAVNSFEQLCINFANEHLQQFFVRHVFKLEQEEYDLESIDWLHIEFTDNQDALDMIANKPMNIISLIDEESKFPKGTDTTMLHKLNSQHKLNANYIPPKNNHETQFGINHFAGIVYYETQGFLEKNRDTLHGDIIQLVHSSRNKFIKQIFQADVAMGAETRKRSPTLSSQFKRSLELLMRTLGACQPFFVRCIKPNEFKKPMLFDRHLCVRQLRYSGMMETIRIRRAGYPIRYSFVEFVERYRVLLPGVKPAYKQGDLRGTCQRMAEAVLGTHDDWQIGKTKIFLKDHHDMLLEVERDKAITDRVILLQKVIRGFKDRSNFLKLKNAATLIQRHWRGHNCRKNYGLMRLGFLRLQALHRSRKLHQQYRLARQRIIQFQARCRAYLVRKAFRHRLWAVLTVQAYARGMIARRLHQRLRAEYLWRLEAEKMRLAEEEKLRKEMSAKKAKEEAERKHQERLAQLAREDAERELKEKEAARRKKELLEQMERARHEPVNHSDMVDKMFGFLGTSGGLPGQEGQAPSGFEDLERGRREMVEEDLDAALPLPDEDEEDLSEYKFAKFAATYFQGTTTHSYTRRPLKQPLLYHDDEGDQLAALAVWITILRFMGDLPEPKYHTAMSDGSEKIPVMTKIYETLGKKTYKRELQALQGEGEAQLPEGQKKSSVRHKLVHLTLKKKSKLTEEVTKRLHDGESTVQGNSMLEDRPTSNLEKLHFIIGNGILRPALRDEIYCQISKQLTHNPSKSSYARGWILVSLCVGCFAPSEKFVKYLRNFIHGGPPGYAPYCEERLRRTFVNGTRTQPPSWLELQATKSKKPIMLPVTFMDGTTKTLLTDSATTAKELCNALADKISLKDRFGFSLYIALFDKVSSLGSGSDHVMDAISQCEQYAKEQGAQERNAPWRLFFRKEVFTPWHSPSEDNVATNLIYQQVVRGVKFGEYRCEKEDDLAELASQQYFVDYGSEMILERLLNLVPTYIPDREITPLKTLEKWAQLAIAAHKKGIYAQRRTDAQKVKEDVVSYARFKWPLLFSRFYEAYKFSGPSLPKNDVIVAVNWTGVYFVDEQEQVLLELSFPEIMAVSSSRECRVWLSLGCSDLGCAAPHSGWAGLTPAGPCSPCWSCRGAKTTAPSFTLATIKGDEYTFTSSNAEDIRDLVVTFLEGLRKRSKYVVALQDNPNPAGEESGFLSFAKGDLIILDHDTGEQVMNSGWANGINERTKQRGDFPTDSVYVMPTVTMPPREIVALVTMTPDQRQDVVRLLQLRTAEPEVRAKPYTLEEFSYDYFRPPPKHTLSRVMVSKARGKDRLWSHTREPLKQALLKKLLGSEELSQEACLAFIAVLKYMGDYPSKRTRSVNELTDQIFEGPLKAEPLKDEAYVQILKQLTDNHIRYSEERGWELLWLCTGLFPPSNILLPHVQRFLQSRKHCPLAIDCLQRLQKALRNGSRKYPPHLVEVEAIQHKTTQIFHKVYFPDDTDEAFEVESSTKAKDFCQNIATRLLLKSSEGFSLFVKIADKVLSVPENDFFFDFVRHLTDWIKKARPIKDGIVPSLTYQVFFMKKLWTTTVPGKDPMADSIFHYYQELPKYLRGYHKCTREEVLQLGALIYRVKFEEDKSYFPSIPKLLRELVPQDLIRQVSPDDWKRSIVAYFNKHAGKSKEEAKLAFLKLIFKWPTFGSAFFEVKQTTEPNFPEILLIAINKYGVSLIDPKTKDILTTHPFTKISNWSSGNTYFHITIGNLVRGSKLLCETSLGYKMDDLLTSYISQMLTAMSKQRGSRSGK

SEQ ID NO: 5776 - protein, 2215 aa, Artificial Sequence
  derived and/or modified sequence
MVILQQGDHVWMDLRLGQEFDVPIGAVVKLCDSGQVQVVDDEDNEHWISPQNATHIKPMHPTSVHGVEDMIRLGDLNEAGILRNLLIRYRDHLIYTYTGSILVAVNPYQLLSIYSPEHIRQYTNKKIGEMPPHIFAIADNCYFNMKRNSRDQCCIISGESGAGKTESTKLILQFLAAISGQHSWIEQQVLEATPILEAFGNAKTIRNDNSSRFGKYIDIHFNKRGAIEGAKIEQYLLEKSRVCRQALDERNYHVFYCMLEGMSEDQKKKLGLGQASDYNYLAMGNCITCEGRVDSQEYANIRSAMKVLMFTDTENWEISKLLAAILHLGNLQYEARTFENLDACEVLFSPSLATAASLLEVNPPDLMSCLTSRTLITRGETVSTPLSREQALDVRDAFVKGIYGRLFVWIVDKINAAIYKPPSQDVKNSRRSIGLLDIFGFENFAVNSFEQLCINFANEHLQQFFVRHVFKLEQEEYDLESIDWLHIEFTDNQDALDMIANKPMNIISLIDEESKFPKGTDTTMLHKLNSQHKLNANYIPPKNNHETQFGINHFAGIVYYETQGFLEKNRDTLHGDIIQLVHSSRNKFIKQIFQADVAMGAETRKRSPTLSSQFKRSLELLMRTLGACQPFFVRCIKPNEFKKPMLFDRHLCVRQLRYSGMMETIRIRRAGYPIRYSFVEFVERYRVLLPGVKPAYKQGDLRGTCQRMAEAVLGTHDDWQIGKTKIFLKDHHDMLLEVERDKAITDRVILLQKVIRGFKDRSNFLKLKNAATLIQRHWRGHNCRKNYGLMRLGFLRLQALHRSRKLHQQYRLARQRIIQFQARCRAYLVRKAFRHRLWAVLTVQAYARGMIARRLHQRLRAEYLWRLEAEKMRLAEEEKLRKEMSAKKAKEEAERKHQERLAQLAREDAERELKEKEAARRKKELLEQMERARHEPVNHSDMVDKMFGFLGTSGGLPGQEGQAPSGFEDLERGRREMVEEDLDAALPLPDEDEEDLSEYKFAKFAATYFQGTTTHSYTRRPLKQPLLYHDDEGDQLAALAVWITILRFMGDLPEPKYHTAMSDGSEKIPVMTKIYETLGKKTYKRELQALQGEGEAQLPEGQKKSSVRHKLVHLTLKKKSKLTEEVTKRLHDGESTVQGNSMLEDRPTSNLEKLHFIIGNGILRPALRDEIYCQISKQLTHNPSKSSYARGWILVSLCVGCFAPSEKFVKYLRNFIHGGPPGYAPYCEERLRRTFVNGTRTQPPSWLELQATKSKKPIMLPVTFMDGTTKTLLTDSATTAKELCNALADKISLKDRFGFSLYIALFDKVSSLGSGSDHVMDAISQCEQYAKEQGAQERNAPWRLFFRKEVFTPWHSPSEDNVATNLIYQQVVRGVKFGEYRCEKEDDLAELASQQYFVDYGSEMILERLLNLVPTYIPDREITPLKTLEKWAQLAIAAHKKGIYAQRRTDAQKVKEDVVSYARFKWPLLFSRFYEAYKFSGPSLPKNDVIVAVNWTGVYFVDEQEQVLLELSFPEIMAVSSSRECRVWLSLGCSDLGCAAPHSGWAGLTPAGPCSPCWSCRGAKTTAPSFTLATIKGDEYTFTSSNAEDIRDLVVTFLEGLRKRSKYVVALQDNPNPAGEESGFLSFAKGDLIILDHDTGEQVMNSGWANGINERTKQRGDFPTDSVYVMPTVTMPPREIVALVTMTPDQRQDVVRLLQLRTAEPEVRAKPYTLEEFSYDYFRPPPKHTLSRVMVSKARGKDRLWSHTREPLKQALLKKLLGSEELSQEACLAFIAVLKYMGDYPSKRTRSVNELTDQIFEGPLKAEPLKDEAYVQILKQLTDNHIRYSEERGWELLWLCTGLFPPSNILLPHVQRFLQSRKHCPLAIDCLQRLQKALRNGSRKYPPHLVEVEAIQHKTTQIFHKVYFPDDTDEAFEVESSTKAKDFCQNIATRLLLKSSEGFSLFVKIADKVLSVPENDFFFDFVRHLTDWIKKARPIKDGIVPSLTYQVFFMKKLWTTTVPGKDPMADSIFHYYQELPKYLRGYHKCTREEVLQLGALIYRVKFEEDKSYFPSIPKLLRELVPQDLIRQVSPDDWKRSIVAYFNKHAGKSKEEAKLAFLKLIFKWPTFGSAFFEVKQTTEPNFPEILLIAINKYGVSLIDPKTKDILTTHPFTKISNWSSGNTYFHITIGNLVRGSKLLCETSLGYKMDDLLTSYISQMLTAMSKQRGSRSGK

SEQ ID NO: 5777 - DNA, 6555 bp, Artificial Sequence
  derived and/or modified sequence
gcattgttacaaaagggagaccatgtgtggatggatcttcgtcttggtcaggagttcgatgtgcccatcggggccgtggttaaactctgcgactccgggcaagtgcaggttgtggacgatgaagataatgagcactggatatccccccagaacgcaacgcacattaagcccatgcaccccaccagtgtgcatggagtggaagatatgataaggcttggagacttgaacgaagcgggcattctgagaaatctgctgatacgttatcgggatcacctgatctatacatacacaggatcaattctggtagcggttaatccctaccagctacttagtatctacagtccggagcatatccgacagtacaccaacaagaagattggggagatgcctccacacatttttgctattgccgacaactgctacttcaacatgaagcggaacagccgcgatcagtgctgtatcatttccggagaaagcggtgccggaaaaaccgaaagtactaaactcatccttcagttccttgctgccatctcgggtcaacatagctggattgagcagcaagtgcttgaggctacaccgattctcgaagccttcggcaatgccaagactattcgaaacgacaactcttcccggtttggcaagtatatcgatattcacttcaataagagaggcgctatagaaggtgcaaagatcgagcagtacttactggagaagtctagagtctgccgccaggccctggatgagcgcaactatcatgtcttttactgtatgttggaaggtatgtcagaggaccagaaaaagaaacttggtctgggccaagcatcagactacaattatctcgccatgggcaattgtatcacctgcgaggggcgcgtggatagtcaggaatatgccaacataaggagtgctatgaaggttcttatgttcaccgataccgagaactgggagatatccaagctcctggcagccatcttacatctgggaaacctgcagtatgaggcaaggactttcgagaaccttgacgcgtgtgaagtactattctcacctagccttgccacggccgcatccctgctcgaagttaatcctcctgacctcatgtcctgcctgacttcgaggacgcttatcactcgcggggagacagtgtcaacaccattaagcagagagcaggccttggacgttagggatgcgtttgtgaaaggcatatacggacgcctgttcgtttggatcgttgacaagatcaatgccgccatttacaaacctccatcccaggatgtgaaaaatagtaggcgatctattggcttactagatatctttggcttcgagaattttgctgtcaattccttcgagcaactgtgcattaacttcgcaaatgagcacctgcagcagttttttgtacgacatgtgttcaagctggagcaggaagagtacgacctggaatctatcgactggttacatatcgagttcaccgataaccaggacgccttggacatgatcgccaataaacctatgaatatcatcagtctgattgacgaggagagcaaatttccaaaaggaactgacaccactatgctccacaagctgaatagtcaacataagctcaacgcaaattatatcccacctaagaataaccacgagactcaattcggaatcaatcattttgcagggattgtgtactatgaaacccagggtttcctggagaagaaccgcgacactctgcatggagacattatacaactagtccacagcagccgaaataaattcatcaaacaaatctttcaggcagatgtggccatgggagccgagacacgtaagagatccccaacgcttagcagccagttcaagcgatctctggagctgctcatgcggactctgggagcctgccaaccctttttcgtccgctgcattaaacctaacgaattcaagaagcccatgctgtttgatcgacacctctgcgtgagacagttgaggtattctggcatgatggaaaccatacgtatcaggagagcgggatatcccattaggtactcgttcgtggagtttgtggaacgctacagagtactgctgcccggagtgaagccggcttataagcagggcgatcttaggggcacctgccagagaatggcggaggccgtgctgggcacccatgacgactggcaaattggcaagacaaaaatttttctgaaagaccaccatgacatgctgcttgaggtggaaagggacaaggcaattaccgatagagttatcttgcttcagaaggtcatccgaggcttcaaggatcgatcaaacttcttaaagctcaagaacgccgccacacttatccaacgtcattggcgcgggcacaattgtcggaagaactatgggctaatgcggttgggatttctacgacttcaggccctgcatcggtcacgcaaactgcatcaacagtataggctggcgcgacaacggattatccagttccaggctagatgcagagcctaccttgtgcggaaggcattccgccacaggctttgggcggtgctcaccgttcaagcatatgcaagaggcatgatcgcccggaggctccaccagagattacgagccgaatacttgtggcgattagaagcagagaagatgagactggctgaagaggaaaaactcagaaaagaaatgagcgcgaagaaggctaaagaggaggccgagcgcaagcatcaggaaagattagcccagcttgcccgcgaggatgccgagcgtgaactgaaagaaaaggaagcggcaaggcggaagaaggagctccttgaacagatggaaagagcgcgccacgaacccgtgaaccattccgacatggtggacaaaatgttcggtttcctcggcaccagcggcggccttcctggtcaggagggccaggctccaagcggttttgaggacctggaaagaggacgacgggagatggtggaagaggatctggacgcggctttaccgctgcctgacgaagacgaggaagatctcagtgaatataagtttgctaagttcgccgccacgtactttcagggaacaaccacgcattcctacacccgacgccccctcaagcaaccgctactctaccacgacgacgaaggggaccagctagccgcactggcggtgtggataactatcctcaggttcatgggggacctgcccgaacctaagtaccacactgcaatgtctgacggaagcgagaagatcccagtgatgaccaagatttacgaaacccttggaaagaaaacatacaagcgagagctccaagcacttcaaggggaaggcgaggtgaccaaaagactccacgatggcgagtccacggtccagggcaattccatgcttgaagaccgcccaacctctaatttggagaaacttcacttcatcatcggcaacggcatcttaagacccgcactgcgcgatgaaatatactgccagatttcaaagcagctcacccacaaccccagcaagtcttcttatgcccgcggttggattctggtatccctatgcgtgggatgtttcgcccccagcgagaagtttgtcaagtatttaaggaattttatacacggtggaccgcctggctatgcaccgtactgtgaagagaggttgcggcggactttcgtgaacggaacacgaactcagcctcctagctggctcgagctgcaggctacaaagtccaagaagcctataatgttacctgtcacttttatggacggcactacgaagaccctcctgactgattcagcaaccacagcaaaggaattatgcaacgccctggctgacaagatttctctgaaggataggttcggtttctctctgtacattgctttgttcgacaaagtgtcatctcttggctcaggctccgatcacgtgatggacgccatttcccagtgcgaacaatacgcaaaagaacagggtgcccaggagcggaacgccccctggcggctgtttttcagaaaagaggtcttcacgccttggcactccccgagcgaggacaacgtcgccaccaaccttatataccagcaggtcgtcaggggtgttaaatttggagaataccgctgtgaaaaagaagatgatttagcggagctcgcatcgcagcagtactttgtggattacggatcagagatgatcctcgagcgcctgttaaacctggttcccacctacatacctgatcgagagatcacccccctgaagacactggagaagtgggcacagttggcgattgcggcccataagaaggggatctacgcccagcgtcggaccgacgcccagaaggtgaaggaggatgtggtctcctatgcacgcttcaaatggccgttgctgtttagtcgattctacgaagcctacaagttttccggccccagtctgccgaaaaatgacgtgatcgtagctgtgaattggacaggagtctatttcgtggatgaacaagaacaggtgctcttggagctttcattccccgagataatggccgtgagctcctcgcgagagtgtcgggtgtggctgtcactgggatgttccgacctcggatgtgctgccccccattctggttgggccgggcttactccagccggcccttgtagcccctgttggagctgccgaggtgccaagacaactgcgccttccttcacattggcaacaataaagggggacgaatatacctttacgtcctctaacgctgaagatattcgagacctggtggtcacgttcctcgagggactgaggaagcgcagtaaatacgttgtcgcccttcaggacaatcccaacccagctggggaggagagcgggtttctctctttcgccaagggcgatctcattatcctggatcacgacacgggggagcaggtgatgaactctggttgggctaatggaataaatgagcggactaaacagaggggggatttccccacagacagtgtctacgttatgccaaccgtgacaatgccccctcgggaaattgtggccctcgtaaccatgacacctgatcagcggcaagatgtggttcggctgttacagctgcggacagctgaacctgaggttagggcaaagccgtacacgctggaagaattttcttatgactatttccgaccgccccccaagcataccctaagccgcgtgatggtgtccaaagcccgaggtaaggaccggctgtggtctcacacccgcgagcccctgaaacaggcgctgctgaagaaacttctggggtctgaggagttgtcacaagaggcctgcctggccttcatagccgtcttaaagtatatgggggattacccctctaaacgaacacgatctgtgaatgaactgaccgaccagatttttgagggccctttgaaagctgagcctctgaaagacgaggcctacgtgcaaattctgaaacagctcacagacaaccacatcagatactctgaagaacgcgggtgggaactgctctggttgtgcacagggctgtttccacctagcaacattctccttccccacgtgcagcgcttcctacagtcaagaaaacactgccctttagcaattgactgtctccaacgactgcaaaaggctctcagaaatggatcccgcaagtaccctcctcacctggtagaggtcgaggctattcagcacaaaaccacccagattttccacaaagtttattttccagacgacacagacgaggcatttgaggtggaaagctcaactaaggctaaagacttctgccagaacatcgctactcgactgctgttaaaaagtagcgagggcttctcactgtttgtgaagatcgccgacaaagtgctaagcgtaccggagaacgacttctttttcgacttcgtaaggcatctgaccgattggattaagaaagcacggcccatcaaggatggaattgtcccttctttaacctaccaagtcttttttatgaagaagctttggacaaccactgttccagggaaggaccccatggccgatagcatcttccattattatcaggaactgccaaaatatttgagaggctaccacaagtgcacccgggaggaggtactgcaactcggcgccctgatctatagggttaagtttgaggaggacaagtcttatttccccagcattccaaaactactgagggagctggtaccccaggatcttattagacaagttagccctgacgattggaagagatccatagtggcctattttaacaagcacgccgggaaaagtaaagaagaagccaagctggcttttctgaagttaatctttaaatggcctacattcggaagtgccttctttgaagttaagcagactactgagcctaatttccccgagatactgctgatcgccatcaacaagtacggagtatcccttatcgaccctaagaccaaagacatattaacgacgcaccctttcaccaaaatctccaactggagcagtggaaacacatattttcacataaccatcggcaatctggtacgcggctccaagctgctgtgtgaaacctccctaggctacaagatggatgatctcttgacatcatacattagccagatgttgaccgccatgagcaaacaacgtgggtctagaagcggtaagtag

SEQ ID NO: 5778 - DNA, 6645 bp, Artificial Sequence
  derived and/or modified sequence
gccctcctccagaagggggatcacgtatggatggacctgcgccttggacaggaatttgacgttccgatcggcgctgtggtaaagctgtgcgacagtggtcaggttcaggtggtggatgacgaagataacgaacattggatcagccctcagaacgccacacatatcaagcccatgcatccaactagcgtgcacggggtcgaagatatgattagactcggtgatctcaacgaagcggggattctccgaaacctcttaataaggtatcgggatcacctgatctacacctataccggcagcatccttgtcgccgtaaatccctaccaactgcttagtatctatagccctgaacatatccggcagtatacgaataagaaaataggggagatgcccccccatattttcgctatcgcggacaactgttatttcaatatgaaaaggaatagtcgagaccagtgttgtattattagcggggaatctggagccggcaaaaccgagtccacaaagctgattctccagtttctggcggccatttctggccagcactcgtggatcgagcagcaggttctggaagcgacccccatactcgaggcttttgggaacgcaaagactatacggaatgataatagttcccgcttcggaaagtatatcgatattcactttaacaaacggggtgctattgagggagccaagatcgaacagtatctgctcgaaaagtccagggtctgcagacaggctctcgacgagcggaactaccatgtcttctactgtatgctggagggaatgagtgaagatcaaaaaaaaaagctgggtttgggacaggcatcagattataattaccttgccatgggtaactgcatcacctgcgaaggtcgtgtggacagtcaggagtacgcaaacattcgttcagctatgaaggtcttgatgttcaccgacacagaaaactgggagatctctaagctactagccgctatcctgcacctgggaaatctacaatacgaggctcgtacctttgaaaatctggatgcctgtgaggtcctgttcagcccgtccctggcaacggcggcaagtctgctggaggtcaatccacccgacttaatgagttgtctcacatccaggacactgattacccgcggggagaccgtgagtacaccccttagcagagaacaggccctggacgtcagggatgcattcgtcaagggaatttatggccggcttttcgtctggatcgttgacaaaatcaacgccgccatctacaagccgccctctcaggacgtgaaaaactctaggagatccatcggcctactggatatctttgggttcgagaacttcgctgtgaatagctttgaacaattatgcatcaatttcgctaacgagcacctgcagcagttctttgttcgtcacgtgtttaaactggaacaggaagagtacgacctggaatctattgattggctgcatattgagtttacagacaatcaggacgctctcgatatgattgctaataagcccatgaatattataagcttaatcgacgaggaatcaaagttccccaagggtacagacactacaatgttacacaagttgaactctcaacataagcttaatgctaactacatacctccgaaaaacaatcacgagacacagtttgggatcaatcacttcgcggggatcgtgtactacgagacccaaggctttcttgagaagaacagagatacattgcacggtgatatcatccagctggtccactcttcccggaataagtttatcaaacagattttccaagcagacgtggccatgggagcggagacaaggaagaggtctccaaccctgagctcccaattcaagcgtagcctcgagctgctgatgcgcacactgggagcatgtcagcccttcttcgtccgatgcatcaagcctaatgagttcaagaagcctatgctgttcgatcgacacctctgtgtaagacagctgcggtattctggcatgatggaaaccattcgcatccgacgagctggctaccctatcaggtatagctttgtggagttcgtcgaacggtacagagtgctccttccgggagtcaaacctgcctataagcaaggcgacctgcgtggaacatgccagcgaatggccgaggccgtcttgggtactcacgacgattggcagatcggaaaaaccaagatcttcctgaaggaccaccatgatatgttactcgaagtagaaagggataaggcgattactgacagagtgattttgttacagaaagtgatcagaggattcaaggaccgaagcaatttcttgaagctcaagaacgctgcaaccctcatccagaggcactggagggggcataactgcagaaaaaattatggcctaatgcggctgggctttttgcgactgcaagcacttcaccgctcccgtaaactgcatcagcaataccggttggcccggcagcgaattatccagttccaagcaaggtgcagggcgtacctagtcagaaaagcgttcaggcaccgactttgggcagtcctgactgtgcaggcctatgcccggggcatgattgccaggcgcctgcaccagcggctgagagccgagtacctttggagacttgaagccgaaaagatgcggttggcagaggaggagaagctccggaaggagatgagtgcgaaaaaggcgaaagaagaagcagagcgcaagcaccaggaaaggctggctcagctcgcaagggaagatgccgaaagagagctgaaagagaaggaagcagcaaggcgcaagaaggagctcctcgagcaaatggaacgggctaggcacgagccagtgaatcacagtgacatggtggacaagatgtttggctttctggggacttccgggggacttcccggtcaggaaggacaagctcccagcgggtttgaggacctggaaagggggcgaagggaaatggtcgaagaggatcttgacgcagctctgccactgccagatgaggatgaggaagatctgtctgagtataaattcgccaagttcgcagccacttacttccaaggcactacaacacacagctatacacgtcgccctttgaagcaacctcttctctaccacgatgatgaaggtgatcagctcgcggcccttgcagtctggattactatcctacggtttatgggcgacttaccggaacctaaatatcatactgccatgtcagacggaagcgaaaaaatcccagtgatgactaagatctatgagactctcgggaaaaagacttacaaacgtgagttgcaagctcttcagggagaaggcgaggcacagttgcctgagggtcaaaagaagagttctgtccgccacaaactggtccacctcaccttgaagaagaagagtaaactaactgaggaagtaacaaaaaggctccatgacggggagagcaccgttcagggaaatagcatgctagaggacaggcctacaagcaatttagagaaactacacttcatcataggcaacggtattctgaggcctgcactccgcgatgaaatttactgtcaaatttctaagcagctaacgcataatccttcgaaaagctcttacgcccgaggctggatactggtgtccctatgcgtgggctgtttcgcaccttcggaaaagtttgtgaaatacctcaggaattttatccacggcggacctccagggtacgctccttactgcgaagaaaggttgcgccggactttcgtgaacggcacccggacgcagcctccttcctggctcgaactgcaagctactaagagcaaaaagccaatcatgctcccagtgacatttatggatggcacaactaaaactttgttgactgattcggctacaactgccaaggaactctgtaatgccctcgctgataaaatctctctgaaggatcgctttggtttctctctgtacatagcgcttttcgacaaggtgtcatccctgggctccggctccgatcatgtgatggacgcgatttcacagtgcgaacagtacgccaaagagcagggggctcaggaaagaaacgccccatggcgactgtttttccggaaagaggtctttaccccgtggcattccccatccgaggataatgtggcgactaatcttatttaccagcaggttgtgcgcggagtgaaattcggagagtatcgctgcgaaaaggaagacgatttggctgagctagccagtcagcagtactttgtcgactacggatccgagatgatcctggagcgcttattaaatctggtccccacatatatcccagatcgtgaaatcacaccgctgaagaccctggaaaagtgggcccagcttgcaatagctgcccataaaaaagggatttacgctcagagacgcactgatgcccagaaggtaaaagaagatgtggtgagttatgccagattcaagtggcctctgcttttttcccgtttttatgaggcctacaaattcagcggtccgtcactgccaaagaatgacgttatagtggccgtcaactggacaggcgtgtactttgtggacgagcaggagcaagtccttctagagctgtcctttcccgagattatggccgtcagcagctcacgcgaatgtagagtgtggttgtcactgggctgctccgatctgggatgcgcagcaccacatagcggctgggctggtttgactcccgccggaccttgctcaccctgctggtcctgcaggggcgcaaagaccactgctccctccttcacgctcgctaccattaagggggacgagtacacatttacaagctctaatgcggaagatatacgtgatttagttgtgaccttcttggagggccttagaaaacgttccaaatacgtggttgccctgcaggacaatcccaaccctgcaggggaagagagcggcttcctgagttttgctaaaggtgatcttattattctcgatcacgacaccggagaacaggtaatgaactcgggctgggctaacggaattaacgaacggacaaagcaaaggggggacttcccaactgacagcgtgtacgtgatgccaaccgtcacaatgcccccacgagagattgtggcactggtcaccatgactcctgatcagagacaggatgtggtgcgcctgctgcaactcaggaccgctgaacccgaggtgcgagcgaaaccttacactttggaggagttttcctacgactattttagaccacctcccaaacatacattatcacgagttatggtctccaaggctagaggcaaggataggctgtggtcgcatacacgagagcctctaaaacaagccctgttgaagaagctcctggggagtgaagagctgtcccaggaggcctgcctggccttcatagcagttctgaagtatatgggcgattatccatccaagagaacgaggagtgtaaatgagctaaccgaccagattttcgaggggcccctgaaggcagaaccactcaaggacgaggcatacgttcaaatcctgaagcagctgaccgacaaccacatccggtattcagaggagagaggttgggagttactgtggttatgcaccggcctcttccctccatctaatatcctcctcccacatgtgcagcggttcctacaatccagaaaacactgtcccctggcaatcgactgcttgcagcgcctgcagaaggccctgagaaacgggtcccgcaaataccccccacatctcgtggaggttgaagcaatccagcataagactacgcagatctttcacaaagtgtattttcctgacgatacggatgaggccttcgaggtagaatcctccacgaaggcgaaggacttctgtcaaaatatcgcgacgcgccttctgttgaagtcatctgaaggtttctccctgttcgtgaagatcgctgacaaggttctcagcgtccccgagaacgattttttttttgatttcgtgaggcacctgactgattggatcaaaaaggctagaccaattaaggatggtatagtgccatccctgacgtatcaggtattttttatgaagaaattgtggaccaccacagtccccgggaaagatcccatggcggacagtatctttcactattaccaggaattgcctaagtatttgcggggctaccataagtgtacaagggaggaggtccttcagttgggcgctctgatctatcgggttaagttcgaagaggacaaaagctactttccatccattccaaagctgttgcgggaacttgtccctcaagatttgatcagacaagtgagcccagacgactggaagcggagcatcgtcgcctactttaacaagcatgcaggcaagtctaaagaggaggctaaattagccttcctcaaattgatcttcaagtggcctacatttggctcagccttcttcgaagtgaagcagaccacagaaccaaactttccagaaattctcctgattgccattaacaagtacggtgtgagcctgattgacccaaaaaccaaggacatcctgaccacgcatccattcaccaaaatctctaattggtcttccgggaatacatattttcacattaccatagggaatctcgtaagagggtccaaattgctgtgcgaaacttctctgggttacaaaatggatgatctgcttaccagttacatctctcagatgctaactgctatgagcaagcagagagggtcgcggtccggaaagtag

SEQ ID NO: 5779 - DNA, 6648 bp, Artificial Sequence
  derived and/or modified sequence
atggtaatattgcagcagggggaccatgtctggatggacttgcgacttgggcaggaattcgacgtgccaataggcgccgtggtgaagctgtgcgattctgggcaggtacaagtcgtggatgacgaggataacgagcattggatcagcccccagaacgcaacccacatcaaaccaatgcatccaacctctgtgcatggcgtggaagacatgatcagactgggggatctgaacgaggccggcatactgaggaatctgttgattcgctacagagatcatctcatctatacgtacacaggttctatcctggtcgcagtgaacccgtatcagctcttaagcatttacagtccggagcacattcgccagtacacaaataaaaagattggcgaaatgccgccccatatttttgccatcgcagacaactgctacttcaatatgaagaggaatagcagggatcagtgttgtattatttcaggagagagtggcgccggcaaaacagagagcacaaagctgattttgcaatttctcgcagcaataagcggccagcactcctggatcgagcagcaagtcctggaggcaacaccgatactagaggcatttggcaatgcgaagactatacggaatgacaattcttcccgctttggcaaatacattgacattcatttcaacaaaaggggagcaatcgaaggtgcaaaaatcgagcagtacctgttagagaagtcaagagtctgtcgtcaggctctcgacgaaagaaactaccatgttttctactgcatgcttgaggggatgtcagaagaccaaaagaagaagttaggtttagggcaggccagcgactacaattacctcgccatgggtaattgcattacctgtgaggggcgggtggacagtcaggagtacgctaatatcaggtccgcaatgaaggtgctgatgtttacggacacggaaaactgggagatatccaaacttctggcagcaatcctgcatctgggcaatctgcagtacgaagcccggaccttcgaaaatctggatgcatgtgaagtgcttttcagtcctagtctggcaactgcagcatctctgcttgaagtgaaccctcctgacctgatgtcctgcctgacatcacgtacccttattacaagaggtgagactgtgtctacacccctgtcgagagagcaggcgcttgatgtccgagacgccttcgtgaaaggcatctacgggagactatttgtgtggattgtggataagattaatgcagcgatctataaacctccctcccaggacgtcaaaaattcacggcggtccattggactgttagacatattcggcttcgagaacttcgccgtcaatagtttcgagcagctttgtatcaacttcgcgaatgaacacctgcagcagttctttgtcagacatgtgtttaagctggagcaagaggagtacgatctggagtctatcgattggctacacatcgagtttactgataatcaagacgcgctagatatgatcgccaacaagcctatgaatattatcagtctgatcgatgaagagtctaaattccctaaaggaacggacaccaccatgctccacaaactcaatagccagcacaaactgaacgctaactatattccaccgaagaacaatcacgaaacgcagtttgggatcaatcacttcgcaggcatcgtctactacgagacccagggatttctggaaaaaaacagagacacccttcatggcgacattattcaactggtgcatagctccaggaataagtttatcaaacaaatttttcaggctgacgtggccatgggcgcagaaacgcggaaaaggtccccgactctatcttcccagtttaagcgctctttagagctcctaatgcgaacattgggcgcctgccagccattctttgtcagatgcattaagcccaacgaatttaaaaaacctatgcttttcgaccgccatctttgcgtccggcaactcagatattcaggaatgatggagaccatacgcatacgaagagcaggctaccccatacgctatagttttgtcgaattcgtcgagagataccgagtgctcctcccgggagtgaagccagcatacaaacaaggcgacctgcgcggaacctgccagcgtatggccgaggcagtgctaggcacacatgatgattggcagattggaaagaccaaaatatttttgaaggatcaccacgatatgctcttggaggtcgaacgggacaaagccatcacagatagggtgatattactgcagaaggtgatcagaggcttcaaggacaggagtaactttttaaaattaaagaatgccgccaccctcattcagagacactggcgaggacacaactgtagaaaaaattacggcctgatgagactcggctttctgcggctgcaggccctgcaccgttctcgtaagttgcaccagcagtaccggctagcgagacagcggattatacagttccaggcacgatgtcgtgcttatttggtacggaaagcttttaggcataggctgtgggctgtactgaccgttcaggcctacgcaagagggatgatcgcgagacggctccaccagcgacttagggcggagtacctctggcgcctggaggcggaaaagatgcggctggcagaagaagagaagctgcgcaaagaaatgagcgctaagaaagctaaggaagaggcggagcgcaagcatcaggaacggcttgcgcagttagcacgggaggatgctgagcgcgagctgaaggaaaaagaagcggcaaggcgtaaaaaagagctcctggaacagatggagcgagcccgccacgagcctgtgaaccacagcgatatggtcgacaagatgtttggattcctaggtaccagcggcgggctcccgggccaggaaggccaggcaccgtcaggattcgaagatctggagagaggtaggcgcgagatggtggaggaagatttagacgcggctctgcccctccccgatgaggacgaagaggatttgtctgaatacaaatttgctaaattcgctgcaacatattttcagggcaccacaacccatagttacacacgccgcccattgaagcagcctctgttatatcatgacgatgaaggagatcagctggccgcgctggccgtgtggattacaatcctacggttcatgggtgacctgcccgaaccgaaatatcacaccgccatgagcgacggcagtgagaagatccccgtgatgactaagatctacgagaccctcggcaagaaaacctataagcgtgagctgcaggccctgcagggtgagggagaggcccagctccctgagggccagaaaaagagctctgtgagacacaagctggtgcacttgacactgaagaagaaatccaagctgactgaggaagtaacaaaacggttgcacgatggcgagagtactgtgcagggcaattctatgcttgaggatcgacctacttctaatctggaaaaactccactttataattggcaacggaatccttcgtccagctcttcgagacgagatctattgtcagataagtaagcagcttacacacaatccttcaaagtcctcttacgccagggggtggatccttgtctctctctgtgtgggctgttttgcaccgagcgaaaagtttgtaaaataccttagaaactttatccatggaggtccccccggttacgctccatactgtgaggaaaggctccgaaggacttttgttaacggaaccaggacccagccgcccagctggttggagctccaggctactaagagcaaaaaacccattatgctgccagtaacttttatggacggcactacaaaaactttgttgacggactcagccaccacagccaaggagctctgtaacgcactcgccgataagattagcctcaaagaccgtttcgggttttctctgtacatcgctttgtttgacaaggtctcttccctgggctcagggagcgaccacgtcatggacgctatttcccagtgtgagcaatacgctaaagaacagggcgcccaggagagaaacgcaccatggaggctttttttcagaaaagaagtctttacgccttggcactcaccatctgaagacaacgtagctactaatctgatctaccagcaggtagtgagaggggtaaaatttggagagtacaggtgcgaaaaggaagatgatctcgccgaactcgcctcgcagcagtattttgtggactacggcagcgagatgatcttggaacggttgctgaacctggtgccaacttacatccccgatagggagatcactccactcaaaacactcgagaagtgggcccaattggctatagctgcccacaaaaaaggtatttacgcacagcggagaactgatgcccagaaggtgaaggaggacgttgtgagctacgcccggttcaaatggccattgctgttctcaagattttacgaagcatacaaattctccggaccaagcttgcctaagaacgatgtgattgtggctgtgaactggaccggggtctattttgtggacgagcaggaacaggtgttattggagcttagttttccagagattatggccgtgtcttcctccagagagtgtcgggtttggctatcgttaggttgttccgacttgggatgcgctgctccccactccggctgggccggactaaccccagctggaccatgctcaccctgttggagctgtcgaggagcaaaaaccaccgcaccgtccttcacgttggcaactatcaagggagatgagtacacattcacatcttcaaacgccgaagacatcagagatctagtggttacctttctcgagggcttgcgcaaacggtcaaaatacgttgttgctctgcaagacaatcccaatcccgcgggagaggaaagcggattcttgtcattcgcaaagggcgacctgatcatactagaccacgatactggggagcaagtcatgaattctgggtgggcaaatggtatcaacgaaaggaccaaacaacggggggattttccaacagactccgtatatgtcatgcccacagttacaatgccaccgcgggagatcgttgccctcgtaacaatgactcccgaccagcgccaagacgtagttcggctgttacagctgaggaccgccgagcctgaagtgagggcgaagccatacacactggaggagttcagctacgactacttccgcccgccgcccaagcatacgttaagccgggtgatggtcagtaaggcgcggggaaaagaccgactctggtcccacactcgggagccactgaaacaggcacttcttaaaaagctcctcggttctgaggagctgtcccaggaggcttgtctcgctttcatcgccgtgctgaaatacatgggcgattatccctctaagcgtacaagaagcgttaacgagttgaccgaccagatcttcgaagggcccctcaaggccgaacctctgaaggatgaggcctatgttcagatcctcaagcagctgacagacaatcacatcagatattccgaggagcggggctgggagcttttgtggctttgtaccggcttgttccctcccagcaacatcctgctgccccacgtccagagatttttgcagagcaggaagcattgccccctggccatcgactgtctacaaaggctgcaaaaggctcttcgtaatggcagcagaaaatatcctccgcacctggttgaggtagaagcgatccagcataagacgacacaaatatttcataaggtgtatttcccggatgataccgatgaggcatttgaagtggaaagctctaccaaggccaaggacttttgccaaaacatagctactcgtctgctactgaaatccagcgaaggcttttcactgttcgtcaagattgctgataaagtactcagtgtccccgagaatgattttttcttcgatttcgtgcggcatcttaccgactggataaaaaaggctcgaccgatcaaagatggtatcgtcccatcccttacatatcaggtgtttttcatgaaaaaactttggaccactaccgtcccaggtaaggaccctatggctgactccatctttcactattaccaggagttaccgaagtacctcaggggctatcataagtgtacacgggaagaggtgctgcagctgggagccctgatttaccgcgtgaagttcgaggaagacaagtcctattttcctagtattccgaaactactacgcgaacttgtccctcaggacttaatccgtcaagtgagccccgacgactggaagcgatctatagtagcatacttcaacaaacacgctggtaaatcaaaggaggaggccaagctggccttcctgaagcttatctttaagtggccaacttttggcagtgcttttttcgaggtgaagcaaaccactgaacccaacttccccgaaattctactcattgctatcaacaaatatggggtctctcttatcgacccaaagacgaaggatattttaactacccacccctttacaaagatctcaaattggtcgagtggtaatacctattttcatataacgatagggaatctagtcaggggaagcaaactgttgtgcgaaacctcgctgggctacaagatggacgatctgttgactagctatatcagccagatgctaacagctatgtcaaagcaaaggggctcaaggagcgggaaatag

SEQ ID NO: 5780 - DNA, 6555 bp, Artificial Sequence
  derived and/or modified sequence
gccctgctgcagaagggggaccacgtgtggatggacctgcggctgggccaggagtttgatgtgcccatcggggctgtggtgaagctgtgtgacagcggccaggtgcaggtggtggatgatgaagataatgagcactggatcagcccccagaatgccacccacatcaagcccatgcaccccacctctgtgcacggcgtggaggacatgatccggctgggggacctgaatgaggccggcatcctgaggaacctgctgatccgctacagagaccacctgatctacacctacacaggcagcatcctggtggccgtgaacccctaccagctgctgagcatctacagccctgagcacatccggcagtacaccaacaagaagatcggggagatgccaccccacatctttgccatcgctgacaactgctacttcaacatgaagaggaacagccgggaccagtgctgcatcatcagcggggagagcggggccggcaagacagagagcaccaagctgatcctgcagttcctggccgccatcagcggccagcacagctggattgagcagcaggtgctggaggccacccccatcctggaggcctttggaaatgccaagaccatcagaaatgacaacagcagcagatttgggaagtacatcgacatccacttcaacaagagaggagccatcgagggcgccaagattgagcagtacctgctggagaagagccgggtgtgccggcaggccctggatgaaagaaactaccacgtgttctactgcatgctggagggcatgtctgaggaccagaagaagaagctgggcctgggccaggccagtgactacaactacctggccatgggcaactgcatcacctgtgagggccgggtggacagccaggagtatgccaacatccgcagcgccatgaaggtgctgatgttcacagacacagagaactgggagatcagcaagctgctggccgccatcctgcacctgggcaacctgcagtatgaggcccggacctttgagaacctggatgcctgtgaggtgctcttcagccccagcctggccacagctgccagcctgctggaggtgaaccccccagacctgatgagctgcctgaccagcaggaccctcatcaccagaggagagaccgtgtccacccccctgagccgggagcaggccctggatgtgagagatgcctttgtgaagggcatctacggccgcctgtttgtgtggatcgtggacaagatcaatgctgccatctacaagccacccagccaggatgtgaagaacagcagaagaagcatcggcctgctggacatcttcggctttgaaaattttgctgtgaacagctttgagcagctgtgcatcaactttgccaatgagcacctgcagcagttctttgtgagacatgtgttcaagctggagcaggaggagtatgacctggagagcattgactggctgcacatcgagttcacagacaaccaggatgccctggacatgattgccaacaagcccatgaacatcatcagcctgattgatgaggagagcaagttccccaagggcacagacaccaccatgctgcacaagctgaacagccagcacaagctgaatgccaactacatcccccccaagaacaaccacgagacccagtttggcatcaaccactttgctggcatcgtgtactatgagacccagggcttcctggagaagaacagagacaccctgcatggagacatcatccagctggtgcacagcagcaggaacaagttcatcaagcagatcttccaggctgatgtggccatgggcgctgagaccaggaagaggagccccaccctgagcagccagttcaagaggagcctggagctgctgatgaggaccctgggcgcctgccagcccttctttgtgcgctgcatcaagcccaatgagttcaagaagcccatgctgtttgacagacacctgtgtgtgcggcagctgcgctacagcggcatgatggagaccatccgcatcagaagagctggctaccccatccgctacagctttgtggagtttgtggagcgctacagagtgctgctgcccggggtgaagccagcctacaagcagggcgacctgcggggcacctgccagaggatggccgaggccgtgctgggcacccatgatgactggcagatcggcaagaccaagatcttcctgaaggaccaccacgacatgctgctggaggtggagcgggacaaggccatcacagacagagtcatcctgctgcagaaggtgatccggggcttcaaggacaggagcaacttcctgaagctgaagaatgctgccaccctcatccagaggcactggaggggccacaactgcaggaagaactacggcctgatgaggctgggcttcctgcggctgcaggccctgcacaggagcaggaagctgcaccagcagtaccgcctggcccggcagaggatcatccagttccaggcccgctgccgggcctacctggtgaggaaggccttccgccaccggctgtgggccgtgctgactgtgcaggcctatgcccggggcatgattgcccggcggctgcaccagaggctgcgggcagagtacctgtggaggctggaggccgagaagatgaggctggccgaggaggagaagctgaggaaggagatgtctgccaagaaggccaaggaggaggccgagaggaagcaccaggagcggctggcccagctggcccgggaggatgctgagcgggagctgaaggagaaggaggccgcccggaggaagaaggagctgctggagcagatggagcgggcccggcatgagcctgtgaaccacagcgacatggtggacaagatgtttggcttcctgggcaccagcggcggcctgcccggccaggagggccaggcccccagcggctttgaggacctggagcggggcagaagagagatggtggaggaggacctggatgctgccctgcccctgcctgatgaagatgaggaggacctgtctgagtacaagtttgccaagtttgctgccacctacttccagggcaccaccacccacagctacacccggcggcccctgaagcagcccctgctgtaccatgatgatgaaggagaccagctggccgccctggccgtgtggatcaccatcctgcgcttcatgggagacctgcctgagcccaagtaccacacagccatgtctgatggcagcgagaagatccctgtgatgaccaagatctatgagaccctgggcaagaagacctacaagcgggagctgcaggccctgcagggcgagggggaggtgaccaagaggctgcatgatggagagagcacagtgcagggcaacagcatgctggaggaccggcccaccagcaacctggagaagctgcacttcatcattggaaatggcatcctgcggcctgccctgagagatgagatctactgccagatcagcaagcagctgacccacaaccccagcaagagcagctatgcccggggctggatcctggtgtccctgtgtgtgggctgctttgcccccagcgagaagtttgtgaagtacctgaggaacttcatccacggcggccccccaggctacgccccctactgtgaggagcggctgcggaggacctttgtgaatggcaccaggacccagccccccagctggctggagctgcaggccaccaagagcaagaagcccatcatgctgcctgtgaccttcatggatggcaccaccaagaccctgctgacagattctgccaccacagccaaggagctgtgcaatgccctggccgacaagatcagcctgaaggaccgcttcggcttcagcctgtacatcgccctgtttgacaaggtgagcagcctgggcagcggcagtgaccacgtgatggatgccatcagccagtgtgagcagtatgccaaggagcagggcgcccaggagagaaatgccccctggaggctcttcttcaggaaggaggtgttcaccccctggcacagccccagcgaggacaacgtggccaccaacctgatctaccagcaggtggtgcggggcgtgaagtttggagagtaccgctgtgagaaggaggatgacctggccgagctggccagccagcagtactttgtggactatggcagcgagatgatcctggagcggctgctgaacctggtgcccacctacatcccagaccgggagatcacccccctgaagaccctggagaagtgggcccagctggccatcgccgcccacaagaagggcatctatgcccagaggagaacagatgcccagaaggtgaaggaggatgtggtgtcctatgcccgcttcaagtggcccctgctcttcagccgcttctatgaggcctacaagttcagcggccccagcctgcccaagaatgatgtgattgtggccgtgaactggacaggagtgtactttgtggatgagcaggagcaggtgctgctggagctgtccttccctgagatcatggctgtgagcagcagcagagaatgtcgggtgtggctgagcctgggctgcagcgacctgggctgtgccgccccccacagcggctgggccggcctgaccccagctggcccctgcagcccctgctggagctgccgcggggccaagaccacagcccccagcttcaccctggccaccatcaagggagatgagtacaccttcaccagcagcaatgctgaggacatccgggacctggtggtgaccttcctggagggcctgaggaagaggagcaaatatgtggtggccctgcaggacaaccccaacccagctggggaggagagcggcttcctgagctttgccaagggggacctgatcatcctggaccatgacaccggggagcaggtgatgaacagcggctgggccaacggcatcaatgaaagaaccaagcagagaggagacttccccacagattctgtgtatgtgatgcccaccgtgaccatgccaccccgggagatcgtggccctggtgaccatgaccccagaccagaggcaggatgtggtgcggctgctgcagctgaggacagctgagcctgaggtgcgggccaagccctacaccctggaggagttctcctatgactacttccggcccccacccaagcacaccctgagccgggtgatggtgtccaaggcccggggcaaggaccggctgtggagccacacccgggagcccctgaagcaggccctgctgaagaagctgctgggcagcgaggagctgagccaggaggcctgcctggccttcatcgctgtgctgaagtacatgggagactaccccagcaagaggaccaggtctgtgaatgagctgacagaccagatctttgagggccccctgaaggccgagcccctgaaggatgaggcctacgtgcagatcctgaagcagctgacagacaaccacatccgctacagcgaggagcggggctgggagctgctgtggctgtgcaccggcctcttcccccccagcaacatcctgctgccccacgtgcagcgcttcctgcagagcaggaagcactgccccctggccatcgactgcctgcagaggctgcagaaggccctgagaaatggcagcaggaagtacccaccccacctggtggaggtggaggccatccagcacaagaccacccagatcttccacaaggtgtacttcccagatgacacagatgaggcctttgaggtggagagcagcaccaaggccaaggacttctgccagaacatcgccacccggctgctgctgaagagcagcgagggcttcagcctgtttgtgaagattgctgacaaggtgctgtctgtgcctgaaaatgacttcttctttgattttgtgcgccacctgacagactggatcaagaaggcccggcccatcaaggatggcatcgtgcccagcctgacctaccaggtgttcttcatgaagaagctgtggaccaccaccgtgcctgggaaggaccccatggctgacagcatcttccactactaccaggagctgcccaagtacctgcggggctaccacaagtgcacccgggaggaggtgctgcagctgggcgccctgatctacagagtgaagtttgaggaggacaagagctacttccccagcatccccaagctgctgcgggagctggtgccccaggacctgatccggcaggtgtccccagatgactggaagaggagcatcgtggcctacttcaacaagcacgccggcaagagcaaggaggaggccaagctggccttcctgaagctgatcttcaagtggcccacctttggaagtgccttctttgaggtgaagcagaccacagagcccaacttccctgagatcctgctgattgccatcaacaagtatggagtgtccctgattgaccccaagaccaaggacatcctgaccacccaccccttcaccaagatcagcaactggagcagcggcaacacctacttccacatcaccatcggcaacctggtgcggggcagcaagctgctgtgtgagaccagcctgggctacaagatggatgacctgctgaccagctacatcagccagatgctgacagccatgagcaagcagaggggcagccgcagcggcaagtag

SEQ ID NO: 5781 - DNA, 6645 bp, Artificial Sequence
  derived and/or modified sequence
gccctgctgcagaagggggaccacgtgtggatggacctgcggctgggccaggagtttgatgtgcccatcggggctgtggtgaagctgtgtgacagcggccaggtgcaggtggtggatgatgaagataatgagcactggatcagcccccagaatgccacccacatcaagcccatgcaccccacctctgtgcacggcgtggaggacatgatccggctgggggacctgaatgaggccggcatcctgaggaacctgctgatccgctacagagaccacctgatctacacctacacaggcagcatcctggtggccgtgaacccctaccagctgctgagcatctacagccctgagcacatccggcagtacaccaacaagaagatcggggagatgccaccccacatctttgccatcgctgacaactgctacttcaacatgaagaggaacagccgggaccagtgctgcatcatcagcggggagagcggggccggcaagacagagagcaccaagctgatcctgcagttcctggccgccatcagcggccagcacagctggattgagcagcaggtgctggaggccacccccatcctggaggcctttggaaatgccaagaccatcagaaatgacaacagcagcagatttgggaagtacatcgacatccacttcaacaagagaggagccatcgagggcgccaagattgagcagtacctgctggagaagagccgggtgtgccggcaggccctggatgaaagaaactaccacgtgttctactgcatgctggagggcatgtctgaggaccagaagaagaagctgggcctgggccaggccagtgactacaactacctggccatgggcaactgcatcacctgtgagggccgggtggacagccaggagtatgccaacatccgcagcgccatgaaggtgctgatgttcacagacacagagaactgggagatcagcaagctgctggccgccatcctgcacctgggcaacctgcagtatgaggcccggacctttgagaacctggatgcctgtgaggtgctcttcagccccagcctggccacagctgccagcctgctggaggtgaaccccccagacctgatgagctgcctgaccagcaggaccctcatcaccagaggagagaccgtgtccacccccctgagccgggagcaggccctggatgtgagagatgcctttgtgaagggcatctacggccgcctgtttgtgtggatcgtggacaagatcaatgctgccatctacaagccacccagccaggatgtgaagaacagcagaagaagcatcggcctgctggacatcttcggctttgaaaattttgctgtgaacagctttgagcagctgtgcatcaactttgccaatgagcacctgcagcagttctttgtgagacatgtgttcaagctggagcaggaggagtatgacctggagagcattgactggctgcacatcgagttcacagacaaccaggatgccctggacatgattgccaacaagcccatgaacatcatcagcctgattgatgaggagagcaagttccccaagggcacagacaccaccatgctgcacaagctgaacagccagcacaagctgaatgccaactacatcccccccaagaacaaccacgagacccagtttggcatcaaccactttgctggcatcgtgtactatgagacccagggcttcctggagaagaacagagacaccctgcatggagacatcatccagctggtgcacagcagcaggaacaagttcatcaagcagatcttccaggctgatgtggccatgggcgctgagaccaggaagaggagccccaccctgagcagccagttcaagaggagcctggagctgctgatgaggaccctgggcgcctgccagcccttctttgtgcgctgcatcaagcccaatgagttcaagaagcccatgctgtttgacagacacctgtgtgtgcggcagctgcgctacagcggcatgatggagaccatccgcatcagaagagctggctaccccatccgctacagctttgtggagtttgtggagcgctacagagtgctgctgcccggggtgaagccagcctacaagcagggcgacctgcggggcacctgccagaggatggccgaggccgtgctgggcacccatgatgactggcagatcggcaagaccaagatcttcctgaaggaccaccacgacatgctgctggaggtggagcgggacaaggccatcacagacagagtcatcctgctgcagaaggtgatccggggcttcaaggacaggagcaacttcctgaagctgaagaatgctgccaccctcatccagaggcactggaggggccacaactgcaggaagaactacggcctgatgaggctgggcttcctgcggctgcaggccctgcacaggagcaggaagctgcaccagcagtaccgcctggcccggcagaggatcatccagttccaggcccgctgccgggcctacctggtgaggaaggccttccgccaccggctgtgggccgtgctgactgtgcaggcctatgcccggggcatgattgcccggcggctgcaccagaggctgcgggcagagtacctgtggaggctggaggccgagaagatgaggctggccgaggaggagaagctgaggaaggagatgtctgccaagaaggccaaggaggaggccgagaggaagcaccaggagcggctggcccagctggcccgggaggatgctgagcgggagctgaaggagaaggaggccgcccggaggaagaaggagctgctggagcagatggagcgggcccggcatgagcctgtgaaccacagcgacatggtggacaagatgtttggcttcctgggcaccagcggcggcctgcccggccaggagggccaggcccccagcggctttgaggacctggagcggggcagaagagagatggtggaggaggacctggatgctgccctgcccctgcctgatgaagatgaggaggacctgtctgagtacaagtttgccaagtttgctgccacctacttccagggcaccaccacccacagctacacccggcggcccctgaagcagcccctgctgtaccatgatgatgaaggagaccagctggccgccctggccgtgtggatcaccatcctgcgcttcatgggagacctgcctgagcccaagtaccacacagccatgtctgatggcagcgagaagatccctgtgatgaccaagatctatgagaccctgggcaagaagacctacaagcgggagctgcaggccctgcagggcgagggggaggcccagctgcctgagggccagaagaagagctctgtgcgccacaagctggtgcacctgaccctgaagaagaagagcaagctgacagaggaggtgaccaagaggctgcatgatggagagagcacagtgcagggcaacagcatgctggaggaccggcccaccagcaacctggagaagctgcacttcatcattggaaatggcatcctgcggcctgccctgagagatgagatctactgccagatcagcaagcagctgacccacaaccccagcaagagcagctatgcccggggctggatcctggtgtccctgtgtgtgggctgctttgcccccagcgagaagtttgtgaagtacctgaggaacttcatccacggcggccccccaggctacgccccctactgtgaggagcggctgcggaggacctttgtgaatggcaccaggacccagccccccagctggctggagctgcaggccaccaagagcaagaagcccatcatgctgcctgtgaccttcatggatggcaccaccaagaccctgctgacagattctgccaccacagccaaggagctgtgcaatgccctggccgacaagatcagcctgaaggaccgcttcggcttcagcctgtacatcgccctgtttgacaaggtgagcagcctgggcagcggcagtgaccacgtgatggatgccatcagccagtgtgagcagtatgccaaggagcagggcgcccaggagagaaatgccccctggaggctcttcttcaggaaggaggtgttcaccccctggcacagccccagcgaggacaacgtggccaccaacctgatctaccagcaggtggtgcggggcgtgaagtttggagagtaccgctgtgagaaggaggatgacctggccgagctggccagccagcagtactttgtggactatggcagcgagatgatcctggagcggctgctgaacctggtgcccacctacatcccagaccgggagatcacccccctgaagaccctggagaagtgggcccagctggccatcgccgcccacaagaagggcatctatgcccagaggagaacagatgcccagaaggtgaaggaggatgtggtgtcctatgcccgcttcaagtggcccctgctcttcagccgcttctatgaggcctacaagttcagcggccccagcctgcccaagaatgatgtgattgtggccgtgaactggacaggagtgtactttgtggatgagcaggagcaggtgctgctggagctgtccttccctgagatcatggctgtgagcagcagcagagaatgtcgggtgtggctgagcctgggctgcagcgacctgggctgtgccgccccccacagcggctgggccggcctgaccccagctggcccctgcagcccctgctggagctgccgcggggccaagaccacagcccccagcttcaccctggccaccatcaagggagatgagtacaccttcaccagcagcaatgctgaggacatccgggacctggtggtgaccttcctggagggcctgaggaagaggagcaaatatgtggtggccctgcaggacaaccccaacccagctggggaggagagcggcttcctgagctttgccaagggggacctgatcatcctggaccatgacaccggggagcaggtgatgaacagcggctgggccaacggcatcaatgaaagaaccaagcagagaggagacttccccacagattctgtgtatgtgatgcccaccgtgaccatgccaccccgggagatcgtggccctggtgaccatgaccccagaccagaggcaggatgtggtgcggctgctgcagctgaggacagctgagcctgaggtgcgggccaagccctacaccctggaggagttctcctatgactacttccggcccccacccaagcacaccctgagccgggtgatggtgtccaaggcccggggcaaggaccggctgtggagccacacccgggagcccctgaagcaggccctgctgaagaagctgctgggcagcgaggagctgagccaggaggcctgcctggccttcatcgctgtgctgaagtacatgggagactaccccagcaagaggaccaggtctgtgaatgagctgacagaccagatctttgagggccccctgaaggccgagcccctgaaggatgaggcctacgtgcagatcctgaagcagctgacagacaaccacatccgctacagcgaggagcggggctgggagctgctgtggctgtgcaccggcctcttcccccccagcaacatcctgctgccccacgtgcagcgcttcctgcagagcaggaagcactgccccctggccatcgactgcctgcagaggctgcagaaggccctgagaaatggcagcaggaagtacccaccccacctggtggaggtggaggccatccagcacaagaccacccagatcttccacaaggtgtacttcccagatgacacagatgaggcctttgaggtggagagcagcaccaaggccaaggacttctgccagaacatcgccacccggctgctgctgaagagcagcgagggcttcagcctgtttgtgaagattgctgacaaggtgctgtctgtgcctgaaaatgacttcttctttgattttgtgcgccacctgacagactggatcaagaaggcccggcccatcaaggatggcatcgtgcccagcctgacctaccaggtgttcttcatgaagaagctgtggaccaccaccgtgcctgggaaggaccccatggctgacagcatcttccactactaccaggagctgcccaagtacctgcggggctaccacaagtgcacccgggaggaggtgctgcagctgggcgccctgatctacagagtgaagtttgaggaggacaagagctacttccccagcatccccaagctgctgcgggagctggtgccccaggacctgatccggcaggtgtccccagatgactggaagaggagcatcgtggcctacttcaacaagcacgccggcaagagcaaggaggaggccaagctggccttcctgaagctgatcttcaagtggcccacctttggaagtgccttctttgaggtgaagcagaccacagagcccaacttccctgagatcctgctgattgccatcaacaagtatggagtgtccctgattgaccccaagaccaaggacatcctgaccacccaccccttcaccaagatcagcaactggagcagcggcaacacctacttccacatcaccatcggcaacctggtgcggggcagcaagctgctgtgtgagaccagcctgggctacaagatggatgacctgctgaccagctacatcagccagatgctgacagccatgagcaagcagaggggcagccgcagcggcaagtag

SEQ ID NO: 5782 - DNA, 6648 bp, Artificial Sequence
  derived and/or modified sequence
atggtgatcctgcagcagggcgaccacgtgtggatggacctgcggctgggccaggagtttgatgtgcccatcggggctgtggtgaagctgtgtgacagcggccaggtgcaggtggtggatgatgaggacaatgagcactggatcagcccccagaatgccacccacatcaagcccatgcaccccacctctgtgcatggagtggaggacatgatccggctgggggacctgaatgaagctggcatcctgaggaacctgctgatccgctacagagaccacctgatctacacctacacaggcagcatcctggtggccgtgaacccctaccagctgctgagcatctacagccctgagcacatccggcagtacaccaacaagaagattggagagatgccaccccacatctttgccatcgctgacaactgctacttcaacatgaagaggaacagccgggaccagtgctgcatcatctctggagagagcggggccggcaagacagagagcaccaagctgatcctgcagttcctggccgccatcagcggccagcacagctggattgagcagcaggtgctggaggccacccccatcctggaggcctttggaaatgccaagaccatcagaaatgacaacagcagcagatttgggaagtacatcgacatccacttcaacaagagaggagccattgaaggagccaagattgagcagtacctgctggagaagagccgggtgtgccggcaggccctggatgagaggaactaccacgtgttctactgcatgctggagggcatgtctgaggaccagaagaagaagctgggcctgggccaggccagtgactacaactacctggccatgggcaactgcatcacctgtgagggccgggtggacagccaggagtatgccaacatccgcagcgccatgaaggtgctgatgttcacagacacagagaactgggagatcagcaagctgctggccgccatcctgcacctgggcaacctgcagtatgaggcccggacctttgagaacctggatgcctgtgaggtgctcttcagccccagcctggccacagctgccagcctgctggaggtgaaccccccagacctgatgagctgcctgaccagcaggaccctcatcaccagaggagaaacagtgtccacccccctgagccgggagcaggccctggatgtgagagatgcctttgtgaagggcatctacggccgcctgtttgtgtggatcgtggacaagatcaatgctgccatctacaagccacccagccaggatgtgaagaacagccgccgcagcatcggcctgctggacatctttggatttgagaactttgctgtgaacagctttgagcagctgtgcatcaactttgccaatgagcacctgcagcagttctttgtgcgccacgtgttcaagctggagcaggaggagtatgacctggagagcattgactggctgcacatcgagttcacagacaaccaggatgccctggacatgattgccaacaagcccatgaacatcatcagcctgattgatgaggagagcaagttccccaagggcacagacaccaccatgctgcacaagctgaacagccagcacaagctgaatgccaactacatcccccccaagaacaaccacgagacccagtttggcatcaaccactttgctggcatcgtgtactatgagacccagggcttcctggagaagaacagagacaccctgcacggggacatcatccagctggtgcacagcagcaggaacaagttcatcaagcagatcttccaggctgatgtggccatgggcgctgagaccaggaagaggagccccaccctgagcagccagttcaagaggagcctggagctgctgatgaggaccctgggcgcctgccagcccttctttgtgcgctgcatcaagcccaatgagttcaagaagcccatgctgtttgacagacacctgtgtgtgcggcagctgcgctacagcggcatgatggagaccatccgcatccggcgggccggctaccccatccgctacagctttgtggagtttgtggagcgctacagagtgctgctgcccggggtgaagccagcctacaagcagggcgacctgcggggcacctgccagaggatggccgaggccgtgctgggcacccatgatgactggcagatcggcaagaccaagatcttcctgaaggaccaccacgacatgctgctggaggtggagcgggacaaggccatcacagacagagtcatcctgctgcagaaggtgatccggggcttcaaggacaggagcaacttcctgaagctgaagaatgctgccaccctcatccagaggcactggaggggccacaactgcaggaagaactacggcctgatgaggctgggcttcctgcggctgcaggccctgcacaggagcaggaagctgcaccagcagtaccgcctggcccggcagaggatcatccagttccaggcccgctgccgggcctacctggtgaggaaggccttccgccaccggctgtgggccgtgctgactgtgcaggcctatgcccggggcatgattgcccggcggctgcaccagaggctgcgggcagagtacctgtggaggctggaggccgagaagatgaggctggccgaggaggagaagctgaggaaggagatgtctgccaagaaggccaaggaggaggccgagaggaagcaccaggagcggctggcccagctggccagagaagatgctgagcgggagctgaaggagaaggaggccgcccggaggaagaaggagctgctggagcagatggagcgggcccggcatgagcctgtgaaccacagcgacatggtggacaagatgtttggcttcctgggcaccagcggcggcctgcccggccaggagggccaggcccccagcggctttgaggacctggagcggggccggcgggagatggtggaggaggacctggatgctgccctgcccctgcctgatgaagatgaggaggacctgtctgagtacaagtttgccaagtttgctgccacctacttccagggcaccaccacccacagctacacccggcggcccctgaagcagcccctgctgtaccatgatgatgaaggagaccagctggccgccctggccgtgtggatcaccatcctgcgcttcatgggagacctgcctgagcccaagtaccacacagccatgtctgatggcagcgagaagatccctgtgatgaccaagatctatgagaccctgggcaagaagacctacaagcgggagctgcaggccctgcagggcgagggggaggcccagctgcctgagggccagaagaagagctctgtgcgccacaagctggtgcacctgaccctgaagaagaagagcaagctgacagaggaggtgaccaagaggctgcatgatggagagagcacagtgcagggcaacagcatgctggaggaccggcccaccagcaacctggagaagctgcacttcatcattggaaatggcatcctgcggcctgccctgagagatgagatctactgccagatcagcaagcagctgacccacaaccccagcaagagcagctatgcccggggctggatcctggtgtccctgtgtgtgggctgctttgcccccagcgagaagtttgtgaagtacctgaggaacttcatccatggaggccccccaggctacgccccctactgtgaggagcggctgcggaggacctttgtgaatggcaccaggacccagcccccatcctggctggagctgcaggccaccaagagcaagaagcccatcatgctgcctgtgaccttcatggatggcaccaccaagaccctgctgacagacagcgccaccacagccaaggagctgtgcaatgccctggccgacaagatcagcctgaaggacagatttggcttcagcctgtacatcgccctgtttgacaaggtgagcagcctgggcagcggcagtgaccacgtgatggatgccatcagccagtgtgagcagtatgccaaggagcagggcgcccaggagagaaatgccccctggaggctcttcttcaggaaggaggtgttcaccccctggcacagccccagtgaagataatgtggccaccaacctgatctaccagcaggtggtgcggggcgtgaagtttggagagtaccgctgtgagaaggaggatgacctggccgagctggccagccagcagtactttgtggactatggcagcgagatgatcctggagcggctgctgaacctggtgcccacctacatcccagaccgggagatcacccccctgaagaccctggagaagtgggcccagctggccatcgccgcccacaagaagggcatctatgcccagaggagaacagatgcccagaaggtgaaggaggatgtggtgtcctatgcccgcttcaagtggcccctgctcttcagccgcttctatgaggcctacaagttcagcggccccagcctgcccaagaatgatgtgattgtggccgtgaactggacaggagtgtactttgtggatgagcaggagcaggtgctgctggagctgtccttccctgagatcatggctgtgagcagcagccgggagtgccgggtgtggctgagcctgggctgcagcgacctgggctgtgccgccccccacagcggctgggccggcctgaccccagctggcccctgcagcccctgctggagctgccgcggggccaagaccacagcccccagcttcaccctggccaccatcaagggagatgagtacaccttcaccagcagcaatgctgaggacatccgggacctggtggtgaccttcctggagggcctgaggaagaggagcaaatatgtggtggccctgcaggacaaccccaacccagctggggaggagagcggcttcctgagctttgccaagggggacctgatcatcctggaccatgacacaggagagcaggtgatgaacagcggctgggccaacggcatcaatgaaagaaccaagcagagaggagacttccccacagacagcgtgtatgtgatgcccaccgtgaccatgccaccccgggagatcgtggccctggtgaccatgaccccagaccagaggcaggatgtggtgcggctgctgcagctgaggacagctgagcctgaggtgcgggccaagccctacaccctggaggagttctcctatgactacttccggcccccacccaagcacaccctgagccgggtgatggtgtccaaggcccggggcaaggaccggctgtggagccacacccgggagcccctgaagcaggccctgctgaagaagctgctgggcagcgaggagctgagccaggaggcctgcctggccttcatcgctgtgctgaagtacatgggagactaccccagcaagaggaccaggtctgtgaatgagctgacagaccagatctttgagggccccctgaaggccgagcccctgaaggatgaggcctacgtgcagatcctgaagcagctgacagacaaccacatccgctacagcgaggagcggggctgggagctgctgtggctgtgcaccggcctcttcccccccagcaacatcctgctgccccacgtgcagcgcttcctgcagagcaggaagcactgccccctggccatcgactgcctgcagaggctgcagaaggccctgagaaatggcagcaggaagtacccaccccacctggtggaggtggaggccatccagcacaagaccacccagatcttccacaaggtgtacttcccagatgacacagatgaggcctttgaggtggagagcagcaccaaggccaaggacttctgccagaacatcgccacccggctgctgctgaagagcagcgagggcttcagcctgtttgtgaagattgctgacaaggtgctgtctgtgcctgaaaatgacttcttctttgattttgtgcgccacctgacagactggatcaagaaggcccggcccatcaaggatggcatcgtgcccagcctgacctaccaggtgttcttcatgaagaagctgtggaccaccaccgtgcctgggaaggaccccatggctgacagcatcttccactactaccaggagctgcccaagtacctgcggggctaccacaagtgcacccgggaggaggtgctgcagctgggcgccctgatctacagagtgaagtttgaggaggacaagagctacttccccagcatccccaagctgctgcgggagctggtgccccaggacctgatccggcaggtgtccccagatgactggaagaggagcatcgtggcctacttcaacaagcatgctgggaagagcaaggaggaggccaagctggccttcctgaagctgatcttcaagtggcccaccttcggcagcgccttctttgaggtgaagcagaccacagagcccaacttccctgagatcctgctgattgccatcaacaagtatggagtgtccctgattgaccccaagaccaaggacatcctgaccacccaccccttcaccaagatcagcaactggagcagcggcaacacctacttccacatcaccatcggcaacctggtgcggggcagcaagctgctgtgtgagaccagcctgggctacaagatggatgacctgctgaccagctacatcagccagatgctgacagccatgagcaagcagaggggcagccgcagcggcaagtag

SEQ ID NO: 5783 - DNA, 6813 bp, Artificial Sequence
  derived and/or modified sequence
gcactgctccagaagggggaccatgtgtggatggacctgagattggggcaggagttcgacgtgcccatcggggcggtggtgaagctctgcgactctgggcaggtccaggtggtggatgatgaagacaatgaacactggatctctccgcagaacgcaacgcacatcaagcctatgcaccccacgtcggtccacggcgtggaggacatgatccgcctgggggacctcaacgaggcgggcatcttgcgcaacctgcttatccgctaccgggaccacctcatctacacgtatacgggctccatcctggtggctgtgaacccctaccagctgctctccatctactcgccagagcacatccgccagtataccaacaagaagattggggagatgcccccccacatctttgccattgctgacaactgctacttcaacatgaaacgcaacagccgagaccagtgctgcatcatcagtggggaatctggggccgggaagacggagagcacaaagctgatcctgcagttcctggcagccatcagtgggcagcactcgtggattgagcagcaggtcttggaggccacccccattctggaagcatttgggaatgccaagaccatccgcaatgacaactcaagccgtttcggaaagtacatcgacatccacttcaacaagcggggcgccatcgagggcgcgaagattgagcagtacctgctggaaaagtcacgtgtctgtcgccaggccctggatgaaaggaactaccacgtgttctactgcatgctggagggtatgagtgaggatcagaagaagaagctgggcttgggccaggcctctgactacaactacttggccatgggtaactgcataacctgtgagggccgggtggacagccaggagtacgccaacatccgctccgccatgaaggtgctcatgttcactgacaccgagaactgggagatctcgaagctcctggctgccatcctgcacctgggcaacctgcagtatgaggcacgcacatttgaaaacctggatgcctgtgaggttctcttctccccatcgctggccacagctgcatccctgcttgaggtgaaccccccagacctgatgagctgcctgactagccgcaccctcatcacccgcggggagacggtgtccaccccactgagcagggaacaggcactggacgtgcgcgacgccttcgtaaaggggatctacgggcggctgttcgtgtggattgtggacaagatcaacgcagcaatttacaagcctccctcccaggatgtgaagaactctcgcaggtccatcggcctcctggacatctttgggtttgagaactttgctgtgaacagctttgagcagctctgcatcaacttcgccaatgagcacctgcagcagttctttgtgcggcacgtgttcaagctggagcaggaggaatatgacctggagagcattgactggctgcacatcgagttcactgacaaccaggatgccctggacatgattgccaacaagcccatgaacatcatctccctcatcgatgaggagagcaagttccccaagggcacagacaccaccatgttacacaagctgaactcccagcacaagctcaacgccaactacatcccccccaagaacaaccatgagacccagtttggcatcaaccattttgcaggcatcgtctactatgagacccaaggcttcctggagaagaaccgagacaccctgcatggggacattatccagctggtccactcctccaggaacaagttcatcaagcagatcttccaggccgatgtcgccatgggcgccgagaccaggaagcgctcgcccacacttagcagccagttcaagcggtcactggagctgctgatgcgcacgctgggtgcctgccagcccttctttgtgcgatgcatcaagcccaatgagttcaagaagcccatgctgttcgaccggcacctgtgcgtgcgccagctgcggtactcaggaatgatggagaccatccgaatccgccgagctggctaccccatccgctacagcttcgtagagtttgtggagcggtaccgtgtgctgctgccaggtgtgaagccggcctacaagcagggcgacctccgcgggacttgccagcgcatggctgaggctgtgctgggcacccacgatgactggcagataggcaaaaccaagatctttctgaaggaccaccatgacatgctgctggaagtggagcgggacaaagccatcaccgacagagtcatcctccttcagaaagtcatccggggattcaaagacaggtctaactttctgaagctgaagaacgctgccacactgatccagaggcactggcggggtcacaactgtaggaagaactacgggctgatgcgtctgggcttcctgcggctgcaggccctgcaccgctcccggaagctgcaccagcagtaccgcctggcccgccagcgcatcatccagttccaggcccgctgccgcgcctatctggtgcgcaaggccttccgccaccgcctctgggctgtgctcaccgtgcaggcctatgcccggggcatgatcgcccgcaggctgcaccaacgcctcagggctgagtatctgtggcgcctcgaggctgagaaaatgcggctggcggaggaagagaagcttcggaaggagatgagcgccaagaaggccaaggaggaggccgagcgcaagcatcaggagcgcctggcccagctggctcgtgaggacgctgagcgggagctgaaggagaaggaggccgctcggcggaagaaggagctcctggagcagatggaaagggcccgccatgagcctgtcaatcactcagacatggtggacaagatgtttggcttcctggggacttcaggtggcctgccaggccaggagggccaggcacctagtggctttgaggacctggagcgagggcggagggagatggtggaggaggacctggatgcagccctgcccctgcctgacgaggatgaggaggacctctctgagtataaatttgccaagttcgcggccacctacttccaggggacaaccacgcactcctacacccggcggccactcaaacagccactgctctaccatgacgacgagggtgaccagctggcagccctggcggtctggatcaccatcctccgcttcatgggggacctccctgagcccaagtaccacacagccatgagtgatggcagtgagaagatccctgtgatgaccaagatttatgagaccctgggcaagaagacgtacaagagggagctgcaggccctgcagggcgagggcgaggtgaccaagaggctgcatgacggggagtccacagtgcagggcaacagcatgctggaggaccggcccacctccaacctggagaagctgcacttcatcatcggcaatggcatcctgcggccagcactccgggacgagatctactgccagatcagcaagcagctgacccacaacccctccaagagcagctatgcccggggctggattctcgtgtctctctgcgtgggctgtttcgccccctccgagaagtttgtcaagtacctgcggaacttcatccacgggggcccgcccggctacgccccgtactgtgaggagcgcctgagaaggacctttgtcaatgggacacggacacagccgcccagctggctggagctgcaggccaccaagtccaagaagccaatcatgttgcccgtgacattcatggatgggaccaccaagaccctgctgacggactcggcaaccacggccaaggagctctgcaacgcgctggccgacaagatctctctcaaggaccggttcgggttctccctctacattgccctgtttgacaaggtgtcctccctgggcagcggcagtgaccacgtcatggacgccatctcccagtgcgagcagtacgccaaggagcagggcgcccaggagcgcaacgccccctggaggctcttcttccgcaaagaggtcttcacgccctggcacagcccctccgaggacaacgtggccaccaacctcatctaccagcaggtggtgcgaggagtcaagtttggggagtacaggtgtgagaaggaggacgacctggctgagctggcctcccagcagtactttgtagactatggctctgagatgatcctggagcgcctcctgaacctcgtgcccacctacatccccgaccgcgagatcacgcccctgaagacgctggagaagtgggcccagctggccatcgccgcccacaagaaggggatttatgcccagaggagaactgatgcccagaaggtcaaagaggatgtggtcagttatgcccgcttcaagtggcccttgctcttctccaggttttatgaagcctacaaattctcaggccccagtctccccaagaacgacgtcatcgtggccgtcaactggacgggtgtgtactttgtggatgagcaggagcaggtacttctggagctgtccttcccagagatcatggccgtgtccagcagcagggagtgccgtgtctggctctcactgggctgctctgatcttggctgtgctgcgcctcactcaggctgggcaggactgaccccggcggggccctgttctccgtgttggtcctgcaggggagcgaaaacgacggcccccagcttcacgctggccaccatcaagggggacgaatacaccttcacctccagcaatgctgaggacattcgtgacctggtggtcaccttcctagaggggctccggaagagatctaagtatgttgtggccctgcaggataaccccaaccccgcaggcgaggagtcaggcttcctcagctttgccaagggagacctcatcatcctggaccatgacacgggcgagcaggtcatgaactcgggctgggccaacggcatcaatgagaggaccaagcagcgtggggacttccccaccgacagtgtgtacgtcatgcccactgtcaccatgccaccgcgggagattgtggccctggtcaccatgactcccgatcagaggcaggacgttgtccggctcttgcagctgcgaacggcggagcccgaggtgcgtgccaagccctacacgctggaggagttttcctatgactacttcaggcccccacccaagcacacgctgagccgtgtcatggtgtccaaggcccgaggcaaggaccggctgtggagccacacgcgggaaccgctcaagcaggcgctgctcaagaagctcctgggcagtgaggagctctcgcaggaggcctgcctggccttcattgctgtgctcaagtacatgggcgactacccgtccaagaggacacgctccgtcaacgagctcaccgaccagatctttgagggtcccctgaaagccgagcccctgaaggacgaggcatatgtgcagatcctgaagcagctgaccgacaaccacatcaggtacagcgaggagcggggttgggagctgctctggctgtgcacgggccttttcccacccagcaacatcctcctgccccacgtgcagcgcttcctgcagtcccgaaagcactgcccactcgccatcgactgcctgcaacggctccagaaagccctgagaaacgggtcccggaagtaccctccgcacctggtggaggtggaggccatccagcacaagaccacccagattttccacaaagtctacttccctgatgacactgacgaggccttcgaagtggagtccagcaccaaggccaaggacttctgccagaacatcgccaccaggctgctcctcaagtcctcagagggattcagcctctttgtcaaaattgcagacaaggtcctcagcgttcctgagaatgacttcttctttgactttgttcgacacttgacagactggataaagaaagctcggcccatcaaggacggaattgtgccctcactcacctaccaggtgttcttcatgaagaagctgtggaccaccacggtgccagggaaggatcccatggccgattccatcttccactattaccaggagttgcccaagtatctccgaggctaccacaagtgcacgcgggaggaggtgctgcagctgggggcgctgatctacagggtcaagttcgaggaggacaagtcctacttccccagcatccccaagctgctgcgggagctggtgccccaggaccttatccggcaggtctcacctgatgactggaagcggtccatcgtcgcctacttcaacaagcacgcagggaagtccaaggaggaggccaagctggccttcctgaagctcatcttcaagtggcccacctttggctcagccttcttcgaggtgaagcaaactacggagccaaacttccctgagatcctcctaattgccatcaacaagtatggggtcagcctcatcgatcccaaaacgaaggatatcctcaccactcatcccttcaccaagatctccaactggagcagcggcaacacctacttccacatcaccattgggaacttggtgcgcgggagcaaactgctctgcgagacgtcactgggctacaagatggatgacctcctgacttcctacattagccagatgctcacagccatgagcaaacagcggggctccaggagcggcaagtgaacagtcacggggaggtgctggttccatgcctgctctcgaggcagcagtgggttcaggcccatcagctacccctgcagctggggaagacttatgccatcccggcagcgaggctgggctggccagccaccactgactataccaactgggcctctgatgttcttccagtgaggcatctctctgggatgcagaacttccctccatccacccctctggcacctgggttggtctaatcctagtttgctgtggccttcccggttg

SEQ ID NO: 5784 - DNA, 6903 bp, Artificial Sequence
  derived and/or modified sequence
gcactgctccagaagggggaccatgtgtggatggacctgagattggggcaggagttcgacgtgcccatcggggcggtggtgaagctctgcgactctgggcaggtccaggtggtggatgatgaagacaatgaacactggatctctccgcagaacgcaacgcacatcaagcctatgcaccccacgtcggtccacggcgtggaggacatgatccgcctgggggacctcaacgaggcgggcatcttgcgcaacctgcttatccgctaccgggaccacctcatctacacgtatacgggctccatcctggtggctgtgaacccctaccagctgctctccatctactcgccagagcacatccgccagtataccaacaagaagattggggagatgcccccccacatctttgccattgctgacaactgctacttcaacatgaaacgcaacagccgagaccagtgctgcatcatcagtggggaatctggggccgggaagacggagagcacaaagctgatcctgcagttcctggcagccatcagtgggcagcactcgtggattgagcagcaggtcttggaggccacccccattctggaagcatttgggaatgccaagaccatccgcaatgacaactcaagccgtttcggaaagtacatcgacatccacttcaacaagcggggcgccatcgagggcgcgaagattgagcagtacctgctggaaaagtcacgtgtctgtcgccaggccctggatgaaaggaactaccacgtgttctactgcatgctggagggtatgagtgaggatcagaagaagaagctgggcttgggccaggcctctgactacaactacttggccatgggtaactgcataacctgtgagggccgggtggacagccaggagtacgccaacatccgctccgccatgaaggtgctcatgttcactgacaccgagaactgggagatctcgaagctcctggctgccatcctgcacctgggcaacctgcagtatgaggcacgcacatttgaaaacctggatgcctgtgaggttctcttctccccatcgctggccacagctgcatccctgcttgaggtgaaccccccagacctgatgagctgcctgactagccgcaccctcatcacccgcggggagacggtgtccaccccactgagcagggaacaggcactggacgtgcgcgacgccttcgtaaaggggatctacgggcggctgttcgtgtggattgtggacaagatcaacgcagcaatttacaagcctccctcccaggatgtgaagaactctcgcaggtccatcggcctcctggacatctttgggtttgagaactttgctgtgaacagctttgagcagctctgcatcaacttcgccaatgagcacctgcagcagttctttgtgcggcacgtgttcaagctggagcaggaggaatatgacctggagagcattgactggctgcacatcgagttcactgacaaccaggatgccctggacatgattgccaacaagcccatgaacatcatctccctcatcgatgaggagagcaagttccccaagggcacagacaccaccatgttacacaagctgaactcccagcacaagctcaacgccaactacatcccccccaagaacaaccatgagacccagtttggcatcaaccattttgcaggcatcgtctactatgagacccaaggcttcctggagaagaaccgagacaccctgcatggggacattatccagctggtccactcctccaggaacaagttcatcaagcagatcttccaggccgatgtcgccatgggcgccgagaccaggaagcgctcgcccacacttagcagccagttcaagcggtcactggagctgctgatgcgcacgctgggtgcctgccagcccttctttgtgcgatgcatcaagcccaatgagttcaagaagcccatgctgttcgaccggcacctgtgcgtgcgccagctgcggtactcaggaatgatggagaccatccgaatccgccgagctggctaccccatccgctacagcttcgtagagtttgtggagcggtaccgtgtgctgctgccaggtgtgaagccggcctacaagcagggcgacctccgcgggacttgccagcgcatggctgaggctgtgctgggcacccacgatgactggcagataggcaaaaccaagatctttctgaaggaccaccatgacatgctgctggaagtggagcgggacaaagccatcaccgacagagtcatcctccttcagaaagtcatccggggattcaaagacaggtctaactttctgaagctgaagaacgctgccacactgatccagaggcactggcggggtcacaactgtaggaagaactacgggctgatgcgtctgggcttcctgcggctgcaggccctgcaccgctcccggaagctgcaccagcagtaccgcctggcccgccagcgcatcatccagttccaggcccgctgccgcgcctatctggtgcgcaaggccttccgccaccgcctctgggctgtgctcaccgtgcaggcctatgcccggggcatgatcgcccgcaggctgcaccaacgcctcagggctgagtatctgtggcgcctcgaggctgagaaaatgcggctggcggaggaagagaagcttcggaaggagatgagcgccaagaaggccaaggaggaggccgagcgcaagcatcaggagcgcctggcccagctggctcgtgaggacgctgagcgggagctgaaggagaaggaggccgctcggcggaagaaggagctcctggagcagatggaaagggcccgccatgagcctgtcaatcactcagacatggtggacaagatgtttggcttcctggggacttcaggtggcctgccaggccaggagggccaggcacctagtggctttgaggacctggagcgagggcggagggagatggtggaggaggacctggatgcagccctgcccctgcctgacgaggatgaggaggacctctctgagtataaatttgccaagttcgcggccacctacttccaggggacaaccacgcactcctacacccggcggccactcaaacagccactgctctaccatgacgacgagggtgaccagctggcagccctggcggtctggatcaccatcctccgcttcatgggggacctccctgagcccaagtaccacacagccatgagtgatggcagtgagaagatccctgtgatgaccaagatttatgagaccctgggcaagaagacgtacaagagggagctgcaggccctgcagggcgagggcgaggcccagctccccgagggccagaagaagagcagtgtgaggcacaagctggtgcatttgactctgaaaaagaagtccaagctcacagaggaggtgaccaagaggctgcatgacggggagtccacagtgcagggcaacagcatgctggaggaccggcccacctccaacctggagaagctgcacttcatcatcggcaatggcatcctgcggccagcactccgggacgagatctactgccagatcagcaagcagctgacccacaacccctccaagagcagctatgcccggggctggattctcgtgtctctctgcgtgggctgtttcgccccctccgagaagtttgtcaagtacctgcggaacttcatccacgggggcccgcccggctacgccccgtactgtgaggagcgcctgagaaggacctttgtcaatgggacacggacacagccgcccagctggctggagctgcaggccaccaagtccaagaagccaatcatgttgcccgtgacattcatggatgggaccaccaagaccctgctgacggactcggcaaccacggccaaggagctctgcaacgcgctggccgacaagatctctctcaaggaccggttcgggttctccctctacattgccctgtttgacaaggtgtcctccctgggcagcggcagtgaccacgtcatggacgccatctcccagtgcgagcagtacgccaaggagcagggcgcccaggagcgcaacgccccctggaggctcttcttccgcaaagaggtcttcacgccctggcacagcccctccgaggacaacgtggccaccaacctcatctaccagcaggtggtgcgaggagtcaagtttggggagtacaggtgtgagaaggaggacgacctggctgagctggcctcccagcagtactttgtagactatggctctgagatgatcctggagcgcctcctgaacctcgtgcccacctacatccccgaccgcgagatcacgcccctgaagacgctggagaagtgggcccagctggccatcgccgcccacaagaaggggatttatgcccagaggagaactgatgcccagaaggtcaaagaggatgtggtcagttatgcccgcttcaagtggcccttgctcttctccaggttttatgaagcctacaaattctcaggccccagtctccccaagaacgacgtcatcgtggccgtcaactggacgggtgtgtactttgtggatgagcaggagcaggtacttctggagctgtccttcccagagatcatggccgtgtccagcagcagggagtgccgtgtctggctctcactgggctgctctgatcttggctgtgctgcgcctcactcaggctgggcaggactgaccccggcggggccctgttctccgtgttggtcctgcaggggagcgaaaacgacggcccccagcttcacgctggccaccatcaagggggacgaatacaccttcacctccagcaatgctgaggacattcgtgacctggtggtcaccttcctagaggggctccggaagagatctaagtatgttgtggccctgcaggataaccccaaccccgcaggcgaggagtcaggcttcctcagctttgccaagggagacctcatcatcctggaccatgacacgggcgagcaggtcatgaactcgggctgggccaacggcatcaatgagaggaccaagcagcgtggggacttccccaccgacagtgtgtacgtcatgcccactgtcaccatgccaccgcgggagattgtggccctggtcaccatgactcccgatcagaggcaggacgttgtccggctcttgcagctgcgaacggcggagcccgaggtgcgtgccaagccctacacgctggaggagttttcctatgactacttcaggcccccacccaagcacacgctgagccgtgtcatggtgtccaaggcccgaggcaaggaccggctgtggagccacacgcgggaaccgctcaagcaggcgctgctcaagaagctcctgggcagtgaggagctctcgcaggaggcctgcctggccttcattgctgtgctcaagtacatgggcgactacccgtccaagaggacacgctccgtcaacgagctcaccgaccagatctttgagggtcccctgaaagccgagcccctgaaggacgaggcatatgtgcagatcctgaagcagctgaccgacaaccacatcaggtacagcgaggagcggggttgggagctgctctggctgtgcacgggccttttcccacccagcaacatcctcctgccccacgtgcagcgcttcctgcagtcccgaaagcactgcccactcgccatcgactgcctgcaacggctccagaaagccctgagaaacgggtcccggaagtaccctccgcacctggtggaggtggaggccatccagcacaagaccacccagattttccacaaagtctacttccctgatgacactgacgaggccttcgaagtggagtccagcaccaaggccaaggacttctgccagaacatcgccaccaggctgctcctcaagtcctcagagggattcagcctctttgtcaaaattgcagacaaggtcctcagcgttcctgagaatgacttcttctttgactttgttcgacacttgacagactggataaagaaagctcggcccatcaaggacggaattgtgccctcactcacctaccaggtgttcttcatgaagaagctgtggaccaccacggtgccagggaaggatcccatggccgattccatcttccactattaccaggagttgcccaagtatctccgaggctaccacaagtgcacgcgggaggaggtgctgcagctgggggcgctgatctacagggtcaagttcgaggaggacaagtcctacttccccagcatccccaagctgctgcgggagctggtgccccaggaccttatccggcaggtctcacctgatgactggaagcggtccatcgtcgcctacttcaacaagcacgcagggaagtccaaggaggaggccaagctggccttcctgaagctcatcttcaagtggcccacctttggctcagccttcttcgaggtgaagcaaactacggagccaaacttccctgagatcctcctaattgccatcaacaagtatggggtcagcctcatcgatcccaaaacgaaggatatcctcaccactcatcccttcaccaagatctccaactggagcagcggcaacacctacttccacatcaccattgggaacttggtgcgcgggagcaaactgctctgcgagacgtcactgggctacaagatggatgacctcctgacttcctacattagccagatgctcacagccatgagcaaacagcggggctccaggagcggcaagtgaacagtcacggggaggtgctggttccatgcctgctctcgaggcagcagtgggttcaggcccatcagctacccctgcagctggggaagacttatgccatcccggcagcgaggctgggctggccagccaccactgactataccaactgggcctctgatgttcttccagtgaggcatctctctgggatgcagaacttccctccatccacccctctggcacctgggttggtctaatcctagtttgctgtggccttcccggttg

SEQ ID NO: 5785 - DNA, 7462 bp, Artificial Sequence
  derived and/or modified sequence
gctctgggcaggagagagagggagagacaagagacacacacagagagacggcgaggaagggaaagacccagagggacgcctagaacgagacttggagccagacagaggaagaggggacgtgtgtttgcagactggctgggcccgtgacccagcttcctgagtcctccgtgcaggtggcagctgtaccaggctggcaggtcactgagagtgggcagctgggccccagaactgtgcctggcccagtgggcagcaggagctcctgacttgggaccatggtgattcttcagcagggggaccatgtgtggatggacctgagattggggcaggagttcgacgtgcccatcggggcggtggtgaagctctgcgactctgggcaggtccaggtggtggatgatgaagacaatgaacactggatctctccgcagaacgcaacgcacatcaagcctatgcaccccacgtcggtccacggcgtggaggacatgatccgcctgggggacctcaacgaggcgggcatcttgcgcaacctgcttatccgctaccgggaccacctcatctacacgtatacgggctccatcctggtggctgtgaacccctaccagctgctctccatctactcgccagagcacatccgccagtataccaacaagaagattggggagatgcccccccacatctttgccattgctgacaactgctacttcaacatgaaacgcaacagccgagaccagtgctgcatcatcagtggggaatctggggccgggaagacggagagcacaaagctgatcctgcagttcctggcagccatcagtgggcagcactcgtggattgagcagcaggtcttggaggccacccccattctggaagcatttgggaatgccaagaccatccgcaatgacaactcaagccgtttcggaaagtacatcgacatccacttcaacaagcggggcgccatcgagggcgcgaagattgagcagtacctgctggaaaagtcacgtgtctgtcgccaggccctggatgaaaggaactaccacgtgttctactgcatgctggagggtatgagtgaggatcagaagaagaagctgggcttgggccaggcctctgactacaactacttggccatgggtaactgcataacctgtgagggccgggtggacagccaggagtacgccaacatccgctccgccatgaaggtgctcatgttcactgacaccgagaactgggagatctcgaagctcctggctgccatcctgcacctgggcaacctgcagtatgaggcacgcacatttgaaaacctggatgcctgtgaggttctcttctccccatcgctggccacagctgcatccctgcttgaggtgaaccccccagacctgatgagctgcctgactagccgcaccctcatcacccgcggggagacggtgtccaccccactgagcagggaacaggcactggacgtgcgcgacgccttcgtaaaggggatctacgggcggctgttcgtgtggattgtggacaagatcaacgcagcaatttacaagcctccctcccaggatgtgaagaactctcgcaggtccatcggcctcctggacatctttgggtttgagaactttgctgtgaacagctttgagcagctctgcatcaacttcgccaatgagcacctgcagcagttctttgtgcggcacgtgttcaagctggagcaggaggaatatgacctggagagcattgactggctgcacatcgagttcactgacaaccaggatgccctggacatgattgccaacaagcccatgaacatcatctccctcatcgatgaggagagcaagttccccaagggcacagacaccaccatgttacacaagctgaactcccagcacaagctcaacgccaactacatcccccccaagaacaaccatgagacccagtttggcatcaaccattttgcaggcatcgtctactatgagacccaaggcttcctggagaagaaccgagacaccctgcatggggacattatccagctggtccactcctccaggaacaagttcatcaagcagatcttccaggccgatgtcgccatgggcgccgagaccaggaagcgctcgcccacacttagcagccagttcaagcggtcactggagctgctgatgcgcacgctgggtgcctgccagcccttctttgtgcgatgcatcaagcccaatgagttcaagaagcccatgctgttcgaccggcacctgtgcgtgcgccagctgcggtactcaggaatgatggagaccatccgaatccgccgagctggctaccccatccgctacagcttcgtagagtttgtggagcggtaccgtgtgctgctgccaggtgtgaagccggcctacaagcagggcgacctccgcgggacttgccagcgcatggctgaggctgtgctgggcacccacgatgactggcagataggcaaaaccaagatctttctgaaggaccaccatgacatgctgctggaagtggagcgggacaaagccatcaccgacagagtcatcctccttcagaaagtcatccggggattcaaagacaggtctaactttctgaagctgaagaacgctgccacactgatccagaggcactggcggggtcacaactgtaggaagaactacgggctgatgcgtctgggcttcctgcggctgcaggccctgcaccgctcccggaagctgcaccagcagtaccgcctggcccgccagcgcatcatccagttccaggcccgctgccgcgcctatctggtgcgcaaggccttccgccaccgcctctgggctgtgctcaccgtgcaggcctatgcccggggcatgatcgcccgcaggctgcaccaacgcctcagggctgagtatctgtggcgcctcgaggctgagaaaatgcggctggcggaggaagagaagcttcggaaggagatgagcgccaagaaggccaaggaggaggccgagcgcaagcatcaggagcgcctggcccagctggctcgtgaggacgctgagcgggagctgaaggagaaggaggccgctcggcggaagaaggagctcctggagcagatggaaagggcccgccatgagcctgtcaatcactcagacatggtggacaagatgtttggcttcctggggacttcaggtggcctgccaggccaggagggccaggcacctagtggctttgaggacctggagcgagggcggagggagatggtggaggaggacctggatgcagccctgcccctgcctgacgaggatgaggaggacctctctgagtataaatttgccaagttcgcggccacctacttccaggggacaaccacgcactcctacacccggcggccactcaaacagccactgctctaccatgacgacgagggtgaccagctggcagccctggcggtctggatcaccatcctccgcttcatgggggacctccctgagcccaagtaccacacagccatgagtgatggcagtgagaagatccctgtgatgaccaagatttatgagaccctgggcaagaagacgtacaagagggagctgcaggccctgcagggcgagggcgaggcccagctccccgagggccagaagaagagcagtgtgaggcacaagctggtgcatttgactctgaaaaagaagtccaagctcacagaggaggtgaccaagaggctgcatgacggggagtccacagtgcagggcaacagcatgctggaggaccggcccacctccaacctggagaagctgcacttcatcatcggcaatggcatcctgcggccagcactccgggacgagatctactgccagatcagcaagcagctgacccacaacccctccaagagcagctatgcccggggctggattctcgtgtctctctgcgtgggctgtttcgccccctccgagaagtttgtcaagtacctgcggaacttcatccacgggggcccgcccggctacgccccgtactgtgaggagcgcctgagaaggacctttgtcaatgggacacggacacagccgcccagctggctggagctgcaggccaccaagtccaagaagccaatcatgttgcccgtgacattcatggatgggaccaccaagaccctgctgacggactcggcaaccacggccaaggagctctgcaacgcgctggccgacaagatctctctcaaggaccggttcgggttctccctctacattgccctgtttgacaaggtgtcctccctgggcagcggcagtgaccacgtcatggacgccatctcccagtgcgagcagtacgccaaggagcagggcgcccaggagcgcaacgccccctggaggctcttcttccgcaaagaggtcttcacgccctggcacagcccctccgaggacaacgtggccaccaacctcatctaccagcaggtggtgcgaggagtcaagtttggggagtacaggtgtgagaaggaggacgacctggctgagctggcctcccagcagtactttgtagactatggctctgagatgatcctggagcgcctcctgaacctcgtgcccacctacatccccgaccgcgagatcacgcccctgaagacgctggagaagtgggcccagctggccatcgccgcccacaagaaggggatttatgcccagaggagaactgatgcccagaaggtcaaagaggatgtggtcagttatgcccgcttcaagtggcccttgctcttctccaggttttatgaagcctacaaattctcaggccccagtctccccaagaacgacgtcatcgtggccgtcaactggacgggtgtgtactttgtggatgagcaggagcaggtacttctggagctgtccttcccagagatcatggccgtgtccagcagcagggagtgccgtgtctggctctcactgggctgctctgatcttggctgtgctgcgcctcactcaggctgggcaggactgaccccggcggggccctgttctccgtgttggtcctgcaggggagcgaaaacgacggcccccagcttcacgctggccaccatcaagggggacgaatacaccttcacctccagcaatgctgaggacattcgtgacctggtggtcaccttcctagaggggctccggaagagatctaagtatgttgtggccctgcaggataaccccaaccccgcaggcgaggagtcaggcttcctcagctttgccaagggagacctcatcatcctggaccatgacacgggcgagcaggtcatgaactcgggctgggccaacggcatcaatgagaggaccaagcagcgtggggacttccccaccgacagtgtgtacgtcatgcccactgtcaccatgccaccgcgggagattgtggccctggtcaccatgactcccgatcagaggcaggacgttgtccggctcttgcagctgcgaacggcggagcccgaggtgcgtgccaagccctacacgctggaggagttttcctatgactacttcaggcccccacccaagcacacgctgagccgtgtcatggtgtccaaggcccgaggcaaggaccggctgtggagccacacgcgggaaccgctcaagcaggcgctgctcaagaagctcctgggcagtgaggagctctcgcaggaggcctgcctggccttcattgctgtgctcaagtacatgggcgactacccgtccaagaggacacgctccgtcaacgagctcaccgaccagatctttgagggtcccctgaaagccgagcccctgaaggacgaggcatatgtgcagatcctgaagcagctgaccgacaaccacatcaggtacagcgaggagcggggttgggagctgctctggctgtgcacgggccttttcccacccagcaacatcctcctgccccacgtgcagcgcttcctgcagtcccgaaagcactgcccactcgccatcgactgcctgcaacggctccagaaagccctgagaaacgggtcccggaagtaccctccgcacctggtggaggtggaggccatccagcacaagaccacccagattttccacaaagtctacttccctgatgacactgacgaggccttcgaagtggagtccagcaccaaggccaaggacttctgccagaacatcgccaccaggctgctcctcaagtcctcagagggattcagcctctttgtcaaaattgcagacaaggtcctcagcgttcctgagaatgacttcttctttgactttgttcgacacttgacagactggataaagaaagctcggcccatcaaggacggaattgtgccctcactcacctaccaggtgttcttcatgaagaagctgtggaccaccacggtgccagggaaggatcccatggccgattccatcttccactattaccaggagttgcccaagtatctccgaggctaccacaagtgcacgcgggaggaggtgctgcagctgggggcgctgatctacagggtcaagttcgaggaggacaagtcctacttccccagcatccccaagctgctgcgggagctggtgccccaggaccttatccggcaggtctcacctgatgactggaagcggtccatcgtcgcctacttcaacaagcacgcagggaagtccaaggaggaggccaagctggccttcctgaagctcatcttcaagtggcccacctttggctcagccttcttcgaggtgaagcaaactacggagccaaacttccctgagatcctcctaattgccatcaacaagtatggggtcagcctcatcgatcccaaaacgaaggatatcctcaccactcatcccttcaccaagatctccaactggagcagcggcaacacctacttccacatcaccattgggaacttggtgcgcgggagcaaactgctctgcgagacgtcactgggctacaagatggatgacctcctgacttcctacattagccagatgctcacagccatgagcaaacagcggggctccaggagcggcaagtgaacagtcacggggaggtgctggttccatgcctgctctcgaggcagcagtgggttcaggcccatcagctacccctgcagctggggaagacttatgccatcccggcagcgaggctgggctggccagccaccactgactataccaactgggcctctgatgttcttccagtgaggcatctctctgggatgcagaacttccctccatccacccctctggcacctgggttggtctaatcctagtttgctgtggccttcccggttgtgagagcctgtgatccttagatgtgtctcctgtttcagaccagccccaccatgcaacttcctttgactttctgtgtaccactgggatagaggaatcaagaggacaatctagctctccatactttgaacaaccaaatgtgcattgaatactctgaaaccgaagggactggatctgcaggtgggatgagggagacagaccacttttctatattgcagtgtgaatgctgggcccctgctcaagtctaccctgatcacctcagggcataaagcatgtttcattctctg

SEQ ID NO: 5786 - DNA, 6555 bp, Artificial Sequence
  derived and/or modified sequence
gccctgctgcagaagggcgaccacgtgtggatggacctgcggctgggacaggagttcgatgtcccgattggcgccgtggtcaaactgtgcgattccggacaagtgcaggttgttgatgacgaagacaacgagcattggataagtccacagaacgctacacatattaagcctatgcaccccacttccgtgcacggggtcgaagatatgattcggctcggcgatcttaacgaggccgggatactgagaaatctgctgatccggtacagagaccatttgatctacacttacactgggagtatcttagtagccgtgaacccgtatcagctactgtctatatattccccagaacatatcaggcagtataccaataaaaagataggggagatgcctccgcatatcttcgccatcgctgacaattgttacttcaacatgaaaagaaactcacgagaccagtgctgcattatttcgggcgaatccggggcaggtaagactgagtctactaagctcatattacagttcttagccgcgataagcggacagcactcgtggatcgaacaacaggtacttgaagccacaccaatattggaggccttcggcaatgccaagaccattaggaatgacaactcatcaaggtttggaaagtatatagacattcatttcaacaaacgcggagcaatcgaaggcgccaaaatcgagcagtacctgctggaaaagtcacgggtgtgtagacaagctctggatgaacggaactaccacgtcttctattgtatgctcgagggtatgtcagaagatcaaaaaaaaaaactggggctgggccaggcctcagattacaattacctggccatgggcaactgcataacttgcgagggacgcgtcgattcacaggagtatgcaaatatacgctcagcaatgaaggttctaatgtttaccgacaccgaaaactgggaaatcagcaagctcctggccgcaattctgcaccttgggaatcttcagtacgaggctcgcacgttcgaaaatttagatgcatgtgaggtgctgttctccccttctttggccaccgccgcctcattgttagaggtaaacccaccagatctaatgagctgtctgaccagtcggaccctaatcactagaggggagacggtaagcacaccattgagtcgcgaacaagctctcgatgtaagggatgcctttgtgaaggggatttatgggagactttttgtgtggatcgtggacaaaattaatgcggcgatctacaaacctccttctcaggacgtgaagaacagcaggcggtccataggccttctagatattttcggatttgaaaacttcgccgtcaacagcttcgagcagctgtgtatcaactttgctaacgaacacctgcagcagttctttgtgcgtcacgtctttaaactggagcaggaggagtacgacctagaatcaattgattggctacacatagaatttactgataatcaggacgccctggacatgatcgccaataagccaatgaatatcatctctctgatcgatgaagagtcgaaattccctaagggaactgacactacgatgttacataaattaaacagccaacataaactgaatgctaactacataccacctaagaacaaccacgagactcagttcggaatcaaccacttcgctgggatcgtgtattacgaaacccagggattcttggagaaaaatagggataccctccacggtgacatcatccagctggtgcactccagcaggaacaagttcatcaaacagatatttcaggctgatgtcgctatgggggccgaaacgaggaaacgctctcccactctgtcttcccagtttaagcgctccctcgaactgctgatgcgcaccctgggagcctgccagccatttttcgtccgctgtatcaaacccaatgaatttaagaaacctatgctgttcgatcggcacttgtgcgttcgccaattacgatatagcgggatgatggaaaccatccgcatccgcagggcgggctatcctatccgctattccttcgttgagttcgtcgaacgctatagagtattgctgcctggggtcaaacctgcatacaagcagggtgacctccggggcacctgtcagcgaatggcagaggccgtgctgggcacccacgacgactggcagattggaaagactaaaattttcttaaaggaccaccacgacatgctcctcgaagtagaacgcgataaggctatcaccgaccgagtgatcctcctgcaaaaggtgattagaggttttaaggatcgctctaattttttaaagctgaagaatgcggcaacactcattcagcggcattggcggggccacaactgcaggaaaaattatggtctgatgaggttaggattcctccggttacaggcgctgcatcggtcgcgtaaactacaccagcagtacagattggctagacagcggattatccagttccaggcccgctgtcgcgcatacctggtgcgaaaggccttcagacatcgtctttgggctgttctgactgtccaggcttatgccaggggaatgattgcacgtaggctgcatcagagactaagggcagaatacctctggcggctcgaggctgagaagatgcggctggccgaagaagagaaactccgcaaagagatgtccgccaaaaaggccaaagaggaggcggaaaggaagcatcaggagcgccttgcccagcttgcccgcgaggatgctgagagagagctcaaagagaaagaggccgcgaggagaaagaaggaactgctggaacagatggagcgcgcgcgtcatgaacccgtgaatcattctgacatggtcgataaaatgtttggctttctcgggacatctggcggtttgcctgggcaggagggccaggcgccaagcggattcgaggatctcgaaaggggacggagggagatggtggaggaggatcttgatgctgcactccccctgcctgatgaagacgaggaggatctgagcgagtacaagtttgccaagttcgccgctacttattttcagggcacaaccacccacagttacacacgtagaccgttaaagcaaccactactgtatcacgacgacgaaggtgaccagttagccgccttagccgtctggattaccatcctgaggttcatgggagatctgcccgagcctaagtatcacactgccatgtctgacggaagcgagaagatccccgtgatgaccaaaatctatgagactctgggcaagaagacgtacaaacgcgagctccaggccctgcagggagaaggtgaggtgaccaagcgcctccacgatggggaatctactgtgcaaggcaattccatgctagaagatcggcccaccagcaacctagagaagttgcacttcatcattgggaatggaatcctgcggcccgcacttagagatgaaatctactgccaaatctccaaacagctaacgcacaacccctctaaatcatcttatgctcgcggatggatcctggttagcctatgcgtgggatgctttgccccctcagagaaatttgtcaagtacctgcggaactttatacatggcggtccccccggatacgcaccttactgtgaagaacgactgcgaagaaccttcgtgaacggcactagaacacagcccccttcctggctggaactccaagctactaagtccaaaaagcctattatgctcccggtgacttttatggatgggacgactaagacactccttaccgacagcgccaccacagcaaaagagctgtgcaatgctctggcagacaaaatcagcttgaaggaccggttcggattttcattatatatcgccctctttgacaaagtgtcctcattaggctcagggtcagaccacgttatggatgccattagccagtgtgaacagtatgccaaggaacaaggcgcacaggagagaaacgccccgtggcgactgtttttcaggaaggaagtgttcacgccctggcactccccatccgaggataatgtggccacaaatctgatctaccaacaggtggtgcggggcgttaaatttggagagtaccgctgtgagaaggaggatgacctggctgagctggcatcacaacagtactttgtcgattatgggagtgagatgatcctcgagcggctgctgaatctcgtcccaacctatatccccgatcgcgagattactcccctgaaaactctggaaaagtgggcccagctcgccattgccgcccacaaaaagggcatctacgctcaacggcggaccgacgcccagaaggtgaaggaggacgtggttagctatgctcgctttaagtggcccctgctcttcagcagattttacgaggcctataagttctccggaccctctctccccaaaaatgatgttatcgtggccgttaactggaccggggtgtattttgtcgacgagcaggaacaggtcctcttagaactatctttcccagagattatggctgtgagctcatcccgggaatgtcgggtgtggctgagtttagggtgtagtgacctgggctgtgctgcgccccatagtggctgggccggtttgaccccagcaggcccgtgttccccatgctggtcctgccgtggggccaagactactgcaccatcttttacactagctactataaaaggagatgaatacaccttcacgagctcaaacgccgaggacatcagagacctggtcgtcacgtttctcgagggtctgaggaaacgatctaaatatgtggtcgctttacaggataaccctaatccggcaggggaggagtcaggtttcctgtcctttgcaaagggcgacctcattattctggaccacgacacaggcgagcaggtaatgaacagcggatgggccaacggcataaatgagcgaacaaaacaacggggggattttccaaccgactcagtgtatgtgatgcctactgtgaccatgccaccacgcgaaattgtggctctggtgactatgacgcctgaccagcggcaggacgtggtgcgcctactgcagcttcgaaccgccgaacctgaggtaagagccaagccctacaccctagaggaattttcctacgattattttcgccccccccccaaacacaccctttcaagagtgatggtcagcaaggctagagggaaggaccgcctgtggtcgcatacaagagaaccactcaagcaggccctgcttaaaaagttactcgggagtgaagagctgtcgcaagaggcctgtctggcctttatagcagtacttaagtatatgggggattacccttctaaacgcaccagatctgtgaacgagttgaccgaccagatttttgagggacccctaaaggccgagccgctcaaggacgaagcctatgttcagatccttaagcaactgactgacaaccatattcgatattcggaggaaagggggtgggagctattatggctctgcactggtctgttcccaccctccaatatcctgttacctcacgtacagcgatttctgcagagtagaaagcactgccctcttgccattgactgtctccagcggctgcagaaggcgttgaggaacggttcacgcaagtatccacctcacttggttgaggttgaggccattcagcataagacgacacagattttccataaagtgtatttccctgatgacaccgacgaggcctttgaggtggagagcagtacaaaggctaaggatttttgccaaaacattgctactcgactcctccttaagtcctcagagggattctctcttttcgtgaagatcgccgacaaggttctaagcgtgcctgagaacgatttttttttcgactttgtccgccatctcaccgactggataaaaaaagcacgtcctattaaggatggcatcgtgccctcactgacttatcaggtgttttttatgaagaagctgtggacaaccaccgtgcctgggaaggacccgatggcggattctatatttcattactaccaggagctgccgaagtacctgagaggataccacaagtgcactcgagaggaggttcttcagcttggggctctcatctacagggtgaaatttgaagaggacaaaagctactttccttctattcccaagctcctcagagagttggtgcctcaggacttgattcgccaggtaagccctgatgactggaaaagatctatcgtggcgtactttaacaagcacgcgggtaaatcaaaagaagaggctaagctcgcctttctaaaattgattttcaaatggcctacatttggatcggccttcttcgaagtcaaacagactaccgagccgaattttccagagatcctgcttatcgcgataaataagtatggggtgagtctgatcgatcccaaaactaaggatatactgactacacaccccttcactaagataagtaactggtcctcagggaatacgtattttcatatcacaatcggtaaccttgtgaggggctctaagctcttgtgcgagactagtctgggctacaagatggatgaccttttgacctcgtatatatcgcagatgctgacagccatgtccaaacagagagggtcacggtccggtaagtag

SEQ ID NO: 5787 - DNA, 6645 bp, Artificial Sequence
  derived and/or modified sequence
gccctgctgcagaagggcgaccacgtgtggatggacctgcggctggggcaggaattcgatgtccctataggcgccgtcgtcaaattgtgtgattctggtcaggtccaagtggtggacgatgaggataacgagcactggataagcccccagaatgcgactcacattaagccaatgcatcccacatcagttcacggcgtggaggacatgatcagattgggtgatttgaacgaggccggcatcctacgaaacttactaatccgctaccgcgaccacctgatttacacctacactggctctatcttggtggctgtgaatccttaccagctgctgagtatttattcaccagaacatatccgccagtacaccaacaagaagattggagaaatgccgcctcacatctttgcaatcgccgacaattgctattttaatatgaagcgcaactctagagatcagtgttgtattattagcggggaaagtggcgccggcaagacagaatcaacaaagctgattcttcaatttcttgcggccattagcggacaacatagttggatcgaacaacaggtgctggaagccactccaattcttgaggccttcgggaatgccaagacgattaggaacgataactcaagtcgatttgggaaatacatagatatacatttcaacaagcggggggcgatcgagggtgccaaaatcgaacagtatctgttggaaaaaagcagagtgtgtcgccaggcactggacgagcgaaattaccacgttttctattgtatgctggagggtatgtccgaggatcaaaagaaaaagcttggtctagggcaagcctcagattacaactatctggcaatgggcaactgcatcacttgtgaagggcgtgtggactcccaagagtacgctaacatccgctccgctatgaaggtcctcatgtttaccgacacagaaaattgggaaatcagcaagctgctcgccgcaatattgcacctgggaaatctgcaatacgaggctcggacatttgagaacttagacgcatgcgaggtcctcttctctccatctctggctactgcggcctctctactggaagtgaatccaccagatcttatgagctgcctgacctcacgaacgttgatcacgagaggcgagacggtatcaactcccctgagtagagaacaggccctggacgttcgcgacgcctttgtaaaaggtatttatgggcgcttgttcgtctggatcgtagataagattaacgctgctatctacaaaccccccagtcaggatgttaagaatagcaggcggtcaattgggttgttagacatatttggttttgagaactttgccgtgaacagctttgagcaactctgcatcaacttcgcaaatgagcatttgcagcagttcttcgttagacacgtgtttaagttggagcaggaagaatacgacttggagtccatcgattggctgcatattgaattcactgacaaccaagatgcccttgatatgatcgccaataagcctatgaatatcatttcactgattgacgaggaaagtaagttcccgaaaggaactgataccactatgctgcacaaattgaacagtcagcacaaactcaatgccaattatatcccaccaaagaataatcatgagacccagttcggcattaaccactttgcgggtatcgtttattacgagacccagggcttcctggaaaaaaatagggatactttgcacggagacattatccaactggtacattcgtcaagaaataagttcatcaagcagatttttcaagccgacgtggctatgggcgccgaaacgcggaaacgcagccccaccctaagctcccaatttaagcgttctctcgagctacttatgagaacactgggagcctgccaacctttctttgtaaggtgtattaaaccaaacgaattcaaaaaaccaatgcttttcgaccgccacctttgcgttcgtcagttaagatatagtgggatgatggagactatccggattaggagggccggataccccatcaggtacagtttcgttgagttcgtcgagaggtaccgtgtgctcctcccgggcgtgaagcccgcgtacaagcaaggggatcttcggggcacctgccagaggatggccgaagccgtccttgggacccatgacgactggcagattggcaagaccaagatctttctcaaggatcatcacgacatgctcctggaagttgaacgagacaaggcgatcacagaccgagtgattctgctacaaaaggtaattagagggttcaaggaccgcagcaatttcctcaaactgaagaatgctgctacacttatccagcgccactggagaggccataattgtcgaaaaaactacggcctgatgaggctgggattcctgcgactccaagctctccaccgttcccggaagttgcatcagcagtataggctggcccggcaaaggattatccagttccaagcaaggtgcagggcatatctagttagaaaggctttccgccaccgtctgtgggctgtgctaaccgtacaggcatacgctagaggaatgatcgcacggcggttgcatcaacgacttagggctgaatacctgtggagactagaagctgagaagatgaggttggctgaggaagaaaaactgagaaaggagatgtcagccaagaaagcaaaagaggaagcggaaagaaaacaccaagaacgactggctcagctcgcaagagaggatgctgagagagagctgaaggagaaagaagccgcccgaaggaaaaaggagttgctggagcagatggagagggccagacacgaacctgtgaatcattctgacatggtggacaaaatgtttggattcctggggactagtggcggtctgcccggccaggagggccaagctccatccggtttcgaagacctcgaacgaggaagacgcgaaatggtggaagaagacctggatgccgccctgcctctacctgatgaggacgaagaggacctgagcgaatacaaatttgccaaattcgctgctacttacttccagggcacaaccacccactcttatacgagaagaccattgaagcagccccttttataccacgacgatgagggagaccagttagctgccctcgccgtttggatcaccattctgcgcttcatgggggatctccccgagcctaaataccatactgcgatgtcggatggaagtgagaagatccccgtgatgacgaagatttacgaaaccctcggtaagaagacctataagagagaattgcaggcattgcagggcgagggggaggcacagctgccggagggccaaaagaagagctctgtgcgccacaagctggtgcacctgactttaaaaaaaaaatctaagttaactgaagaggtgaccaagaggctgcacgacggagagtcaacggtgcaagggaatagcatgctcgaggacaggcctacctcaaatctggaaaagctgcacttcattattggcaacggaattcttcgcccagcactgcgtgatgaaatctactgccagatcagcaaacagctgacccataaccccagcaagagctcatatgcacgcggctggatcctcgtgtcattgtgcgtcggttgtttcgccccatccgagaagttcgtgaagtatctgagaaattttatccacggtgggcctcctggttacgccccgtattgtgaagagagactgcggcggacgtttgtgaatggaacgaggacccagccaccttcatggctcgagcttcaggccacaaagagcaagaagccgatcatgctacctgtcacattcatggatggaaccacaaagacactactcacggatagtgccaccaccgcaaaagaactctgtaacgcgctcgcagataagatcagcttaaaggatcggtttggcttttctttatacatagccctgttcgataaagtgtcaagcctaggcagcgggtcagatcacgtgatggacgcgatttcgcagtgcgagcagtacgcaaaggaacagggagctcaagaaagaaacgccccatggcgtctgttttttcgcaaggaggttttcaccccttggcactcaccatccgaggataatgttgccacaaacctgatataccagcaggttgtcagaggcgtgaaattcggagagtatcgctgtgagaaggaagacgatctcgccgagctagcttcccagcagtacttcgtggactacggttcagagatgattctggaacgtcttcttaatttagtccctacctacatccctgatcgagagatcactccacttaagacattggagaaatgggctcagctcgcgatcgctgcacataagaaggggatatacgcccaaagacgcaccgatgcacagaaggtcaaagaagacgttgtgtcttatgctcgcttcaaatggccactgctattttccaggttctacgaggcatataaattttccgggccgagtctgcccaagaacgatgtaattgtggctgtgaactggacgggtgtttattttgttgatgaacaggagcaggtgctgcttgagctgtcttttcccgagatcatggccgtcagcagcagccgcgaatgcagggtttggctctccctgggctgcagcgacctgggctgcgcagccccacacagtggctgggcaggtctgacccctgctggtccatgtagtccgtgctggtcatgtcggggggcaaagacaaccgcaccctctttcacactcgccactattaaaggtgatgagtataccttcacctccagcaacgctgaggacataagagaccttgtagtgacctttcttgagggtctccggaagcggagcaaatacgtggtggccctgcaggacaatcccaacccagccggagaggaatctggcttcttgtccttcgccaaaggcgacctaataatccttgatcatgacacaggcgagcaggttatgaacagtgggtgggctaacggaatcaatgaaaggaccaagcagcggggagactttcctaccgactcggtgtatgttatgccaactgtgacgatgcccccacgtgagatcgttgccctcgttaccatgactccagaccaacggcaagacgtagtgcgtttgctgcagctgagaacagcagagcccgaggttagagctaaaccatataccttggaggagttctcttatgattactttcgtcccccccctaagcacaccctgtcccgagtgatggtcagcaaggcaagaggcaaggacaggctttggtcccacacccgcgaaccgctgaaacaggccctgctgaagaaactcttagggtcggaagaactctctcaggaggcctgtctggcttttattgctgtgctaaagtacatgggcgactatccctcaaagcgcacaaggagtgtgaacgagttgaccgaccagatcttcgaagggcccctgaaagccgagccgttgaaagatgaagcctacgtccagattttaaaacagctgacagataaccatattcgctactcggaagagcgaggctgggaactgctttggctgtgcaccggcctgtttcctcccagtaatattctgctgccacacgtgcagcggtttcttcagtctcgaaagcattgcccgctagctatcgactgtctgcagcgtctgcagaaagcattacgaaatgggtcccggaagtatcccccacacctcgtcgaggtggaggccatacagcataaaactacccagatctttcataaggtttacttcccagacgataccgatgaggctttcgaggtcgaaagctcaaccaaggccaaagacttttgtcagaatatcgcaacgcgcttgctgctaaagtcctctgagggctttagcctctttgtgaaaattgccgacaaggttctttccgtgccggagaacgatttttttttcgattttgttcgccacctcactgactggatcaagaaggctcgccccattaaggatggcatcgtcccgtccctgacatatcaggttttcttcatgaagaagctgtggacaactactgtccccgggaaggatcctatggctgatagcattttccactattatcaggagcttcccaagtacctaagaggctatcacaaatgtacccgcgaggaagtcttacagcttggcgccttaatctacagggtgaaatttgaagaagataaaagttacttcccctcaatccccaagctgttgagggagctggtcccccaggacctgattcggcaagtctctcctgacgactggaagaggtccattgtcgcgtacttcaataaacacgccggaaaatccaaggaagaggcgaaacttgccttcctaaagctcatattcaagtggcccacttttggcagcgctttctttgaggtgaagcaaaccaccgagcctaacttccccgaaattctgttaatcgccattaacaagtatggcgtctcgctgatcgaccctaaaacaaaggacatccttacgacacacccctttaccaagatatccaactggtccagtggcaatacttacttccatatcactatcggaaatctggtcagaggtagcaaactgctgtgcgaaaccagtctcgggtacaagatggatgatctgctgaccagctacatttctcagatgttgaccgcaatgtccaaacagcgtggttcaagaagcggaaagtag

SEQ ID NO: 5788 - DNA, 6648 bp, Artificial Sequence
  derived and/or modified sequence
atggtgatcctgcagcagggcgaccacgtgtggatggacctgcggctcggacaggaattcgacgttcccataggcgccgtcgtaaagctgtgtgatagcggacaggtacaggtggtagacgacgaggataacgagcactggatatccccacaaaatgcaactcatatcaaaccaatgcatcccacatccgttcatggggttgaggacatgatacgtctcggcgatctgaacgaggccgggatcctgaggaatttactgataagatatagagaccatctgatttatacctatactgggagtatcctggtggcagtgaatccttaccagctgctgtctatttattcgcccgagcatatacggcagtacacaaataaaaaaatcggggagatgcctccacatatcttcgctatcgctgacaattgttatttcaatatgaagcggaactcaagggatcagtgctgcatcatcagtggcgagtcaggagcgggaaagaccgaatcaacgaagctcatcttgcagtttctagccgctatcagcgggcagcacagttggatcgagcagcaggtcctagaagccaccccaatccttgaggcttttggcaacgcaaaaaccatcaggaacgacaactcttctagattcggcaaatatattgacattcacttcaataagaggggcgcgattgagggtgcgaagattgagcagtacctgctggagaaatcccgtgtgtgcaggcaggccctggacgaaaggaactatcatgtgttctactgcatgttggagggcatgtctgaggaccagaagaaaaaactcggactcggccaggccagcgattacaactacttagccatggggaattgtatcacttgtgaaggaagagtggactcacaggaatacgccaacattagatctgctatgaaggtcttgatgttcactgatacagagaattgggagatctcaaaactgctcgctgcgattttgcatctaggaaacctacagtatgaggccaggacattcgaaaatctggacgcgtgtgaggttctattctcaccatcactggccacggctgcttccttgctggaggttaacccacccgaccttatgtcctgtcttacatcaagaacgcttatcaccaggggcgagacggttagcacacctctgagtagggagcaggccctggatgttagagacgcttttgttaaagggatttacggccggctatttgtttggatagtggacaagatcaacgccgctatctacaagcctccgagtcaggacgtgaaaaatagcagacgatccatcggactgttggatatctttgggttcgagaacttcgctgtgaacagttttgaacaattgtgtatcaactttgctaatgagcatctccaacagttttttgtgcgccacgtgttcaagctggaacaggaggaatatgatctggagtcgattgattggctgcatatagaattcaccgataaccaagacgccctcgatatgatcgccaacaaaccgatgaacatcatctctctcattgatgaagagtctaagtttcccaaaggtaccgacactacgatgctacataaacttaacagtcaacataagttgaacgcgaattatattcctcccaagaataatcacgagactcagttcggaatcaaccactttgccggtattgtttactacgagacacagggtttcctggagaagaatagagacacacttcacggagacattatccagctggtacatagttcgagaaacaagttcatcaagcaaatttttcaggcagatgtggccatgggcgcagagacccgcaaaagatctcccacgctgagcagccagtttaaacgatctttagaacttctgatgagaacactgggagcttgccagccctttttcgtcaggtgcatcaaacccaacgagttcaagaaaccaatgctctttgaccgccacctctgtgtgcgccagctgcggtattctggtatgatggagacaatccgtatcaggagagcaggctatccaatcagatactcctttgtggagtttgtcgagcggtaccgggtgctcctacccggggtgaaacctgcttacaaacaaggtgatcttcgggggacatgccagagaatggcagaagcagtgctgggcacccacgacgattggcagattgggaaaaccaagatcttcctgaaggaccaccatgacatgctgctggaagtcgaacgggacaaggctatcaccgatagagtcattctgctacaaaaagttatccgaggcttcaaagaccgatccaacttcctcaagctgaagaatgctgccacgctcattcaacgccactggcggggacataattgtcgcaagaactatggtctgatgcgcctcggctttttacgactccaggccctgcacaggagtcggaagctccatcaacagtacagactcgccaggcagcggatcatacaatttcaggccagatgcagagcatacctcgtgcgaaaagcgttccgacatcgtctatgggccgtgcttacagtgcaggcttatgcccgcggtatgatcgcacgtagactccaccagcggctgcgagctgagtacctgtggaggttagaagcagaaaaaatgcgactagcggaggaagaaaagctacgaaaagagatgtccgcaaagaaggctaaggaggaggccgagcgcaagcaccaggaaaggctggcccagctggcacgggaggatgccgaacgcgagctgaaagagaaggaggcagccagacggaagaaggaactgctcgagcagatggagcgggcccgtcacgagccagtgaatcattctgatatggtggataaaatgttcggctttctgggcacaagtggcggtctgccaggacaggaaggacaggctccatctggtttcgaggacctggagagagggaggagggaaatggtggaggaagaccttgacgcagcattacctttgccagacgaggacgaagaagacctctccgaatataagtttgccaaatttgccgctacttactttcagggaacaactacacattcatacactcggcgtcccctgaaacaacccctgctgtaccacgacgatgaaggggaccaactcgctgcactagcagtgtggattacaatccttcgcttcatgggagacttacccgaacccaaataccacacagccatgtctgatgggtcagagaagattcccgtgatgaccaagatttatgagaccctcggtaaaaagacctacaaacgagaactgcaggcacttcagggcgaaggggaggcacagctgccagaagggcaaaagaagtcctcggtcaggcacaagctcgtccacctcacacttaagaaaaaatcaaagctaacagaggaggtaacaaagcgactgcacgatggtgagagcaccgtgcaaggcaactccatgctcgaagaccgccctacttccaacttagagaagctccactttatcatcggcaatggcatccttcggccggcactgcgggatgaaatctactgccagatcagtaagcagctcactcataatccctccaaatcatcctacgccagaggctggatcctcgtctccctgtgcgttggatgtttcgctccaagcgagaagttcgtcaagtatctgcgcaactttatccacggcgggccgccaggatatgcaccttattgcgaggagagacttcggcgaaccttcgtaaatggcaccagaacccagcctcccagctggttggaactgcaagcgaccaagtccaaaaagcctattatgctccccgtgacgttcatggacggcacaacaaagactttgctgaccgattccgcaactaccgccaaggaactctgcaacgcactggccgataaaatctctcttaaggataggtttggtttctcgctgtacatcgccctctttgacaaggtgagctctctaggctcagggtccgatcacgtgatggacgcaattagtcagtgtgagcaatatgccaaagaacagggtgcccaggagcgcaacgccccatggcggttgttctttagaaaggaagtatttaccccctggcattctccctctgaagacaatgtggcgaccaacctaatataccaacaggtcgtgaggggcgtgaagttcggagagtatcgttgcgaaaaggaggacgatctggcagagctggccagccagcaatacttcgttgattatggaagcgagatgattctggagagactactgaatcttgtgccaacctatattcccgatcgggaaattacccccttgaagactctggagaagtgggcccaactggctattgcggcccacaaaaaaggaatctacgcacagaggcggactgacgctcagaaggtgaaagaagacgtggtgtcttatgcccggttcaaatggccactgctgttctcccgtttctacgaagcatataaattttccggccctagcttacctaagaacgatgttatcgtagctgtgaactggactggcgtctatttcgtggatgaacaggagcaggtactcctagaattgagctttcccgagataatggccgtatcctccagccgagaatgccgggtgtggcttagcctcggctgttctgatctgggctgtgccgctcctcatagtggttgggcggggctaacaccagcaggtccctgcagtccctgctggagttgtagaggggccaagacaactgctccctcattcacgctggccacaattaaaggagatgagtacaccttcacctccagcaatgccgaagacatcagagatctggtcgtgacctttctggagggattacggaagaggtccaaatatgtggtagccttacaggacaacccaaatcctgctggggaagagtccggatttttatccttcgcgaagggcgatttgatcattctcgatcatgatactggtgaacaggtcatgaactctggctgggctaatgggattaacgaacggaccaagcagcgaggggactttccaaccgatagcgtctacgtgatgccgactgtgacaatgccccctcgggagatcgtggctctggtgaccatgacacctgatcaacgccaggatgtggtcaggttgctgcaactgcgaaccgcggagccagaggtgagggccaaaccttacacgttggaggagttctcatacgattattttcgacctccgccaaagcacactctgagccgcgtgatggtctctaaggcccggggtaaagaccgtctttggagccacacgcgagaaccactgaaacaagcactcctcaaaaagcttttggggtcagaagaactgtcacaggaagcatgcttagcctttatagccgtgctgaagtacatgggagactatccttcaaaaagaactagatccgtgaatgaactgaccgatcaaatttttgagggccccctcaaggccgagccgcttaaagacgaagcctacgtgcagattctcaagcagcttacagataatcacattagatattcagaagaacggggttgggagctcctatggctgtgcactggtctcttcccaccttccaacatcctgttgccccacgttcaaaggttcttacaaagcagaaagcattgcccccttgccatcgattgcctgcagagactgcaaaaagccctacgcaatggatcccgaaagtaccctcctcacctggtagaagtggaggcaatccaacataaaactacacagatattccacaaggtctacttccctgatgacacagacgaggccttcgaggtggaaagttccacaaaggctaaggatttctgtcagaatatcgccaccaggctccttcttaagagttcggaaggattctccctttttgtgaaaattgctgataaagtactttccgtgcccgagaacgattttttcttcgattttgtgaggcatctaaccgactggattaagaaggcgcggccaatcaaggatggtatcgttccaagcctgacctaccaggtctttttcatgaaaaagctatggaccacaaccgtccccgggaaggatccaatggcagatagtattttccactattaccaggaactgcccaaatacctgagaggataccacaaatgtacccgggaggaagtactgcaactgggtgccctgatttaccgcgttaaattcgaggaggataagtcctactttccatctatccccaagctactgagagagctggtaccacaagacctgattagacaagtgtctcccgatgactggaaacgcagtatagttgcatacttcaacaagcacgctggcaagtccaaggaggaggctaaactggcctttttgaaactcatctttaaatggcccaccttcgggagcgccttctttgaagtaaaacagacaacagagccgaattttcccgagattctgctgattgccataaacaaatacggagtgagcctcatagatcccaaaactaaagacatcctgacaacccaccccttcaccaagatctccaattggagctccgggaacacatatttccacattaccattgggaatttggtacgaggcagtaaactactgtgtgagacgtcccttggttacaagatggatgatctgctgaccagttatatctcgcagatgttgactgccatgtcaaagcagcggggcagcaggagcgggaagtag

SEQ ID NO: 5789 - DNA, 6554 bp, Artificial Sequence
  derived and/or modified sequence
gctctgctgcagaagggggaccacgtgtggatggacttgaggctgggtcaagagtttgacgtgcctattggcgctgttgtcaaactctgcgatagcggacaggttcaagtggtggatgatgaggacaatgagcactggattagcccccagaacgccacgcacataaagcccatgcatccaacatctgtgcacggagttgaagatatgatccgcctgggagatctaaacgaggccggaatcctcaggaatctgctgatcaggtaccgagaccatctcatctacacatatactggaagcattttggtggctgtaaacccttatcaattgctttccatttacagccccgagcacatccgccagtacaccaataagaagattggggaaatgccgcctcatattttcgctattgcagataactgctacttcaacatgaagagaaacagtagggaccagtgttgcatcatcagtggcgaatcaggcgctggcaagacagaaagcaccaaactgattctgcagttcctcgcagcaatttctggtcaacactcttggatcgaacagcaggtgctggaagcaacaccaatccttgaagctttcggcaacgcaaagacaattagaaatgataattcgtctcgcttcggtaagtatatagatatccatttcaacaaaagaggcgctattgaaggggcaaaaattgagcagtatctgctcgagaaaagcagggtttgccggcaagccttagacgaacgtaattatcatgtgttctactgcatgttagagggcatgagcgaagaccagaagaagaagctgggactggggcaggcatccgactacaattaccttgcaatgggcaattgtattacgtgtgaaggccgtgtggacagccaagagtacgccaatattaggtcagcgatgaaagtcctgatgttcacagatactgaaaattgggaaataagcaagcttcttgcggcaattctgcatctaggcaatctccagtacgaagcccgaactttcgaaaatctggacgcctgtgaggttctgttttctcccagtctggccaccgccgcttccctcctagaggtgaacccccctgacctcatgagctgtctgacgtcaagaaccctgattactaggggcgaaactgttagcaccccgctgtcaagagagcaggccctggatgtgcgtgacgcatttgtcaaagggatatatggtaggcttttcgtttggatcgtcgataaaatcaatgccgcaatttacaagccccctagccaggatgtgaaaaatagccggaggtcaattggccttctggacatttttggatttgaaaatttcgcagtcaactcgttcgagcagctgtgcattaatttcgccaacgagcacctgcagcaattttttgtgcgccatgtgttcaagctcgaacaggaggagtacgatctcgaaagcatagactggctccatatcgaattcaccgacaatcaggacgctttggacatgatcgcgaacaaaccaatgaacatcatcagccttattgatgaagaatccaagtttccaaagggaactgacaccaccatgctccataagctgaattcacagcacaagctgaacgcaaactacattccacccaagaacaatcacgagacgcagttcggcattaatcactttgcagggatcgtgtattatgagacccagggctttctggagaaaaaccgagacaccctccacggcgatattattcagttagtgcacagcagcagaaacaagttcataaagcagattttccaagccgatgtggctatgggtgctgagactaggaagcgtagcccaactttatccagtcaatttaaaagatcgttagaattacttatgcgcaccctgggtgcctgtcagcccttctttgtgcgctgcatcaagcccaacgaattcaaaaagcctatgttatttgatcgacatctttgcgtgcgccagttacggtacagtggcatgatggaaaccataaggatcaggagagccggttatccaatccgatattcatttgtggaatttgtggagcggtacagagtactcctgcctggggtcaagcccgcatacaaacagggcgacctgcgtggcacctgccagcgaatggcagaggcagtgctcggcacccacgatgactggcagatcggtaaaactaagatatttctgaaagaccaccacgacatgctgctcgaagttgaacgggataaggcgattacagaccgagtgattctactccaaaaagttataaggggtttcaaggacaggtccaacttcttaaaactgaaaaatgccgcaactctcatccaaagacactggcggggtcacaactgcaggaagaattatggattgatgcgcttagggttcttgaggttgcaggcgctacataggagcagaaaactgcaccagcagtaccgtctggccaggcagaggatcattcaattccaagcaaggtgcagggcatatctagttagaaaagccttccgacatcgcctatgggctgtattgacagtgcaggcttatgctcgcggaatgatcgccagacgtctgcaccaaagactgcgagctgagtatctctggcggctggaggcagagaagatgcggctggccgaagaagaaaaactgcggaaggagatgagcgccaagaaggcaaaagaggaagccgagaggaagcaccaggaacgtctggcccagttagccagggaggacgctgaaagagagcttaaggagaaggaagcggctaggagaaaaaaggaactcctggaacagatggagcgcgcaaggcatgagcccgtcaaccattctgatatggtggataaaatgtttggatttctggggaccagtggaggcctgcccggtcaggagggccaggctccttcaggatttgaggatctggagagaggacgacgagagatggttgaagaggacctggacgcggcactgcccctccctgacgaagatgaagaagatctttccgaatacaaatttgcgaagtttgctgctacatactttcagggaaccaccacccattcttatacgcgtagaccgttgaaacaaccactgctttaccacgatgatgagggcgaccagctcgctgcattggccgtgtggataactattctacgattcatgggagacctgcctgagcccaagtaccatacggccatgtctgacggcagcgagaagatacctgtgatgaccaaaatatatgagaccctgggaaaaaaaacatacaaaagagagcttcaagccctccaaggcgaaggagaggttactaaacgtctgcacgacggtgaaagcactgttcaaggtaactctatgttagaggatcgcccaacctccaacttggagaaactgcacttcataatcggcaacggcattcttcgccctgcccttagagacgagatttactgtcaaatttctaagcagctgacgcacaaccccagtaagtcatcatacgccaggggctggatattggtgagcctgtgtgtagggtgcttcgcgcctagtgaaaagtttgttaaatacctgcgcaatttcatacacggcggacctcctgggtacgccccttattgcgaagagcgactgcgccgaacgttcgtgaacgggaccaggacccagccgccaagctggctcgaactccaggccacaaagtctaaaaagccaattatgctgccagtgacctttatggatgggaccactaaaaccctgctgactgattccgcaaccacagctaaagagctgtgcaatgccctggcagataagatctcattgaaagatagatttggattttccctctatatcgctctttttgacaaagtgtcttccttgggctctgggagcgaccacgttatggatgccatcagtcaatgcgagcagtatgccaaagaacagggtgctcaagagcgtaatgccccatggcgtctgttctttcgcaaagaggtgtttaccccatggcacagcccgtctgaggacaatgttgccaccaatcttatttaccagcaggtggtgaggggtgtcaagtttggcgagtacagatgtgagaaggaggacgacctcgccgaattagcaagtcagcagtacttcgttgattatggctctgagatgatactggaaaggctgctgaacctggttcctacttacattcctgatcgggagattacccctttgaagaccttggagaagtgggcacagctcgccattgccgctcacaagaagggcatatacgcgcagagacgcactgacgcacagaaagtgaaagaagatgttgtttcctatgcgagatttaagtggcctttgctatttagtcggttctacgaagcctacaaattctcaggccctagcctcccaaagaatgatgtcatagtggccgttaattggaccggggtgtacttcgtagacgagcaagagcaggtgttgttggagttgtccttccccgagattatggccgtgagcagttcccgagagtgtcgtgtgtggctgagccttggttgcagcgatcttggctgcgccgcacctcactccggctgggccggacttaccccggcagggccttgttcaccatgctggagctgtaggggtgctaagaccacagccccttctttcactttggccaccataaaaggcgatgaatacactttcacctccagtaatgccgaagacataagggatctggtggttacttttctcgaagggttgagaaagaggagtaagtatgtggttgccctgcaagacaaccctaaccccgctggtgaagagagtggctttctgtcttttgctaagggtgatctcattatcttggaccacgacacaggtgagcaggtaatgaactccggatgggcaaacggaattaatgagcgtaccaaacagagaggagacttccccaccgactccgtctacgtgatgccaacggtgactatgccaccgagagagatcgtcgctctggtaactatgacgccggaccagagacaggatgtggtgcgcctgctccagttgagaaccgcagaacccgaagtgagagctaaaccttataccctggaagagttttcttacgactactttcgccctccgccaaaacacacactgtcccgggtgatggtcagtaaggcgaggggaaaggatcgactgtggtcacatacccgagagcccctgaagcaagctctattaaagaaactgcttggctctgaagagcttagtcaggaagcctgtttagcattcatcgcagtgctgaaatatatgggcgactacccatccaagcgcactcgatcggtgaatgaactcaccgaccagatatttgagggacctttgaaggccgaacctctgaaagatgaagcatatgtgcagatcctgaaacagctgaccgacaatcacattcgatactcggaagagagggggtgggagcttctgtggttgtgtacgggtctcttcccaccctcgaacatacttttgccccatgtacaacggttcctgcagagccgaaaacattgtccactcgcgattgactgtctgcaaagattacagaaggcgttgcgtaatggatcaagaaaatacccccctcatctggtggaggtggaggctatccagcataaaactacacagatttttcacaaagtgtattttcccgatgatacagatgaagctttcgaggtggagtcctcaacaaaagctaaagacttctgccagaacatagccactcgacttctgttaaagtcctcagaaggcttcagtctttttgtcaaaatcgcggataaggtcctgagcgtcccagagaatgacttctttttcgacttcgtgcggcatctgaccgattggatcaagaaagccagacccattaaggacggaatcgtgccctcactcacctatcaggtcttcttcatgaaaaaactgtggaccactaccgttcctggcaaagaccctatggcggactctatttttcactactatcaggaattaccaaagtatcttcgaggttatcataagtgcactcgggaggaagtgctacaattaggggcattgatataccgggtcaaatttgaagaggacaagagctattttccatctatcccaaagttactgcgtgagctggttccccaggacctgatccgccaggtgtctcccgacgactggaaacgaagtatagtggcctacttcaataaacatgcgggaaagagtaaggaggaggcaaaacttgcctttctgaaattgattttcaagtggcccactttcgggtccgctttctttgaggtgaagcagaccactgaacctaatttcccagaaattctgctcatcgcaatcaataagtatggagtgagcctcattgatcctaaaacaaaagatattctgactacccatcctttcacaaagataagcaactggagctcgggcaacacctattttcacatcaccatcggaaatctggtgagaggatccaagctcttgtgcgaaacttcactagggtataagatggacgacctcctgacctcttacatcagccagatgctgactgccatgtccaagcaaaggggatcccggtcagggaagta

SEQ ID NO: 5790 - DNA, 6645 bp, Artificial Sequence
  derived and/or modified sequence
gctttactgcaaaaaggcgaccacgtgtggatggaccttcggctcggccaggagtttgacgttcctatcggagctgttgtgaagctttgtgactctgggcaggtgcaggtggtggatgacgaagataacgagcactggatctcaccccagaacgctacccacattaaacccatgcatcctacaagcgtgcatggcgtagaggacatgattaggttgggcgatcttaatgaggccggaattctcaggaacctgctgattcgctaccgggaccatttgatatatacctacactggctctatacttgtggccgttaacccctatcagcttctgtcaatctactctcccgaacatatacgccagtatactaacaaaaaaattggcgagatgccacctcatatcttcgccatagcagacaattgctattttaacatgaagcggaattcccgggaccagtgttgcatcatttcgggggaatccggcgctggcaaaacggagtccacaaagctgatcctccaatttctcgccgctatctcaggccagcatagttggatcgaacagcaggtgctggaggcgacccccatactcgaagcatttggcaacgcgaaaacgattcgtaatgacaactcaagtcgctttggaaaatatattgatatccattttaataaacgaggtgccatcgagggagccaaaatagaacagtatttgcttgaaaaaagtcgggtctgtcgtcaggccttggacgagcgaaattatcacgtcttctattgcatgttggaaggcatgtcagaggatcaaaagaaaaaactgggtctgggccaggcatctgattataattaccttgccatggggaactgcataacctgcgaggggagggttgactcccaggagtacgccaatatccgctccgccatgaaagtcctcatgtttactgacactgaaaattgggagatttccaaactgctagcagccatacttcacttgggaaatctgcagtatgaggctagaacgttcgagaacttggatgcctgcgaagtgttgttctcacccagtctcgccactgccgcttcgctgctagaggtcaatccgccagatttgatgagttgtctcacatcccggactctgattacaaggggagaaacggtttcaacacccctgagcagagaacaggccctcgatgtaagggacgcctttgtaaaagggatttatggcaggcttttcgtgtggattgtcgacaagataaatgccgctatctataagcctcctagccaagacgttaagaactctcgacgtagcatcgggctgctcgacatattcggatttgaaaattttgcagtgaactctttcgaacagctgtgcataaatttcgccaacgagcacttgcagcagtttttcgtgcgccatgtttttaaactggagcaggaagagtacgatctcgaatcaatcgattggctgcacattgaatttactgacaatcaagacgccttggatatgatcgcgaataaacccatgaacataattagcctaattgatgaagaatccaaatttccaaaaggaacagacaccactatgcttcataagctcaattcacaacacaaactaaacgccaattacattccccctaaaaataaccacgaaacgcagttcggcatcaatcactttgccggaattgtgtactatgagacgcaaggatttctggaaaaaaatcgcgacacactgcacggagatatcatacagctcgtgcactccagccgaaacaagtttatcaagcaaatctttcaggccgacgtcgcgatgggcgctgaaacccgtaaacgctcgccaaccctatcctcacaattcaaacgaagtctagagttactcatgcggactctcggggcttgtcaaccattctttgtgaggtgtataaagcctaatgaattcaagaagcccatgcttttcgatcgccatctgtgcgtgcgccaacttaggtattctggcatgatggagaccattcgcatcagaagagctggctaccccatacgctactcattcgtggaatttgttgagaggtaccgagtcctcctgccaggcgtgaagcctgcttacaagcaaggcgaccttagggggacctgccagcgaatggccgaggccgttcttggcacccacgacgactggcagatcggtaaaacaaaaatcttcctgaaggatcaccacgatatgctgctggaagtggaacgcgataaggccattaccgacagagtgattctgctgcagaaggtaatccgaggcttcaaagataggtcaaatttcttaaaactgaaaaatgccgcaaccctgatccagcggcattggcgtggtcacaactgtcgcaaaaattacggccttatgagactggggttcctccggctccaggccctccacaggtcaaggaaattgcaccagcagtaccggttagctagacagcgcataatccagtttcaggctaggtgtcgtgcctacctggtgaggaaggctttcagacatagactttgggcagtgctaacagtccaggcctacgccagaggcatgattgctaggagactgcaccaacgcctcagggccgagtatctctggaggctcgaggccgagaagatgcgcctcgcggaagaggaaaagctgaggaaggagatgagcgcaaaaaaagcaaaggaggaggcggaaagaaagcaccaggagaggctggcacagctggctagggaggatgcagaaagggaacttaaagaaaaggaggcagccaggcgcaaaaaggagctgctcgagcagatggagcgagccaggcatgagcccgtcaatcacagtgacatggtcgataagatgttcgggttcctgggcacaagtggcggattacccggtcaggaaggacaagccccttctggcttcgaagacctggagaggggacggagggaaatggtggaggaagatcttgacgccgctctcccactcccagacgaagatgaagaagacttgagcgaatacaagtttgcaaaattcgcagccacctacttccaggggactaccacgcactcatacactagaaggccccttaagcagcctttactataccatgacgacgagggcgatcagctcgcggcactggccgtctggatcacaatactacgctttatgggcgacctgccggagccaaaataccacacagcgatgtcagatggttcagagaagatacccgtgatgactaagatttacgagaccctcggtaaaaagacctacaaaagagaactgcaggccctgcagggagagggagaagcccaactccccgagggacagaagaagtcttcagtgcgtcacaaattagtacacttaacactgaaaaagaagtctaagctaactgaggaggtgacaaagcggttgcacgatggagaatcaactgttcaaggcaattctatgctcgaggacagacccacgtctaatctggagaaactacactttattattgggaacggcatattgcgacctgctctgagagatgagatctactgccagatttccaaacagctgacccacaacccctcaaagagctcctacgcgaggggctggatactggtgtctttatgcgtgggatgtttcgcccctagtgagaaattcgtgaagtacctccgcaacttcattcacggcggaccccctggttatgccccttactgtgaggaaagactacgcaggacctttgtgaatgggactcgcacccaaccgccttcttggctcgaattacaagctacgaaaagtaagaagcccattatgcttccagtcacctttatggatggcacaacaaaaacccttttgactgattccgccacaacagctaaggagctgtgcaatgctctggcagacaagatcagtctgaaagatcgctttgggttctcattatacatcgccctgtttgacaaggtgtcctcactcggatcagggagtgatcatgttatggacgcgatctctcaatgtgagcaatacgctaaggaacagggcgcacaagagcgtaatgccccatggaggctgtttttcagaaaggaggttttcaccccatggcacagtcctagcgaagataatgtggctaccaacctaatctatcaacaggtggtaagaggggtgaagttcggagagtatcggtgtgagaaagaagacgacctcgccgaacttgcctcccagcagtattttgtagattacgggtcggaaatgatactcgagaggctactgaacctagtgcctacatatattccagacagggagattacgccccttaaaacgctcgaaaaatgggcccagttagccatcgcggcacacaaaaagggcatctacgcacaacgccgaaccgacgcccagaaggtaaaagaagatgtggtctcgtacgccaggttcaagtggcccctccttttttccaggttctatgaggcatataagttctctggaccctcactcccgaaaaatgacgtcatcgttgcagtcaattggacaggagtctatttcgtggacgagcaggaacaagtgctcctggaactgtccttccccgagatcatggcagtgagcagttcaagagagtgcagagtttggctctctttaggctgctctgacctcggctgcgcggctccccactctggttgggctgggcttaccccggcaggaccttgttcgccctgctggagttgtaggggggctaagaccactgcgccaagcttcacgctggctaccatcaagggggacgagtatacatttacctcttccaatgccgaggatatacgggacctcgtagtgacttttttggagggcctacggaagcgatccaaatacgtggtggcgctgcaggacaacccaaaccctgcaggggaggaaagcggctttttgagtttcgcaaaaggtgacctcatcatcctggaccatgacaccggagagcaggttatgaacagcgggtgggcaaacggcataaatgagcggaccaaacaacggggtgattttcctaccgacagcgtgtatgtaatgcccacagtgacaatgccaccacgcgaaatagtcgcccttgttactatgaccccagatcagaggcaagacgtggtccggctgctgcagctgagaactgctgagcccgaggttcgtgcaaaaccctatactcttgaggagtttagttacgattatttccggccacctccaaagcacactctcagccgcgtgatggtgagcaaagcgaggggaaaagatcgcctgtggagccacaccagggagccattgaagcaggcactgcttaaaaaactgctggggtccgaggagctgtcccaggaggcctgcctcgccttcatcgctgtgctaaaatacatgggcgattacccttcgaagcgcacaaggtcagtaaatgagttgaccgaccagatcttcgagggcccactgaaggcagagcccctcaaagatgaggcatacgtgcaaatccttaagcaactgacagacaatcacattaggtattcagaggaaagaggatgggaactcttatggctgtgtaccggactgtttccccctagcaacattctcctcccccatgtacagcggttcctgcagtcccgcaaacactgccccctcgccattgactgcctacagagactgcagaaggccctccgcaatggatctcgaaaatatccaccacacctcgttgaggtcgaagcaattcagcacaaaacaacccagatttttcacaaggtctactttccagacgatacagacgaggccttcgaggtcgagtcaagcacaaaggcaaaggacttctgtcaaaatatcgctaccaggctcctgctgaaaagcagcgaaggttttagtctctttgttaagatagctgacaaagtattgtcagtgccagagaacgacttctttttcgactttgtccgccaccttacagactggattaaaaaggcgagaccaataaaagacggtatcgtgccttcgctcacttatcaagtattttttatgaagaagctctggaccacaactgtcccaggaaaggaccctatggctgatagcattttccattactaccaggaactgcccaagtaccttagggggtaccacaagtgcacccgcgaggaggttttacagctgggcgcactgatctatagagtgaaatttgaagaggacaagtcttatttcccatctatccctaaactgctgcgtgagctggtcccacaagatctaatacgtcaggtgagccccgatgattggaagcggagcatcgtggcctactttaacaaacacgccggaaagtccaaggaggaagcaaaactggcctttctaaagttgatctttaaatggccaacttttggatctgccttttttgaggttaaacagactactgagcctaatttccctgaaatcctgcttatagctattaacaagtatggagtgagcctaatcgatcctaagactaaggatattttgactactcatcctttcacaaagattagcaattggagtagcggaaatacctacttccacattaccattgggaacctcgtccgcggaagtaagctcctttgcgagacctctctgggatacaaaatggatgatctgctaacctcatacatcagtcagatgctgaccgcgatgtctaaacagcgaggttcccggagcggcaagtaa

SEQ ID NO: 5791 - DNA, 6647 bp, Artificial Sequence
  derived and/or modified sequence
atggtaattctccagcaaggcgaccacgtgtggatggacctgcgtctcggacaggagtttgacgttcccatcggtgccgttgtgaagttatgcgatagtggccaggttcaggttgtggatgatgaggataatgagcattggatttctcctcagaatgccacacatattaagccaatgcacccaacatcagtgcacggggtcgaagacatgataaggctcggcgacctgaatgaggctggaattcttcgaaacctgctgataagatatcgggaccacctcatctacacctacactggatcaatccttgtggcggttaacccttatcagctgctgtctatctactcacccgaacatatccggcagtacaccaataagaaaatcggtgagatgcctccccacatatttgccatcgccgacaactgctactttaacatgaagcggaactctcgggaccaatgttgcattattagcggtgaatcaggggctggcaagacagagagtactaagctgatcctccagtttctggctgccatctctggccagcacagctggattgagcaacaggtcctcgaggcgactcccatcctcgaggcttttggcaacgccaagactattcgtaatgataattcctcacgattcggcaaatatatcgacattcacttcaacaagcgtggggctatcgagggggctaagatcgagcagtatctattagaaaaatcccgcgtctgcagacaggcactggatgaacgtaactaccatgttttttattgcatgctggaaggaatgtctgaagaccagaagaagaaactcggtttgggccaggcttccgactacaactatttagctatgggtaactgtataacgtgcgagggccgtgtggacagtcaggagtacgccaatattcgctccgcgatgaaagtcttaatgtttacggataccgaaaactgggagatctcaaagttgctcgccgctatcctgcacctgggcaaccttcagtacgaagcgcgaactttcgaaaacctggacgcttgcgaagtgctgttctcgccttccttagcaactgccgcatcactcctagaagtgaacccacctgatttaatgtcatgcctcacgagtcggacgctgattacgcgtggcgagaccgtcagtacccccctcagtagagaacaggcactagatgtccgagatgccttcgtgaaaggcatctatggccgactatttgtgtggattgtagataagatcaacgccgcaatttataagcctcccagtcaagacgtcaagaatagccggagatccattggtctccttgatatctttggatttgaaaatttcgctgtgaatagtttcgagcaactttgcatcaactttgccaacgagcatttgcaacagttctttgtgcgccacgtgttcaaactggaacaagaggaatatgatcttgagtcaattgactggttgcatatagaatttactgataatcaggatgctcttgacatgatcgcaaacaagcccatgaacatcatttccctcatcgatgaggaaagtaagttccctaagggcaccgatacaaccatgctgcataagctaaatagtcagcataagctgaatgcaaactacatacctccgaaaaacaaccatgaaacccagtttggcatcaatcatttcgctgggatagtgtattatgaaacacaaggatttctggaaaaaaaccgtgacactctgcatggggatatcatccaacttgtgcattcctcacgtaataaattcattaagcagatttttcaagcagacgtggctatgggggcagagactcggaaacgctcccctacactctccagccagtttaagcggtccctggaactgctcatgcgaaccctcggagcttgccagccctttttcgtacggtgtatcaagccaaacgaattcaaaaaaccaatgctgttcgacagacatctttgtgtccgccaactgcggtattccggtatgatggagacaattcgaattcgtcgagccggttatccaatccgatactccttcgtggaattcgtagagaggtatagggtcctgcttcccggagtgaaacctgcctataagcagggcgaccttcgcggaacgtgccaacggatggccgaagccgtcctcggcacccacgatgattggcagatcggtaaaacgaaaatttttctaaaagaccaccatgacatgctcctagaagtcgaacgagacaaagctatcacagaccgagtgatccttctgcagaaggtcattaggggattcaaggaccggtcaaattttctgaaattgaaaaacgccgctacccttatccagaggcattggcgcggacataattgccgcaagaactatgggttgatgaggttaggctttcttaggcttcaagcactgcatcgatcccgtaagttacatcaacagtatcggttggctcggcaacggataatacagtttcaggcgagatgtcgggcatacctcgttagaaaggccttcaggcaccgcctctgggcagtcctcaccgtacaggcctatgcgaggggtatgatcgcgagaaggctgcatcagaggctgagggccgaatacctgtggcggctagaggccgaaaaaatgagactcgcagaagaggagaagctgagaaaggagatgagtgccaagaaagctaaggaagaggctgaaagaaaacatcaggaaagactggcacaattagcacgtgaggacgccgaacgcgagctcaaggagaaggaagctgctcgccgaaaaaaggaactgcttgagcaaatggaacgggctcgccatgagcctgtcaaccattccgatatggtagataagatgttcggctttctggggacgagcggaggactccccggtcaggaaggccaggctccgtccggctttgaagacctggagagggggagacgcgaaatggtggaagaagatctcgacgccgcactgcccctgccagatgaagacgaggaagatctgtcagaatacaagtttgcgaagtttgcagctacttatttccagggcacaaccacacattcctatacgcgcagacccttaaaacagcccttgttataccatgacgacgaaggggatcagcttgccgctcttgccgtttggatcacaatcttgcgctttatgggcgatctgcctgagccaaaatatcacactgccatgagcgacgggagcgagaaaatcccagtgatgacgaagatctacgagactctgggaaagaagacatacaagagggaacttcaggcactgcaaggcgaaggagaggcccagctgcccgaaggccaaaagaagagtagcgtgaggcataagttggtccacctcacccttaaaaaaaaatctaaattgacagaggaggtcaccaaaagattgcatgacggggagtcaactgtgcagggcaactccatgctggaggatcggccaacctctaatctggagaagctgcactttattatcggcaacggcatcctgcgacctgccctacgggacgaaatttattgtcaaatcagtaagcaactcacccacaacccaagcaaaagctcttacgctagagggtggatacttgtgtccctttgtgttggctgcttcgcaccaagcgagaaattcgtgaaatacctgaggaacttcattcatggtggccctccagggtacgctccctattgtgaggaacggctgagacggacctttgttaatggaacaagaacacagcccccatcttggctcgagttgcaggctacgaagagcaaaaaacctattatgttaccagtaacgttcatggacggaacgaccaagaccctgctcaccgattcagccacaaccgccaaggagctttgcaacgccttggctgacaaaataagcctgaaagatcggttcggcttctctctgtatatcgctctgtttgataaagtgtcttcgctgggtagcggatctgaccatgttatggacgccatctctcagtgtgaacaatacgcaaaagagcaaggtgcgcaggagcgaaacgccccttggcggctattcttccgcaaggaagtgtttaccccttggcatagcccaagcgaggacaatgtggcaaccaacctcatctaccaacaggttgtgaggggcgtgaaatttggtgagtaccgttgcgaaaaggaagacgacctggcagaattggcgagtcagcaatacttcgtagattacggttctgagatgattctggaaagattactgaatctcgtacctacatatattcccgacagggagattactcccctgaagaccttagaaaaatgggcccagcttgccatcgccgctcacaaaaaagggatatatgcgcagcggcgaacagacgctcagaaggtgaaagaggatgttgtctcctacgccagattcaagtggcccctcctgttctcaagattttatgaagcctacaagttctcagggccatccctgccaaaaaacgatgtcatcgtagcagtcaattggactggagtttatttcgtggacgagcaggaacaggtgcttcttgaactgtcttttccagagatcatggctgttagcagttcgcgtgagtgtagggtttggctctctctgggttgtagtgatttaggttgcgctgcgccacatagtgggtgggccggactgacccctgctggtccctgttccccttgttggagctgcaggggggcaaagaccacggccccatcttttacccttgctactattaagggcgatgaatatactttcacgtcatctaatgctgaggacatcagggatctggtggttacattcctggagggccttaggaaaaggagcaagtacgtcgtggccctgcaggacaacccaaatcccgctggcgaggagagcgggtttctgagctttgcgaaaggtgacttgatcatcttagaccatgacacaggcgaacaggtcatgaattcgggctgggccaatggtataaacgagcgcacgaagcagagaggcgattttccaaccgactccgtgtacgtgatgcctacagtgacaatgcctccacgggagatcgtagcgctcgtgactatgaccccagaccagcggcaggatgtggttcgactattgcagctgaggacggccgagcccgaagttcgggcaaagccatacactctggaggaatttagttatgactacttcagaccaccaccaaagcataccctaagcagggtcatggtgtctaaggctcgcggtaaagacagactgtggtcccacacccgggaaccacttaagcaggccctcctcaagaaactcctgggatccgaagagctgagccaggaagcctgtctagctttcatcgctgtgctgaagtatatgggagactatccctcaaagcgaacccggtcagtcaatgagctcacggatcagatcttcgaggggccattgaaagccgaacccttgaaagacgaggcctacgtgcagattctgaaacagttgactgataaccacatcaggtactctgaagaacgcggatgggaacttctgtggctgtgcactggtctgtttcccccttcaaatattctgttgccccacgtacagcggtttctgcaaagtcggaagcactgcccactggcaattgactgccttcagaggcttcagaaagcattgcggaatggttcccgtaaatacccaccacacctggtggaagtggaggctatccagcataagacaactcagatatttcataaggtgtattttcctgatgataccgacgaggccttcgaagtggagagctccactaaagccaaagatttttgccaaaacattgcaacccgattgctcctgaaatcctcagaagggttttctctgtttgtgaagattgctgacaaagtgctttccgtgcccgagaatgacttcttctttgactttgtaaggcacttgacagactggatcaagaaggccaggcctataaaggacggaatcgttccaagtctgacataccaggtcttctttatgaaaaaactttggacaacaacagttccaggtaaggaccctatggctgattctatcttccattactaccaagagcttcccaaatacttacgcggttaccacaaatgtacaagagaggaggtcttacagctcggagcactgatctaccgcgttaagtttgaggaagataaatcctatttcccttctatacccaaattgttgagggagctggtgccccaggatttgattagacaggtctcccccgatgattggaagcgctctatcgttgcatacttcaataaacatgccggaaagtcaaaagaagaagcaaagttagccttcctaaaactaatctttaagtggccaaccttcgggagtgcatttttcgaggttaaacagaccaccgagcccaacttccccgagatcctgctaatcgctattaacaagtatggcgtgtctctaatagatcccaaaactaaggacattttgaccacacacccctttaccaagatcagtaattggtcctctggcaacacctactttcacattaccattggcaatttggtgcgtggaagtaagttgctctgtgagacctctttagggtataagatggacgatctgctcacttcttatatctctcagatgctaaccgctatgagcaagcagcgcggaagcaggtcaggtaagta

SEQ ID NO: 5792 - DNA, 6555 bp, Artificial Sequence
  derived and/or modified sequence
gccctgctgcagaagggcgaccacgtgtggatggacctgagactgggccaggagttcgacgtgcccatcggcgccgtggtgaagctgtgcgacagcggccaggtgcaggtggtggacgacgaggacaacgagcactggatcagcccccagaacgccacccacatcaagcccatgcaccccaccagcgtgcacggcgtggaggacatgatcagactgggcgacctgaacgaggccggcatcctgagaaacctgctgatcagatacagagaccacctgatctacacctacaccggcagcatcctggtggccgtgaacccctaccagctgctgagcatctacagccccgagcacatcagacagtacaccaacaagaagatcggcgagatgcccccccacatcttcgccatcgccgacaactgctacttcaacatgaagagaaacagcagagaccagtgctgcatcatcagcggcgagagcggcgccggcaagaccgagagcaccaagctgatcctgcagttcctggccgccatcagcggccagcacagctggatcgagcagcaggtgctggaggccacccccatcctggaggccttcggcaacgccaagaccatcagaaacgacaacagcagcagattcggcaagtacatcgacatccacttcaacaagagaggcgccatcgagggcgccaagatcgagcagtacctgctggagaagagcagagtgtgcagacaggccctggacgagagaaactaccacgtgttctactgcatgctggagggcatgagcgaggaccagaagaagaagctgggcctgggccaggccagcgactacaactacctggccatgggcaactgcatcacctgcgagggcagagtggacagccaggagtacgccaacatcagaagcgccatgaaggtgctgatgttcaccgacaccgagaactgggagatcagcaagctgctggccgccatcctgcacctgggcaacctgcagtacgaggccagaaccttcgagaacctggacgcctgcgaggtgctgttcagccccagcctggccaccgccgccagcctgctggaggtgaacccccccgacctgatgagctgcctgaccagcagaaccctgatcaccagaggcgagaccgtgagcacccccctgagcagagagcaggccctggacgtgagagacgccttcgtgaagggcatctacggcagactgttcgtgtggatcgtggacaagatcaacgccgccatctacaagccccccagccaggacgtgaagaacagcagaagaagcatcggcctgctggacatcttcggcttcgagaacttcgccgtgaacagcttcgagcagctgtgcatcaacttcgccaacgagcacctgcagcagttcttcgtgagacacgtgttcaagctggagcaggaggagtacgacctggagagcatcgactggctgcacatcgagttcaccgacaaccaggacgccctggacatgatcgccaacaagcccatgaacatcatcagcctgatcgacgaggagagcaagttccccaagggcaccgacaccaccatgctgcacaagctgaacagccagcacaagctgaacgccaactacatcccccccaagaacaaccacgagacccagttcggcatcaaccacttcgccggcatcgtgtactacgagacccagggcttcctggagaagaacagagacaccctgcacggcgacatcatccagctggtgcacagcagcagaaacaagttcatcaagcagatcttccaggccgacgtggccatgggcgccgagaccagaaagagaagccccaccctgagcagccagttcaagagaagcctggagctgctgatgagaaccctgggcgcctgccagcccttcttcgtgagatgcatcaagcccaacgagttcaagaagcccatgctgttcgacagacacctgtgcgtgagacagctgagatacagcggcatgatggagaccatcagaatcagaagagccggctaccccatcagatacagcttcgtggagttcgtggagagatacagagtgctgctgcccggcgtgaagcccgcctacaagcagggcgacctgagaggcacctgccagagaatggccgaggccgtgctgggcacccacgacgactggcagatcggcaagaccaagatcttcctgaaggaccaccacgacatgctgctggaggtggagagagacaaggccatcaccgacagagtgatcctgctgcagaaggtgatcagaggcttcaaggacagaagcaacttcctgaagctgaagaacgccgccaccctgatccagagacactggagaggccacaactgcagaaagaactacggcctgatgagactgggcttcctgagactgcaggccctgcacagaagcagaaagctgcaccagcagtacagactggccagacagagaatcatccagttccaggccagatgcagagcctacctggtgagaaaggccttcagacacagactgtgggccgtgctgaccgtgcaggcctacgccagaggcatgatcgccagaagactgcaccagagactgagagccgagtacctgtggagactggaggccgagaagatgagactggccgaggaggagaagctgagaaaggagatgagcgccaagaaggccaaggaggaggccgagagaaagcaccaggagagactggcccagctggccagagaggacgccgagagagagctgaaggagaaggaggccgccagaagaaagaaggagctgctggagcagatggagagagccagacacgagcccgtgaaccacagcgacatggtggacaagatgttcggcttcctgggcaccagcggcggcctgcccggccaggagggccaggcccccagcggcttcgaggacctggagagaggcagaagagagatggtggaggaggacctggacgccgccctgcccctgcccgacgaggacgaggaggacctgagcgagtacaagttcgccaagttcgccgccacctacttccagggcaccaccacccacagctacaccagaagacccctgaagcagcccctgctgtaccacgacgacgagggcgaccagctggccgccctggccgtgtggatcaccatcctgagattcatgggcgacctgcccgagcccaagtaccacaccgccatgagcgacggcagcgagaagatccccgtgatgaccaagatctacgagaccctgggcaagaagacctacaagagagagctgcaggccctgcagggcgagggcgaggtgaccaagagactgcacgacggcgagagcaccgtgcagggcaacagcatgctggaggacagacccaccagcaacctggagaagctgcacttcatcatcggcaacggcatcctgagacccgccctgagagacgagatctactgccagatcagcaagcagctgacccacaaccccagcaagagcagctacgccagaggctggatcctggtgagcctgtgcgtgggctgcttcgcccccagcgagaagttcgtgaagtacctgagaaacttcatccacggcggcccccccggctacgccccctactgcgaggagagactgagaagaaccttcgtgaacggcaccagaacccagccccccagctggctggagctgcaggccaccaagagcaagaagcccatcatgctgcccgtgaccttcatggacggcaccaccaagaccctgctgaccgacagcgccaccaccgccaaggagctgtgcaacgccctggccgacaagatcagcctgaaggacagattcggcttcagcctgtacatcgccctgttcgacaaggtgagcagcctgggcagcggcagcgaccacgtgatggacgccatcagccagtgcgagcagtacgccaaggagcagggcgcccaggagagaaacgccccctggagactgttcttcagaaaggaggtgttcaccccctggcacagccccagcgaggacaacgtggccaccaacctgatctaccagcaggtggtgagaggcgtgaagttcggcgagtacagatgcgagaaggaggacgacctggccgagctggccagccagcagtacttcgtggactacggcagcgagatgatcctggagagactgctgaacctggtgcccacctacatccccgacagagagatcacccccctgaagaccctggagaagtgggcccagctggccatcgccgcccacaagaagggcatctacgcccagagaagaaccgacgcccagaaggtgaaggaggacgtggtgagctacgccagattcaagtggcccctgctgttcagcagattctacgaggcctacaagttcagcggccccagcctgcccaagaacgacgtgatcgtggccgtgaactggaccggcgtgtacttcgtggacgagcaggagcaggtgctgctggagctgagcttccccgagatcatggccgtgagcagcagcagagagtgcagagtgtggctgagcctgggctgcagcgacctgggctgcgccgccccccacagcggctgggccggcctgacccccgccggcccctgcagcccctgctggagctgcagaggcgccaagaccaccgcccccagcttcaccctggccaccatcaagggcgacgagtacaccttcaccagcagcaacgccgaggacatcagagacctggtggtgaccttcctggagggcctgagaaagagaagcaagtacgtggtggccctgcaggacaaccccaaccccgccggcgaggagagcggcttcctgagcttcgccaagggcgacctgatcatcctggaccacgacaccggcgagcaggtgatgaacagcggctgggccaacggcatcaacgagagaaccaagcagagaggcgacttccccaccgacagcgtgtacgtgatgcccaccgtgaccatgccccccagagagatcgtggccctggtgaccatgacccccgaccagagacaggacgtggtgagactgctgcagctgagaaccgccgagcccgaggtgagagccaagccctacaccctggaggagttcagctacgactacttcagacccccccccaagcacaccctgagcagagtgatggtgagcaaggccagaggcaaggacagactgtggagccacaccagagagcccctgaagcaggccctgctgaagaagctgctgggcagcgaggagctgagccaggaggcctgcctggccttcatcgccgtgctgaagtacatgggcgactaccccagcaagagaaccagaagcgtgaacgagctgaccgaccagatcttcgagggccccctgaaggccgagcccctgaaggacgaggcctacgtgcagatcctgaagcagctgaccgacaaccacatcagatacagcgaggagagaggctgggagctgctgtggctgtgcaccggcctgttcccccccagcaacatcctgctgccccacgtgcagagattcctgcagagcagaaagcactgccccctggccatcgactgcctgcagagactgcagaaggccctgagaaacggcagcagaaagtaccccccccacctggtggaggtggaggccatccagcacaagaccacccagatcttccacaaggtgtacttccccgacgacaccgacgaggccttcgaggtggagagcagcaccaaggccaaggacttctgccagaacatcgccaccagactgctgctgaagagcagcgagggcttcagcctgttcgtgaagatcgccgacaaggtgctgagcgtgcccgagaacgacttcttcttcgacttcgtgagacacctgaccgactggatcaagaaggccagacccatcaaggacggcatcgtgcccagcctgacctaccaggtgttcttcatgaagaagctgtggaccaccaccgtgcccggcaaggaccccatggccgacagcatcttccactactaccaggagctgcccaagtacctgagaggctaccacaagtgcaccagagaggaggtgctgcagctgggcgccctgatctacagagtgaagttcgaggaggacaagagctacttccccagcatccccaagctgctgagagagctggtgccccaggacctgatcagacaggtgagccccgacgactggaagagaagcatcgtggcctacttcaacaagcacgccggcaagagcaaggaggaggccaagctggccttcctgaagctgatcttcaagtggcccaccttcggcagcgccttcttcgaggtgaagcagaccaccgagcccaacttccccgagatcctgctgatcgccatcaacaagtacggcgtgagcctgatcgaccccaagaccaaggacatcctgaccacccaccccttcaccaagatcagcaactggagcagcggcaacacctacttccacatcaccatcggcaacctggtgagaggcagcaagctgctgtgcgagaccagcctgggctacaagatggacgacctgctgaccagctacatcagccagatgctgaccgccatgagcaagcagagaggcagcagaagcggcaagtag

SEQ ID NO: 5793 - DNA, 6645 bp, Artificial Sequence
  derived and/or modified sequence
gccctgctgcagaagggcgaccacgtgtggatggacctgagactgggccaggagttcgacgtgcccatcggcgccgtggtgaagctgtgcgacagcggccaggtgcaggtggtggacgacgaggacaacgagcactggatcagcccccagaacgccacccacatcaagcccatgcaccccaccagcgtgcacggcgtggaggacatgatcagactgggcgacctgaacgaggccggcatcctgagaaacctgctgatcagatacagagaccacctgatctacacctacaccggcagcatcctggtggccgtgaacccctaccagctgctgagcatctacagccccgagcacatcagacagtacaccaacaagaagatcggcgagatgcccccccacatcttcgccatcgccgacaactgctacttcaacatgaagagaaacagcagagaccagtgctgcatcatcagcggcgagagcggcgccggcaagaccgagagcaccaagctgatcctgcagttcctggccgccatcagcggccagcacagctggatcgagcagcaggtgctggaggccacccccatcctggaggccttcggcaacgccaagaccatcagaaacgacaacagcagcagattcggcaagtacatcgacatccacttcaacaagagaggcgccatcgagggcgccaagatcgagcagtacctgctggagaagagcagagtgtgcagacaggccctggacgagagaaactaccacgtgttctactgcatgctggagggcatgagcgaggaccagaagaagaagctgggcctgggccaggccagcgactacaactacctggccatgggcaactgcatcacctgcgagggcagagtggacagccaggagtacgccaacatcagaagcgccatgaaggtgctgatgttcaccgacaccgagaactgggagatcagcaagctgctggccgccatcctgcacctgggcaacctgcagtacgaggccagaaccttcgagaacctggacgcctgcgaggtgctgttcagccccagcctggccaccgccgccagcctgctggaggtgaacccccccgacctgatgagctgcctgaccagcagaaccctgatcaccagaggcgagaccgtgagcacccccctgagcagagagcaggccctggacgtgagagacgccttcgtgaagggcatctacggcagactgttcgtgtggatcgtggacaagatcaacgccgccatctacaagccccccagccaggacgtgaagaacagcagaagaagcatcggcctgctggacatcttcggcttcgagaacttcgccgtgaacagcttcgagcagctgtgcatcaacttcgccaacgagcacctgcagcagttcttcgtgagacacgtgttcaagctggagcaggaggagtacgacctggagagcatcgactggctgcacatcgagttcaccgacaaccaggacgccctggacatgatcgccaacaagcccatgaacatcatcagcctgatcgacgaggagagcaagttccccaagggcaccgacaccaccatgctgcacaagctgaacagccagcacaagctgaacgccaactacatcccccccaagaacaaccacgagacccagttcggcatcaaccacttcgccggcatcgtgtactacgagacccagggcttcctggagaagaacagagacaccctgcacggcgacatcatccagctggtgcacagcagcagaaacaagttcatcaagcagatcttccaggccgacgtggccatgggcgccgagaccagaaagagaagccccaccctgagcagccagttcaagagaagcctggagctgctgatgagaaccctgggcgcctgccagcccttcttcgtgagatgcatcaagcccaacgagttcaagaagcccatgctgttcgacagacacctgtgcgtgagacagctgagatacagcggcatgatggagaccatcagaatcagaagagccggctaccccatcagatacagcttcgtggagttcgtggagagatacagagtgctgctgcccggcgtgaagcccgcctacaagcagggcgacctgagaggcacctgccagagaatggccgaggccgtgctgggcacccacgacgactggcagatcggcaagaccaagatcttcctgaaggaccaccacgacatgctgctggaggtggagagagacaaggccatcaccgacagagtgatcctgctgcagaaggtgatcagaggcttcaaggacagaagcaacttcctgaagctgaagaacgccgccaccctgatccagagacactggagaggccacaactgcagaaagaactacggcctgatgagactgggcttcctgagactgcaggccctgcacagaagcagaaagctgcaccagcagtacagactggccagacagagaatcatccagttccaggccagatgcagagcctacctggtgagaaaggccttcagacacagactgtgggccgtgctgaccgtgcaggcctacgccagaggcatgatcgccagaagactgcaccagagactgagagccgagtacctgtggagactggaggccgagaagatgagactggccgaggaggagaagctgagaaaggagatgagcgccaagaaggccaaggaggaggccgagagaaagcaccaggagagactggcccagctggccagagaggacgccgagagagagctgaaggagaaggaggccgccagaagaaagaaggagctgctggagcagatggagagagccagacacgagcccgtgaaccacagcgacatggtggacaagatgttcggcttcctgggcaccagcggcggcctgcccggccaggagggccaggcccccagcggcttcgaggacctggagagaggcagaagagagatggtggaggaggacctggacgccgccctgcccctgcccgacgaggacgaggaggacctgagcgagtacaagttcgccaagttcgccgccacctacttccagggcaccaccacccacagctacaccagaagacccctgaagcagcccctgctgtaccacgacgacgagggcgaccagctggccgccctggccgtgtggatcaccatcctgagattcatgggcgacctgcccgagcccaagtaccacaccgccatgagcgacggcagcgagaagatccccgtgatgaccaagatctacgagaccctgggcaagaagacctacaagagagagctgcaggccctgcagggcgagggcgaggcccagctgcccgagggccagaagaagagcagcgtgagacacaagctggtgcacctgaccctgaagaagaagagcaagctgaccgaggaggtgaccaagagactgcacgacggcgagagcaccgtgcagggcaacagcatgctggaggacagacccaccagcaacctggagaagctgcacttcatcatcggcaacggcatcctgagacccgccctgagagacgagatctactgccagatcagcaagcagctgacccacaaccccagcaagagcagctacgccagaggctggatcctggtgagcctgtgcgtgggctgcttcgcccccagcgagaagttcgtgaagtacctgagaaacttcatccacggcggcccccccggctacgccccctactgcgaggagagactgagaagaaccttcgtgaacggcaccagaacccagccccccagctggctggagctgcaggccaccaagagcaagaagcccatcatgctgcccgtgaccttcatggacggcaccaccaagaccctgctgaccgacagcgccaccaccgccaaggagctgtgcaacgccctggccgacaagatcagcctgaaggacagattcggcttcagcctgtacatcgccctgttcgacaaggtgagcagcctgggcagcggcagcgaccacgtgatggacgccatcagccagtgcgagcagtacgccaaggagcagggcgcccaggagagaaacgccccctggagactgttcttcagaaaggaggtgttcaccccctggcacagccccagcgaggacaacgtggccaccaacctgatctaccagcaggtggtgagaggcgtgaagttcggcgagtacagatgcgagaaggaggacgacctggccgagctggccagccagcagtacttcgtggactacggcagcgagatgatcctggagagactgctgaacctggtgcccacctacatccccgacagagagatcacccccctgaagaccctggagaagtgggcccagctggccatcgccgcccacaagaagggcatctacgcccagagaagaaccgacgcccagaaggtgaaggaggacgtggtgagctacgccagattcaagtggcccctgctgttcagcagattctacgaggcctacaagttcagcggccccagcctgcccaagaacgacgtgatcgtggccgtgaactggaccggcgtgtacttcgtggacgagcaggagcaggtgctgctggagctgagcttccccgagatcatggccgtgagcagcagcagagagtgcagagtgtggctgagcctgggctgcagcgacctgggctgcgccgccccccacagcggctgggccggcctgacccccgccggcccctgcagcccctgctggagctgcagaggcgccaagaccaccgcccccagcttcaccctggccaccatcaagggcgacgagtacaccttcaccagcagcaacgccgaggacatcagagacctggtggtgaccttcctggagggcctgagaaagagaagcaagtacgtggtggccctgcaggacaaccccaaccccgccggcgaggagagcggcttcctgagcttcgccaagggcgacctgatcatcctggaccacgacaccggcgagcaggtgatgaacagcggctgggccaacggcatcaacgagagaaccaagcagagaggcgacttccccaccgacagcgtgtacgtgatgcccaccgtgaccatgccccccagagagatcgtggccctggtgaccatgacccccgaccagagacaggacgtggtgagactgctgcagctgagaaccgccgagcccgaggtgagagccaagccctacaccctggaggagttcagctacgactacttcagacccccccccaagcacaccctgagcagagtgatggtgagcaaggccagaggcaaggacagactgtggagccacaccagagagcccctgaagcaggccctgctgaagaagctgctgggcagcgaggagctgagccaggaggcctgcctggccttcatcgccgtgctgaagtacatgggcgactaccccagcaagagaaccagaagcgtgaacgagctgaccgaccagatcttcgagggccccctgaaggccgagcccctgaaggacgaggcctacgtgcagatcctgaagcagctgaccgacaaccacatcagatacagcgaggagagaggctgggagctgctgtggctgtgcaccggcctgttcccccccagcaacatcctgctgccccacgtgcagagattcctgcagagcagaaagcactgccccctggccatcgactgcctgcagagactgcagaaggccctgagaaacggcagcagaaagtaccccccccacctggtggaggtggaggccatccagcacaagaccacccagatcttccacaaggtgtacttccccgacgacaccgacgaggccttcgaggtggagagcagcaccaaggccaaggacttctgccagaacatcgccaccagactgctgctgaagagcagcgagggcttcagcctgttcgtgaagatcgccgacaaggtgctgagcgtgcccgagaacgacttcttcttcgacttcgtgagacacctgaccgactggatcaagaaggccagacccatcaaggacggcatcgtgcccagcctgacctaccaggtgttcttcatgaagaagctgtggaccaccaccgtgcccggcaaggaccccatggccgacagcatcttccactactaccaggagctgcccaagtacctgagaggctaccacaagtgcaccagagaggaggtgctgcagctgggcgccctgatctacagagtgaagttcgaggaggacaagagctacttccccagcatccccaagctgctgagagagctggtgccccaggacctgatcagacaggtgagccccgacgactggaagagaagcatcgtggcctacttcaacaagcacgccggcaagagcaaggaggaggccaagctggccttcctgaagctgatcttcaagtggcccaccttcggcagcgccttcttcgaggtgaagcagaccaccgagcccaacttccccgagatcctgctgatcgccatcaacaagtacggcgtgagcctgatcgaccccaagaccaaggacatcctgaccacccaccccttcaccaagatcagcaactggagcagcggcaacacctacttccacatcaccatcggcaacctggtgagaggcagcaagctgctgtgcgagaccagcctgggctacaagatggacgacctgctgaccagctacatcagccagatgctgaccgccatgagcaagcagagaggcagcagaagcggcaagtag

SEQ ID NO: 5794 - DNA, 6648 bp, Artificial Sequence
  derived and/or modified sequence
atggtgatcctgcagcagggcgaccacgtgtggatggacctgagactgggccaggagttcgacgtgcccatcggcgccgtggtgaagctgtgcgacagcggccaggtgcaggtggtggacgacgaggacaacgagcactggatcagcccccagaacgccacccacatcaagcccatgcaccccaccagcgtgcacggcgtggaggacatgatcagactgggcgacctgaacgaggccggcatcctgagaaacctgctgatcagatacagagaccacctgatctacacctacaccggcagcatcctggtggccgtgaacccctaccagctgctgagcatctacagccccgagcacatcagacagtacaccaacaagaagatcggcgagatgcccccccacatcttcgccatcgccgacaactgctacttcaacatgaagagaaacagcagagaccagtgctgcatcatcagcggcgagagcggcgccggcaagaccgagagcaccaagctgatcctgcagttcctggccgccatcagcggccagcacagctggatcgagcagcaggtgctggaggccacccccatcctggaggccttcggcaacgccaagaccatcagaaacgacaacagcagcagattcggcaagtacatcgacatccacttcaacaagagaggcgccatcgagggcgccaagatcgagcagtacctgctggagaagagcagagtgtgcagacaggccctggacgagagaaactaccacgtgttctactgcatgctggagggcatgagcgaggaccagaagaagaagctgggcctgggccaggccagcgactacaactacctggccatgggcaactgcatcacctgcgagggcagagtggacagccaggagtacgccaacatcagaagcgccatgaaggtgctgatgttcaccgacaccgagaactgggagatcagcaagctgctggccgccatcctgcacctgggcaacctgcagtacgaggccagaaccttcgagaacctggacgcctgcgaggtgctgttcagccccagcctggccaccgccgccagcctgctggaggtgaacccccccgacctgatgagctgcctgaccagcagaaccctgatcaccagaggcgagaccgtgagcacccccctgagcagagagcaggccctggacgtgagagacgccttcgtgaagggcatctacggcagactgttcgtgtggatcgtggacaagatcaacgccgccatctacaagccccccagccaggacgtgaagaacagcagaagaagcatcggcctgctggacatcttcggcttcgagaacttcgccgtgaacagcttcgagcagctgtgcatcaacttcgccaacgagcacctgcagcagttcttcgtgagacacgtgttcaagctggagcaggaggagtacgacctggagagcatcgactggctgcacatcgagttcaccgacaaccaggacgccctggacatgatcgccaacaagcccatgaacatcatcagcctgatcgacgaggagagcaagttccccaagggcaccgacaccaccatgctgcacaagctgaacagccagcacaagctgaacgccaactacatcccccccaagaacaaccacgagacccagttcggcatcaaccacttcgccggcatcgtgtactacgagacccagggcttcctggagaagaacagagacaccctgcacggcgacatcatccagctggtgcacagcagcagaaacaagttcatcaagcagatcttccaggccgacgtggccatgggcgccgagaccagaaagagaagccccaccctgagcagccagttcaagagaagcctggagctgctgatgagaaccctgggcgcctgccagcccttcttcgtgagatgcatcaagcccaacgagttcaagaagcccatgctgttcgacagacacctgtgcgtgagacagctgagatacagcggcatgatggagaccatcagaatcagaagagccggctaccccatcagatacagcttcgtggagttcgtggagagatacagagtgctgctgcccggcgtgaagcccgcctacaagcagggcgacctgagaggcacctgccagagaatggccgaggccgtgctgggcacccacgacgactggcagatcggcaagaccaagatcttcctgaaggaccaccacgacatgctgctggaggtggagagagacaaggccatcaccgacagagtgatcctgctgcagaaggtgatcagaggcttcaaggacagaagcaacttcctgaagctgaagaacgccgccaccctgatccagagacactggagaggccacaactgcagaaagaactacggcctgatgagactgggcttcctgagactgcaggccctgcacagaagcagaaagctgcaccagcagtacagactggccagacagagaatcatccagttccaggccagatgcagagcctacctggtgagaaaggccttcagacacagactgtgggccgtgctgaccgtgcaggcctacgccagaggcatgatcgccagaagactgcaccagagactgagagccgagtacctgtggagactggaggccgagaagatgagactggccgaggaggagaagctgagaaaggagatgagcgccaagaaggccaaggaggaggccgagagaaagcaccaggagagactggcccagctggccagagaggacgccgagagagagctgaaggagaaggaggccgccagaagaaagaaggagctgctggagcagatggagagagccagacacgagcccgtgaaccacagcgacatggtggacaagatgttcggcttcctgggcaccagcggcggcctgcccggccaggagggccaggcccccagcggcttcgaggacctggagagaggcagaagagagatggtggaggaggacctggacgccgccctgcccctgcccgacgaggacgaggaggacctgagcgagtacaagttcgccaagttcgccgccacctacttccagggcaccaccacccacagctacaccagaagacccctgaagcagcccctgctgtaccacgacgacgagggcgaccagctggccgccctggccgtgtggatcaccatcctgagattcatgggcgacctgcccgagcccaagtaccacaccgccatgagcgacggcagcgagaagatccccgtgatgaccaagatctacgagaccctgggcaagaagacctacaagagagagctgcaggccctgcagggcgagggcgaggcccagctgcccgagggccagaagaagagcagcgtgagacacaagctggtgcacctgaccctgaagaagaagagcaagctgaccgaggaggtgaccaagagactgcacgacggcgagagcaccgtgcagggcaacagcatgctggaggacagacccaccagcaacctggagaagctgcacttcatcatcggcaacggcatcctgagacccgccctgagagacgagatctactgccagatcagcaagcagctgacccacaaccccagcaagagcagctacgccagaggctggatcctggtgagcctgtgcgtgggctgcttcgcccccagcgagaagttcgtgaagtacctgagaaacttcatccacggcggcccccccggctacgccccctactgcgaggagagactgagaagaaccttcgtgaacggcaccagaacccagccccccagctggctggagctgcaggccaccaagagcaagaagcccatcatgctgcccgtgaccttcatggacggcaccaccaagaccctgctgaccgacagcgccaccaccgccaaggagctgtgcaacgccctggccgacaagatcagcctgaaggacagattcggcttcagcctgtacatcgccctgttcgacaaggtgagcagcctgggcagcggcagcgaccacgtgatggacgccatcagccagtgcgagcagtacgccaaggagcagggcgcccaggagagaaacgccccctggagactgttcttcagaaaggaggtgttcaccccctggcacagccccagcgaggacaacgtggccaccaacctgatctaccagcaggtggtgagaggcgtgaagttcggcgagtacagatgcgagaaggaggacgacctggccgagctggccagccagcagtacttcgtggactacggcagcgagatgatcctggagagactgctgaacctggtgcccacctacatccccgacagagagatcacccccctgaagaccctggagaagtgggcccagctggccatcgccgcccacaagaagggcatctacgcccagagaagaaccgacgcccagaaggtgaaggaggacgtggtgagctacgccagattcaagtggcccctgctgttcagcagattctacgaggcctacaagttcagcggccccagcctgcccaagaacgacgtgatcgtggccgtgaactggaccggcgtgtacttcgtggacgagcaggagcaggtgctgctggagctgagcttccccgagatcatggccgtgagcagcagcagagagtgcagagtgtggctgagcctgggctgcagcgacctgggctgcgccgccccccacagcggctgggccggcctgacccccgccggcccctgcagcccctgctggagctgcagaggcgccaagaccaccgcccccagcttcaccctggccaccatcaagggcgacgagtacaccttcaccagcagcaacgccgaggacatcagagacctggtggtgaccttcctggagggcctgagaaagagaagcaagtacgtggtggccctgcaggacaaccccaaccccgccggcgaggagagcggcttcctgagcttcgccaagggcgacctgatcatcctggaccacgacaccggcgagcaggtgatgaacagcggctgggccaacggcatcaacgagagaaccaagcagagaggcgacttccccaccgacagcgtgtacgtgatgcccaccgtgaccatgccccccagagagatcgtggccctggtgaccatgacccccgaccagagacaggacgtggtgagactgctgcagctgagaaccgccgagcccgaggtgagagccaagccctacaccctggaggagttcagctacgactacttcagacccccccccaagcacaccctgagcagagtgatggtgagcaaggccagaggcaaggacagactgtggagccacaccagagagcccctgaagcaggccctgctgaagaagctgctgggcagcgaggagctgagccaggaggcctgcctggccttcatcgccgtgctgaagtacatgggcgactaccccagcaagagaaccagaagcgtgaacgagctgaccgaccagatcttcgagggccccctgaaggccgagcccctgaaggacgaggcctacgtgcagatcctgaagcagctgaccgacaaccacatcagatacagcgaggagagaggctgggagctgctgtggctgtgcaccggcctgttcccccccagcaacatcctgctgccccacgtgcagagattcctgcagagcagaaagcactgccccctggccatcgactgcctgcagagactgcagaaggccctgagaaacggcagcagaaagtaccccccccacctggtggaggtggaggccatccagcacaagaccacccagatcttccacaaggtgtacttccccgacgacaccgacgaggccttcgaggtggagagcagcaccaaggccaaggacttctgccagaacatcgccaccagactgctgctgaagagcagcgagggcttcagcctgttcgtgaagatcgccgacaaggtgctgagcgtgcccgagaacgacttcttcttcgacttcgtgagacacctgaccgactggatcaagaaggccagacccatcaaggacggcatcgtgcccagcctgacctaccaggtgttcttcatgaagaagctgtggaccaccaccgtgcccggcaaggaccccatggccgacagcatcttccactactaccaggagctgcccaagtacctgagaggctaccacaagtgcaccagagaggaggtgctgcagctgggcgccctgatctacagagtgaagttcgaggaggacaagagctacttccccagcatccccaagctgctgagagagctggtgccccaggacctgatcagacaggtgagccccgacgactggaagagaagcatcgtggcctacttcaacaagcacgccggcaagagcaaggaggaggccaagctggccttcctgaagctgatcttcaagtggcccaccttcggcagcgccttcttcgaggtgaagcagaccaccgagcccaacttccccgagatcctgctgatcgccatcaacaagtacggcgtgagcctgatcgaccccaagaccaaggacatcctgaccacccaccccttcaccaagatcagcaactggagcagcggcaacacctacttccacatcaccatcggcaacctggtgagaggcagcaagctgctgtgcgagaccagcctgggctacaagatggacgacctgctgaccagctacatcagccagatgctgaccgccatgagcaagcagagaggcagcagaagcggcaagtag

SEQ ID NO: 5795 - protein, 504 aa, Artificial Sequence
  derived and/or modified sequence
MRFFCARCCSFGPEMPAVQLLLLACLVWDVGARTAQLRKANDQSGRCQYTFSVASPNESSCPEQSQAMSVIHNLQRDSSTQRLDLEATKARLSSLESLLHQLTLDQAARPQETQEGLQRELGTLRRERDQLETQTRELETAYSNLLRDKSVLEEEKKRLRQENENLARRLESSSQEVARLRRGQCPQTRDTARAVPPGSREVSTWNLDTLAFQELKSELTEVPASRILKESPSGYLRSGEGDTGCGELVWVGEPLTLRTAETITGKYGVWMRDPKPTYPYTQETTWRIDTVGTDVRQVFEYDLISQFMQGYPSKVHILPRPLESTGAVVYSGSLYFQGAESRTVIRYELNTETVKAEKEIPGAGYHGQFPYSWGGYTDIDLAVDEAGLWVIYSTDEAKGAIVLSKLNPENLELEQTWETNIRKQSVANAFIICGTLYTVSSYTSADATVNFAYDTGTGISKTLTIPFKNRYKYSSMIDYNPLEKKLFAWDNLNMVTYDIKLSKM

SEQ ID NO: 5796 - protein, 457 aa, Artificial Sequence
  derived and/or modified sequence
MRFFCARCCSFGPEMPAVQLLLLACLVWDVGARTAQLRKANDQSGRCQYTFSVASPNESSCPEQSQAMSVIHNLQRDSSTQRLDLEATKARLSSLESLLRDKSVLEEEKKRLRQENENLARRLESSSQEVARLRRGQCPQTRDTARAVPPGSREVSTWNLDTLAFQELKSELTEVPASRILKESPSGYLRSGEGDTGCGELVWVGEPLTLRTAETITGKYGVWMRDPKPTYPYTQETTWRIDTVGTDVRQVFEYDLISQFMQGYPSKVHILPRPLESTGAVVYSGSLYFQGAESRTVIRYELNTETVKAEKEIPGAGYHGQFPYSWGGYTDIDLAVDEAGLWVIYSTDEAKGAIVLSKLNPENLELEQTWETNIRKQSVANAFIICGTLYTVSSYTSADATVNFAYDTGTGISKTLTIPFKNRYKYSSMIDYNPLEKKLFAWDNLNMVTYDIKLSKM

SEQ ID NO: 5797 - protein, 437 aa, Artificial Sequence
  derived and/or modified sequence
MSVIHNLQRDSSTQRLDLEATKARLSSLESLLHQLTLDQAARPQETQEGLQRELGTLRRERDQLETQTRELETAYSNLLRDKSVLEEEKKRLRQENENLARRLESSSQEVARLRRGQCPQTRDTARAVPPGSREVSTWNLDTLAFQELKSELTEVPASRILKESPSGYLRSGEGDTGCGELVWVGEPLTLRTAETITGKYGVWMRDPKPTYPYTQETTWRIDTVGTDVRQVFEYDLISQFMQGYPSKVHILPRPLESTGAVVYSGSLYFQGAESRTVIRYELNTETVKAEKEIPGAGYHGQFPYSWGGYTDIDLAVDEAGLWVIYSTDEAKGAIVLSKLNPENLELEQTWETNIRKQSVANAFIICGTLYTVSSYTSADATVNFAYDTGTGISKTLTIPFKNRYKYSSMIDYNPLEKKLFAWDNLNMVTYDIKLSKM

SEQ ID NO: 5798 - protein, 344 aa, Artificial Sequence
  derived and/or modified sequence
MRFFCARCCSFGPEMPAVQLLLLACLVWDVGARTAQLRKANDQSGRCQYTFSVASPNESSCPEQSQAMSVIHNLQRDSSTQRLDLEATKARLSSLESLLHQLTLDQAARPQETQEGLQRELGTLRRERDQLETQTRELETAYSNLLRDKSVLEEEKKRLRQENENLARRLESSSQEVARLRRGQCPQTRDTARAVPPGSREVSTWNLDTLAFQELKSELTEVPASRILKESPSGYLRSGEGDTGCGELVWVGEPLTLRTAETITGKYGVWMRDPKPTYPYTQETTWRIDTVGTDVRQVFEYDLISQFMQGYPSKVHILPRPLESTGAVVYSGSLYFRALSPELS

SEQ ID NO: 5799 - DNA, 1515 bp, Artificial Sequence
  derived and/or modified sequence
atgagattcttctgcgcccggtgttgcagttttggtcccgaaatgccggccgttcagctcctgctgcttgcttgcctggtgtgggatgtgggcgctcggaccgctcagctgcggaaggctaatgatcagtccgggagatgtcagtacacttttagcgtggccagtccaaacgagagctcctgccccgaacaatctcaggccatgtctgtcatacacaatctccagcgcgactcttcaacgcagaggttggacctggaggccaccaaggcccgcctatcaagccttgaaagtctactgcaccagctgacactcgaccaggccgccaggccccaggagacacaggagggtctgcagagagaactgggcacacttcgccgggagcgtgaccagctagaaactcaaacacgcgagttggaaactgcgtattccaatctacttcgcgacaaaagcgtgttggaggaggaaaaaaagaggctacggcaggagaacgagaatctggccagacggttagagagttcgtcccaggaagtcgcaagattgcgcaggggccaatgtcctcaaactcgggatactgcaagggcggtgcctcctgggtcccgcgaggtgagtacctggaatctggacacactcgcctttcaagaactgaagtccgagttaacagaagtgcctgcctcccggattctgaaagagtctccaagcggctatctgagatctggtgagggcgacacaggatgtggggaactggtgtgggttggagagccactgactctgcgtaccgccgaaacaatcactgggaaatacggagtgtggatgcgagaccccaagccgacatacccctacacccaggaaaccacctggaggatagatacagtgggaaccgatgtgcggcaggtcttcgagtatgacctcatcagccagtttatgcaggggtacccgtcaaaggtccacatcctgccgcgccccctagaatcaaccggggctgtggtatactccgggtcactttactttcagggagccgaatcaaggaccgtaattcggtatgagctaaacaccgagacagtcaaggctgagaaggagattcccggagccggatatcatggacagttcccatattcttggggtgggtatacagacatagacttggccgtggatgaggctgggctgtgggtcatctattcaacggacgaggccaaaggagccattgtcctgagcaagctcaaccccgagaacctagaactagaacagacgtgggaaacgaatatccgcaagcagtcggtcgcaaacgcattcataatatgcgggactctttataccgtttccagctatacctcagccgacgccactgtaaactttgcctacgatactggaactgggatcagcaagaccctgaccatcccattcaagaatagatataagtatagttcaatgatagattacaatcccctggaaaagaagctgttcgcttgggacaacttgaacatggtcacatatgacatcaaactcagtaagatgtag

SEQ ID NO: 5800 - DNA, 1374 bp, Artificial Sequence
  derived and/or modified sequence
atgcggttcttttgcgctaggtgttgctccttcgggcctgagatgcccgcggtgcagctattgctcctcgcgtgcctggtgtgggacgtgggagcacggactgcccaattaagaaaagccaacgaccagagcgggaggtgccaatataccttctccgtggcctccccaaatgagtccagctgtccagagcagtctcaagctatgtccgtcatccacaatctgcagcgggactcatccacacagcggctcgatctggaggcaactaaggctaggctgtcctcactggagtctctgctgcgtgacaaatccgtccttgaagaggagaagaagagacttcggcaggagaatgaaaatctggcccgtaggctggaatcttctagccaggaagtagcccgactgcgacgcggacagtgccctcagacaagagacacagctcgcgcagtccccccaggtagcagggaagtcagcacctggaacctagacaccctggctttccaggagttaaaaagcgagttgaccgaggttccagcctctcggattctcaaggaatcgccttctgggtacctgagaagtggggaaggtgatacaggttgcggggagctggtgtgggtcggagaaccactgacacttagaaccgcggaaacgattacaggcaaatacggggtttggatgcgcgacccaaaacctacatacccctacacgcaggagactacttggagaatagacacagtggggaccgacgtgcgtcaggtgtttgaatatgacctgatcagccagtttatgcagggttatccctcaaaagtccacatactgcccagacccctggagagcaccggtgctgtggtatacagtgggagcctctacttccagggggctgagtcgagaactgtaatcaggtatgaactgaacacggagactgtgaaagccgagaaagaaatcccaggcgcgggttatcatggacagtttccctactcttggggaggatacacagatatcgacttagccgtggacgaggcaggactctgggtcatttactctaccgatgaagctaagggcgccatcgtgctcagtaagttgaaccccgaaaaccttgaattggaacagacgtgggaaacaaacattcggaagcaatccgtggcaaacgcgttcattatctgtggtaccctttacaccgtaagttcttatacaagtgcagacgctaccgtgaacttcgcatacgacaccggcacaggaatttctaagaccctcacgatacccttcaagaacaggtacaaatatagctccatgattgattacaaccctttggaaaaaaaattgtttgcttgggataatctcaatatggtcacgtatgacatcaaactcagcaaaatgtag

SEQ ID NO: 5801 - DNA, 1314 bp, Artificial Sequence
  derived and/or modified sequence
atgagtgtgatccacaatttgcagagggattctagcacacaaaggctggacttagaagcgacgaaagcccgattaagtagtctggaatcactgctgcaccagttgaccctggatcaggccgcacggccccaggaaactcaggagggtctccaacgggagctgggaacattgcgtagagagcgcgatcagctcgagacccaaacaagggaactggagaccgcttacagtaacctactgagggacaaatctgtcctggaggaggaaaagaagagactcaggcaggagaacgaaaatctggcgcgccgtcttgagagctcatcccaggaggtcgcacgcctgcgtagaggtcaatgccctcaaacacgggataccgcgagggctgtgcccccaggatccagagaagtttccacatggaatctggatactcttgcattccaggagctgaagtccgagcttacggaggttcccgcaagtcgtatcctgaaggagtctccttccggttatctgagaagcggcgagggggacacagggtgcggtgaactcgtctgggtaggggagcccctgacgctgcgcaccgcagaaaccattaccggaaaatacggagtatggatgcgcgaccctaagccaacatacccttatactcaggaaacaacctggagaattgataccgtcggtaccgacgtcagacaggtgttcgagtacgatcttatatctcagtttatgcaggggtacccttcaaaagtgcacatccttcccagacccttggagtcgaccggggctgtggtatatagtggcagcttgtacttccaaggcgccgaaagccgtactgtgattcggtacgaacttaataccgaaaccgtcaaggcagagaaggagattcccggcgccgggtaccatggtcagttcccttacagctggggaggctatacagatattgatctcgctgtagacgaggccggactttgggtgatatacagcaccgatgaggcaaaaggggccattgtattgagtaagctgaacccagaaaatcttgagctagagcagacgtgggagacaaatatcaggaagcagtccgtggctaacgcctttatcatctgtggcacgctgtataccgtgagtagttatacgtccgcagatgctacagttaacttcgcatatgacacaggcaccggtatctccaaaaccctgactatcccttttaagaatcggtataagtattccagtatgattgactacaaccccctcgagaagaagttgttcgcctgggacaatctgaacatggtaacctacgacattaagctctcaaaaatgtag

SEQ ID NO: 5802 - DNA, 1035 bp, Artificial Sequence
  derived and/or modified sequence
atgaggtttttctgcgcacggtgctgctcctttggcccagagatgccagccgtgcagctgctgctgttagcgtgtcttgtgtgggacgtgggggctcggaccgcgcagctccggaaggcaaacgatcagagcggccggtgtcagtacaccttttcggtcgcctcccctaatgagtcttcgtgccccgaacagtctcaggctatgtcagtgattcacaacttgcagagggactcctctacgcagaggctggatctggaggccaccaaggcccgactgagttcacttgaatctcttctgcaccagctgacgctggatcaggccgcacgcccccaggaaacccaggaagggctgcaacgcgagctcggaaccttgcggagagagagggatcagctggagacacagaccagagaacttgaaaccgcctactcaaaccttctccgagataagagtgtgctcgaggaggagaagaagcgattgcgccaggagaacgagaatctggccagacggttggagtcatcttctcaggaggtggcacggttgaggcgagggcagtgtccgcagacccgtgacactgctagagctgtgccccctgggagcagggaggtaagtacatggaacctcgacactttagcgtttcaggagcttaagagtgaacttacagaggtgcccgcctccagaattctcaaggaatccccgtccggatatctgagaagtggagagggggacaccggctgcggcgagctggtgtgggttggtgagccacttaccttaagaacggctgagacaataacaggcaagtatggcgtgtggatgcgagacccaaaacctacctacccctacacgcaggagacgacttggcgaatagatacggtgggcactgacgtccgccaggtcttcgagtatgacctgatttcccaatttatgcaaggctatccaagcaaggtacacatcctgccccgacccttggagtccaccggcgcagtggtgtacagtggaagtctctatttcagagctctaagtcccgaactctcttag

SEQ ID NO: 5803 - DNA, 1515 bp, Artificial Sequence
  derived and/or modified sequence
atgaggttcttctgtgcccgctgctgcagctttggacctgagatgcctgctgtgcagctgctgctgctggcctgcctggtgtgggatgtgggcgccaggacagcccagctgaggaaggccaatgaccagagcggccgctgccagtacaccttctctgtggccagccccaatgaaagcagctgcccagagcagagccaggccatgtctgtcatccacaacctgcagagggacagcagcacccagaggctggacctggaggccaccaaggcccggctgagcagcctggagagcctgctgcaccagctgaccctggaccaggccgcccggccccaggagacccaggagggcctgcagcgggagctgggcaccctgcggcgggagcgggaccagctggagacccagacccgggagctggagacagcctacagcaacctgctgcgggacaagtctgtgctggaggaggagaagaagaggctgcggcaggagaatgaaaacctggcccggcggctggagagcagcagccaggaggtggcccggctgcggcggggccagtgcccccagacccgggacacagcccgggctgtgcccccaggcagccgggaggtgtccacctggaacctggacaccctggccttccaggagctgaagtctgagctgacagaggtgcctgccagccgcatcctgaaggagagccccagcggctacctgcggagcggggagggggacaccggctgtggggagctggtgtgggtgggggagcccctgaccctgaggacagctgagaccatcaccgggaagtatggagtgtggatgagggaccccaagcccacctacccctacacccaggagaccacctggagaattgacacagtgggcacagatgtgcggcaggtgtttgaatatgacctgatcagccagttcatgcagggctaccccagcaaggtgcacatcctgccccggcccctggagagcactggagctgtggtgtacagcggcagcctgtacttccagggcgctgagagcaggacagtcatccgctatgagctgaacacagaaacagtgaaggccgagaaggagatccctggagctggctaccacggccagttcccctacagctggggcggctacacagacatcgacctggccgtggatgaggccggcctgtgggtgatctacagcacagatgaggccaagggggccatcgtgctgagcaagctgaaccctgagaacctggagctggagcagacctgggagaccaacatcaggaagcagagcgtggccaatgccttcatcatctgtggcaccctgtacacagtgtcctcctacaccagcgcagatgccaccgtgaactttgcctatgacacaggaacaggcatcagcaagaccctgaccatccccttcaagaaccgctacaagtacagctccatgattgactacaaccccctggagaagaagctgtttgcctgggacaacctgaacatggtgacctatgacatcaagctgagcaagatgtag

SEQ ID NO: 5804 - DNA, 1374 bp, Artificial Sequence
  derived and/or modified sequence
atgaggttcttctgtgcccgctgctgcagctttggacctgagatgcctgctgtgcagctgctgctgctggcctgcctggtgtgggatgtgggcgccaggacagcccagctgaggaaggccaatgaccagagcggccgctgccagtacaccttctctgtggccagccccaatgaaagcagctgcccagagcagagccaggccatgtctgtcatccacaacctgcagagggacagcagcacccagaggctggacctggaggccaccaaggcccggctgagcagcctggagagcctgctgcgggacaagtctgtgctggaggaggagaagaagaggctgcggcaggagaatgaaaacctggcccggcggctggagagcagcagccaggaggtggcccggctgcggcggggccagtgcccccagacccgggacacagcccgggctgtgcccccaggcagccgggaggtgtccacctggaacctggacaccctggccttccaggagctgaagtctgagctgacagaggtgcctgccagccgcatcctgaaggagagccccagcggctacctgcggtctggagagggggacaccggctgtggggagctggtgtgggtgggggagcccctgaccctgaggacagctgagaccatcaccgggaagtatggagtgtggatgagggaccccaagcccacctacccctacacccaggagaccacctggagaattgacacagtgggcacagatgtgcggcaggtgtttgaatatgacctgatcagccagttcatgcagggctaccccagcaaggtgcacatcctgccccggcccctggagagcactggagctgtggtgtacagcggcagcctgtacttccagggcgctgagagcaggacagtcatccgctatgagctgaacacagagaccgtgaaggccgagaaggagatccctggggccggctaccacggccagttcccctacagctggggcggctacacagacatcgacctggccgtggatgaagctggcctgtgggtgatctacagcacagatgaggccaagggggccatcgtgctgagcaagctgaaccctgagaacctggagctggagcagacctgggagaccaacatcaggaagcagagcgtggccaatgccttcatcatctgtggcaccctgtacacagtgagcagctacaccagcgcagatgccaccgtgaactttgcctatgacaccggcaccggcatcagcaagaccctgaccatccccttcaagaaccgctacaagtacagctccatgattgactacaaccccctggagaagaagctgtttgcctgggacaacctgaacatggtgacctatgacatcaagctgagcaagatgtag

SEQ ID NO: 5805 - DNA, 1314 bp, Artificial Sequence
  derived and/or modified sequence
atgtctgtcatccacaacctgcagagggacagcagcacccagaggctggacctggaggccaccaaggcccggctgagcagcctggagagcctgctgcaccagctgaccctggaccaggccgcccggccccaggagacccaggagggcctgcagcgggagctgggcaccctgcggcgggagcgggaccagctggagacccagacccgggagctggagacagcctacagcaacctgctgcgggacaagtctgtgctggaggaggagaagaagaggctgcggcaggagaatgaaaacctggcccggcggctggagagcagcagccaggaggtggcccggctgcggcggggccagtgcccccagacccgggacacagcccgggctgtgcccccaggcagccgggaggtgtccacctggaacctggacaccctggccttccaggagctgaagtctgagctgacagaggtgcctgccagccgcatcctgaaggagagccccagcggctacctgcggtctggagagggggacaccggctgtggggagctggtgtgggtgggggagcccctgaccctgaggacagctgagaccatcaccgggaagtatggagtgtggatgagggaccccaagcccacctacccctacacccaggagaccacctggagaattgacacagtgggcacagatgtgcggcaggtgtttgaatatgacctgatcagccagttcatgcagggctaccccagcaaggtgcacatcctgccccggcccctggagagcactggagctgtggtgtacagcggcagcctgtacttccagggcgctgagagcaggacagtcatccgctatgagctgaacacagagaccgtgaaggccgagaaggagatccctggggccggctaccacggccagttcccctacagctggggcggctacacagacatcgacctggccgtggatgaagctggcctgtgggtgatctacagcacagatgaggccaagggggccatcgtgctgagcaagctgaaccctgagaacctggagctggagcagacctgggagaccaacatcaggaagcagagcgtggccaatgccttcatcatctgtggcaccctgtacacagtgagcagctacaccagcgcagatgccaccgtgaactttgcctatgacaccggcaccggcatcagcaagaccctgaccatccccttcaagaaccgctacaagtacagctccatgattgactacaaccccctggagaagaagctgtttgcctgggacaacctgaacatggtgacctatgacatcaagctgagcaagatgtag

SEQ ID NO: 5806 - DNA, 1035 bp, Artificial Sequence
  derived and/or modified sequence
atgaggttcttctgtgcccgctgctgcagctttggacctgagatgcctgctgtgcagctgctgctgctggcctgcctggtgtgggatgtgggcgccaggacagcccagctgaggaaggccaatgaccagagcggccgctgccagtacaccttctctgtggccagccccaatgaaagcagctgcccagagcagagccaggccatgtctgtcatccacaacctgcagagggacagcagcacccagaggctggacctggaggccaccaaggcccggctgagcagcctggagagcctgctgcaccagctgaccctggaccaggccgcccggccccaggagacccaggagggcctgcagcgggagctgggcaccctgcggcgggagcgggaccagctggagacccagacccgggagctggagacagcctacagcaacctgctgcgggacaagtctgtgctggaggaggagaagaagaggctgcggcaggagaatgaaaacctggcccggcggctggagagcagcagccaggaggtggcccggctgcggcggggccagtgcccccagacccgggacacagcccgggctgtgcccccaggcagccgggaggtgtccacctggaacctggacaccctggccttccaggagctgaagtctgagctgacagaggtgcctgccagccgcatcctgaaggagagccccagcggctacctgcggagcggggagggggacaccggctgtggggagctggtgtgggtgggggagcccctgaccctgaggacagctgagaccatcaccgggaagtatggagtgtggatgagggaccccaagcccacctacccctacacccaggagaccacctggagaattgacacagtgggcacagatgtgcggcaggtgtttgaatatgacctgatcagccagttcatgcagggctaccccagcaaggtgcacatcctgccccggcccctggagagcactggagctgtggtgtacagcggcagcctgtacttccgggccctgagccctgagctgtcctag

SEQ ID NO: 5807 - DNA, 2083 bp, Artificial Sequence
  derived and/or modified sequence
catccaggcacctctcagcacagcagagctttccagaggaagcctcaccaagcctctgcaatgaggttcttctgtgcacgttgctgcagctttgggcctgagatgccagctgtccagctgctgcttctggcctgcctggtgtgggatgtgggggccaggacagctcagctcaggaaggccaatgaccagagtggccgatgccagtataccttcagtgtggccagtcccaatgaatccagctgcccagagcagagccaggccatgtcagtcatccataacttacagagagacagcagcacccaacgcttagacctggaggccaccaaagctcgactcagctccctggagagcctcctccaccaattgaccttggaccaggctgccaggccccaggagacccaggaggggctgcagagggagctgggcaccctgaggcgggagcgggaccagctggaaacccaaaccagagagttggagactgcctacagcaacctcctccgagacaagtcagttctggaggaagagaagaagcgactaaggcaagaaaatgagaatctggccaggaggttggaaagcagcagccaggaggtagcaaggctgagaaggggccagtgtccccagacccgagacactgctcgggctgtgccaccaggctccagagaagtttctacgtggaatttggacactttggccttccaggaactgaagtccgagctaactgaagttcctgcttcccgaattttgaaggagagcccatctggctatctcaggagtggagagggagacaccggatgtggagaactagtttgggtaggagagcctctcacgctgagaacagcagaaacaattactggcaagtatggtgtgtggatgcgagaccccaagcccacctacccctacacccaggagaccacgtggagaatcgacacagttggcacggatgtccgccaggtttttgagtatgacctcatcagccagtttatgcagggctacccttctaaggttcacatactgcctaggccactggaaagcacgggtgctgtggtgtactcggggagcctctatttccagggcgctgagtccagaactgtcataagatatgagctgaataccgagacagtgaaggctgagaaggaaatccctggagctggctaccacggacagttcccgtattcttggggtggctacacggacattgacttggctgtggatgaagcaggcctctgggtcatttacagcaccgatgaggccaaaggtgccattgtcctctccaaactgaacccagagaatctggaactcgaacaaacctgggagacaaacatccgtaagcagtcagtcgccaatgccttcatcatctgtggcaccttgtacaccgtcagcagctacacctcagcagatgctaccgtcaactttgcttatgacacaggcacaggtatcagcaagaccctgaccatcccattcaagaaccgctataagtacagcagcatgattgactacaaccccctggagaagaagctctttgcctgggacaacttgaacatggtcacttatgacatcaagctctccaagatgtgaaaagcctccaagctgtacaggcaatggcagaaggagatgctcagggctcctggggggagcaggctgaagggagagccagccagccagggcccaggcagctttgactgctttccaagttttcattaatccagaaggatgaacatggtcaccatctaactattcaggaattgtagtctgagggcgtagacaatttcatataataaatatcctttatcttctgtcagcatttatgggatgtttaatgacatagttcaagttttcttgtgatttggggcaaaagctgtaaggcataatagtttcttcctgaaaaccattgctcttgcatgttacatggttaccacaagccacaataaaaagcataacttctaaaggaagcagaatagctcctctggccagcatcgaatataagtaagatgcatttactacagttggcttctaatgcttcagatagaatacagttgggtctcacataaccctttacattgtgaaataaaattttcttacccaa

SEQ ID NO: 5808 - DNA, 1986 bp, Artificial Sequence
  derived and/or modified sequence
atatataaacctctctggagctcgggcatgagccagcaaggccacccatccaggcacctctcagcacagcagagctttccagaggaagcctcaccaagcctctgcaatgaggttcttctgtgcacgttgctgcagctttgggcctgagatgccagctgtccagctgctgcttctggcctgcctggtgtgggatgtgggggccaggacagctcagctcaggaaggccaatgaccagagtggccgatgccagtataccttcagtgtggccagtcccaatgaatccagctgcccagagcagagccaggccatgtcagtcatccataacttacagagagacagcagcacccaacgcttagacctggaggccaccaaagctcgactcagctccctggagagcctcctccgagacaagtcagttctggaggaagagaagaagcgactaaggcaagaaaatgagaatctggccaggaggttggaaagcagcagccaggaggtagcaaggctgagaaggggccagtgtccccagacccgagacactgctcgggctgtgccaccaggctccagagaagtttctacgtggaatttggacactttggccttccaggaactgaagtccgagctaactgaagttcctgcttcccgaattttgaaggagagcccatctggctatctcaggagtggagagggagacaccggatgtggagaactagtttgggtaggagagcctctcacgctgagaacagcagaaacaattactggcaagtatggtgtgtggatgcgagaccccaagcccacctacccctacacccaggagaccacgtggagaatcgacacagttggcacggatgtccgccaggtttttgagtatgacctcatcagccagtttatgcagggctacccttctaaggttcacatactgcctaggccactggaaagcacgggtgctgtggtgtactcggggagcctctatttccagggcgctgagtccagaactgtcataagatatgagctgaataccgagacagtgaaggctgagaaggaaatccctggagctggctaccacggacagttcccgtattcttggggtggctacacggacattgacttggctgtggatgaagcaggcctctgggtcatttacagcaccgatgaggccaaaggtgccattgtcctctccaaactgaacccagagaatctggaactcgaacaaacctgggagacaaacatccgtaagcagtcagtcgccaatgccttcatcatctgtggcaccttgtacaccgtcagcagctacacctcagcagatgctaccgtcaactttgcttatgacacaggcacaggtatcagcaagaccctgaccatcccattcaagaaccgctataagtacagcagcatgattgactacaaccccctggagaagaagctctttgcctgggacaacttgaacatggtcacttatgacatcaagctctccaagatgtgaaaagcctccaagctgtacaggcaatggcagaaggagatgctcagggctcctggggggagcaggctgaagggagagccagccagccagggcccaggcagctttgactgctttccaagttttcattaatccagaaggatgaacatggtcaccatctaactattcaggaattgtagtctgagggcgtagacaatttcatataataaatatcctttatcttctgtcagcatttatgggatgtttaatgacatagttcaagttttcttgtgatttggggcaaaagctgtaaggcataatagtttcttcctgaaaaccattgctcttgcatgttacatggttaccacaagccacaataaaaagcataacttctaaaggaagcagaatagctcctctggccagcatcgaatataagtaagatgcatttactacagttggcttctaatgcttcagatagaatacagttgggtctcacataaccctttacattgtgaaataaaattttcttaccc

SEQ ID NO: 5809 - DNA, 2081 bp, Artificial Sequence
  derived and/or modified sequence
catccaggcacctctcagcacagcagagctttccagaggaagcctcaccaagcctctgcaatgaggttcttctgtgcacgttgctgcagctttgggcctgagatgccagctgtccagctgctgcttctggcctgcctggtgtgggatgtgggggccaggacagctcagctcaggaaggccaatgaccagagtggccgatgccagtataccttcagtgtggccagtcccaatgaatccagctgcccagagcagagccaggccatgtcagtcatccataacttacagagagacagcagcacccaacgcttagacctggaggccaccaaagctcgactcagctccctggagagcctcctccaccaattgaccttggaccaggctgccaggccccaggagacccaggaggggctgcagagggagctgggcaccctgaggcgggagcgggaccagctggaaacccaaaccagagagttggagactgcctacagcaacctcctccgagacaagtcagttctggaggaagagaagaagcgactaaggcaagaaaatgagaatctggccaggaggttggaaagcagcagccaggaggtagcaaggctgagaaggggccagtgtccccagacccgagacactgctcgggctgtgccaccaggctccagagaagtttctacgtggaatttggacactttggccttccaggaactgaagtccgagctaactgaagttcctgcttcccgaattttgaaggagagcccatctggctatctcaggagtggagagggagacaccggatgtggagaactagtttgggtaggagagcctctcacgctgagaacagcagaaacaattactggcaagtatggtgtgtggatgcgagaccccaagcccacctacccctacacccaggagaccacgtggagaatcgacacagttggcacggatgtccgccaggtttttgagtatgacctcatcagccagtttatgcagggctacccttctaaggttcacatactgcctaggccactggaaagcacgggtgctgtggtgtactcggggagcctctatttccagggcgctgagtccagaactgtcataagatatgagctgaataccgagacagtgaaggctgagaaggaaatccctggagctggctaccacggacagttcccgtattcttggggtggctacacggacattgacttggctgtggatgaagcaggcctctgggtcatttacagcaccgatgaggccaaaggtgccattgtcctctccaaactgaacccagagaatctggaactcgaacaaacctgggagacaaacatccgtaagcagtcagtcgccaatgccttcatcatctgtggcaccttgtacaccgtcagcagctacacctcagcagatgctaccgtcaactttgcttatgacacaggcacaggtatcagcaagaccctgaccatcccattcaagaaccgctataagtacagcagcatgattgactacaaccccctggagaagaagctctttgcctgggacaacttgaacatggtcacttatgacatcaagctctccaagatgtgaaaagcctccaagctgtacaggcaatggcagaaggagatgctcagggctcctggggggagcaggctgaagggagagccagccagccagggcccaggcagctttgactgctttccaagttttcattaatccagaaggatgaacatggtcaccatctaactattcaggaattgtagtctgagggcgtagacaatttcatataataaatatcctttatcttctgtcagcatttatgggatgtttaatgacatagttcaagttttcttgtgatttggggcaaaagctgtaaggcataatagtttcttcctgaaaaccattgctcttgcatgttacatggttaccacaagccacaataaaaagcataacttctaaaggaagcagaatagctcctctggccagcatcgaatataagtaagatgcatttactacagttggcttctaatgcttcagatagaatacagttgggtctcacataaccctttacattgtgaaataaaattttcttaccc

SEQ ID NO: 5810 - DNA, 2042 bp, Artificial Sequence
  derived and/or modified sequence
gaagcctcaccaagcctctgcaatgaggttcttctgtgcacgttgctgcagctttgggcctgagatgccagctgtccagctgctgcttctggcctgcctggtgtgggatgtgggggccaggacagctcagctcaggaaggccaatgaccagagtggccgatgccagtataccttcagtgtggccagtcccaatgaatccagctgcccagagcagagccaggccatgtcagtcatccataacttacagagagacagcagcacccaacgcttagacctggaggccaccaaagctcgactcagctccctggagagcctcctccaccaattgaccttggaccaggctgccaggccccaggagacccaggaggggctgcagagggagctgggcaccctgaggcgggagcgggaccagctggaaacccaaaccagagagttggagactgcctacagcaacctcctccgagacaagtcagttctggaggaagagaagaagcgactaaggcaagaaaatgagaatctggccaggaggttggaaagcagcagccaggaggtagcaaggctgagaaggggccagtgtccccagacccgagacactgctcgggctgtgccaccaggctccagagaagtttctacgtggaatttggacactttggccttccaggaactgaagtccgagctaactgaagttcctgcttcccgaattttgaaggagagcccatctggctatctcaggagtggagagggagacaccggatgtggagaactagtttgggtaggagagcctctcacgctgagaacagcagaaacaattactggcaagtatggtgtgtggatgcgagaccccaagcccacctacccctacacccaggagaccacgtggagaatcgacacagttggcacggatgtccgccaggtttttgagtatgacctcatcagccagtttatgcagggctacccttctaaggttcacatactgcctaggccactggaaagcacgggtgctgtggtgtactcggggagcctctatttcagggcgctgagtccagaactgtcataagatatgagctgaataccgagacagtgaaggctgagaaggaaatccctggagctggctaccacggacagttcccgtattcttggggtggctacacggacattgacttggctgtggatgaagcaggcctctgggtcatttacagcaccgatgaggccaaaggtgccattgtcctctccaaactgaacccagagaatctggaactcgaacaaacctgggagacaaacatccgtaagcagtcagtcgccaatgccttcatcatctgtggcaccttgtacaccgtcagcagctacacctcagcagatgctaccgtcaactttgcttatgacacaggcacaggtatcagcaagaccctgaccatcccattcaagaaccgctataagtacagcagcatgattgactacaaccccctggagaagaagctctttgcctgggacaacttgaacatggtcacttatgacatcaagctctccaagatgtgaaaagcctccaagctgtacaggcaatggcagaaggagatgctcagggctcctggggggagcaggctgaagggagagccagccagccagggcccaggcagctttgactgctttccaagttttcattaatccagaaggatgaacatggtcaccatctaactattcaggaattgtagtctgagggcgtagacaatttcatataataaatatcctttatcttctgtcagcatttatgggatgtttaatgacatagttcaagttttcttgtgatttggggcaaaagctgtaaggcataatagtttcttcctgaaaaccattgctcttgcatgttacatggttaccacaagccacaataaaaagcataacttctaaaggaagcagaatagctcctctggccagcatcgaatataagtaagatgcatttactacagttggcttctaatgcttcagatagaatacagttgggtctcacataaccctttacattgtgaaataaaattttcttaccc

SEQ ID NO: 5811 - DNA, 1515 bp, Artificial Sequence
  derived and/or modified sequence
atgcggttcttctgcgcccggtgctgcagcttcggccccgagatgcctgccgtccaattgctcctgctggcctgtctcgtgtgggacgttggcgcccgtactgcgcagctacggaaagccaatgatcagagcgggcggtgtcagtatacatttagtgtggcctcgccaaacgaaagctcatgccccgagcaatctcaggccatgtcagtgattcacaatctgcagagagattcgtccacgcaaagactggacctcgaggctaccaaggctcggctttcgagcctcgaatccttactgcatcagctcactctggatcaggccgcccgtcctcaagagacccaggaggggctccaaagagaactcggcaccctccgccgggaaagggatcagctagaaacccagactcgagagcttgaaactgcctattctaaccttctgcgcgacaagagtgtactcgaggaggagaagaaaagactgcgtcaggagaatgaaaatctcgccaggaggcttgagtcttcaagtcaggaggttgctcggcttaggcggggacagtgccctcaaacacgcgatacggcgcgggctgtaccaccaggatctcgtgaagtgtcgacctggaacctggacacgctcgcgttccaggaactgaagagcgaactgaccgaggtcccggcttcgcgaatcctcaaggagagtccatccgggtatctgcgcagcggggaaggagacacaggctgtggggaactcgtatgggtgggtgagcccctgaccctccggaccgcagaaacaatcaccggcaagtacggcgtctggatgcgcgaccccaagccaacctacccatacactcaggaaactacctggcgaatcgatacagtaggcacagatgtgagacaggtgtttgaatacgacttgatttctcagtttatgcagggctaccccagtaaagtgcatattctgccgagacctttagaaagtaccggcgccgttgtttatagtggcagcctctactttcagggcgctgagtcacggacagttattagatatgaattgaataccgaaactgttaaagccgaaaaagagattcctggagctggctatcatggccagtttccctattcatggggcggctacactgacatcgacctcgccgtggacgaagccggactctgggtcatatattccaccgatgaggctaagggcgccattgtgctttccaagttaaatcctgagaatcttgaactggaacaaacttgggagaccaacatccgcaaacagtccgtggccaacgcattcataatttgcggcacactgtacaccgtgtccagctatacctccgcagatgccactgtcaacttcgcttatgacaccggcacaggcatttctaaaacacttacaatccctttcaagaataggtataaatacagcagcatgatcgattacaaccctctggagaaaaaactgtttgcttgggataacctcaatatggtgacttacgacatcaaactgagcaagatgtag

SEQ ID NO: 5812 - DNA, 1374 bp, Artificial Sequence
  derived and/or modified sequence
atgcggttcttctgcgcccggtgctgcagcttcggccccgagatgcccgcggtccagctcctactgctggcatgtctcgtgtgggacgttggcgcgaggacagcacagctgcggaaggctaacgatcagtcaggcaggtgtcaatatactttttctgtagcatctccaaacgaaagctcgtgcccggaacaatcacaggcaatgtctgtcatacataatctccaaagagatagttcgacccaacggctggacctggaggctaccaaggcccgcctgagttctttggagtcacttttgagggataagagtgtactagaagaggaaaaaaaacggttacggcaggagaacgaaaatctggctcgaaggctggaatctagtagccaggaagtggccaggctgcgcagaggacagtgccctcagacacgggacacagcaagagcggtacctccaggcagcagggaagtaagcacctggaatctggatacacttgccttccaggagctaaaaagtgagctaacagaggtgcccgcttcacgaatcctcaaggaatcccccagtggttatcttcgcagcggggagggtgatacaggatgtggtgagctcgtgtgggttggggagcccctaacactgaggacggccgaaacaataactgggaagtatggggtgtggatgagggaccccaagccgacctatccctatacccaagagacaacctggcgtatagatacagtggggactgacgtgagacaggtatttgagtacgacctgatctctcagtttatgcaggggtatccctccaaggtccatatcctgcctaggccattagaatcaactggcgcggtggtttattctggcagcctgtactttcagggcgctgagagtagaactgttatacgctacgagctcaacactgaaactgtaaaagctgagaaggagattcccggcgccgggtaccacggccagtttccctactcatggggcggctacactgatatcgacctcgccgtggacgaggccggcctctgggtgatctactccaccgacgaagcaaaaggcgctatcgtgctgagcaagctgaatccagaaaacttagaactcgagcagacgtgggagacaaatatacgaaagcagagcgtcgccaatgcctttattatttgtggaaccctgtacaccgtgtccagctatacctctgccgacgctaccgtgaatttcgcttatgatacaggaactggcatatccaagaccctgacgatcccattcaagaataggtacaagtattccagcatgatcgactacaatccgctcgagaaaaaactgttcgcctgggacaatctcaatatggtgacctacgatatcaaactttccaaaatgtag

SEQ ID NO: 5813 - DNA, 1314 bp, Artificial Sequence
  derived and/or modified sequence
atgagcgtgatccacaacctgcagcgggacagcagcacccagcggttagacttggaagctaccaaggctagactgagcagtttagagagtctgcttcaccaactgacacttgatcaggctgcccgaccccaggaaactcaggagggcctgcagagggaattgggaacactgaggagagaacgcgatcagttagagacgcagacccgagagctggagaccgcctactctaatcttttgcgtgataaaagcgtactcgaggaagagaaaaagcgcctgagacaggagaacgagaatctagcgcggcgactcgagtcatcaagccaagaggtggctcgactcagacgcggccaatgtccacagactcgcgatacagccagagctgtgcctccgggtagtcgggaggtgtctacttggaacttggatacactggcatttcaggagctgaaaagtgaattaacggaggtaccggccagccgcattcttaaagaatccccctctggctatctccgaagcggggagggtgatacggggtgcggcgaacttgtgtgggtgggagagcccttgactctccgcaccgctgaaacaatcactggcaagtatggcgtctggatgcgcgaccctaagccaacctatccttacacccaggagactacatggcggatcgataccgttgggacagacgtaagacaagttttcgagtatgacctcattagtcagttcatgcaggggtaccccagcaaggtacacattctaccccgccctctcgagtctaccggggcagtggtgtatagcggctctctgtactttcagggcgcagagagtcgtaccgtgatccggtacgagctgaatactgagaccgtcaaggctgagaaggaaatccccggtgctgggtaccacggacagttcccatattcatggggaggctacacagatattgacctggcagtggatgaggccggcctctgggttatttacagcactgacgaggccaagggggccatcgtgctgtcaaagttgaatcccgaaaatttagaattggaacaaacctgggagacaaacatcaggaagcagagtgtggcaaacgcatttatcatctgcggcacactgtataccgtctcctcttacacatccgccgatgctacagttaactttgcatatgatacaggaacgggcatctctaagaccttaactattccatttaaaaaccgttataaatatagctcgatgatcgattacaaccctcttgagaagaagctattcgcttgggataatctgaacatggtcacttacgacatcaaactgagtaaaatgtag

SEQ ID NO: 5814 - DNA, 1035 bp, Artificial Sequence
  derived and/or modified sequence
atgcggttcttctgcgcccggtgctgcagcttcggccccgagatgcctgccgtgcagctcctgctgctcgcttgcctagtgtgggacgttggcgcccgaactgcccaattacggaaggcaaacgaccaatccggacggtgccagtacaccttcagcgtcgcttcccccaacgagtcaagctgtcctgaacagtcgcaagctatgagtgtcatccataacttgcagagggactcttcgactcagaggctggatttagaggcaactaaagcccgcttatcttccctggaaagcctcctgcatcagctaaccctggaccaggcagcccggccccaggaaacccaggagggccttcagagggaactggggaccctgcggcgtgagcgcgaccagttagaaacccagactcgagagctggagacagcctactcgaacctcctaagggacaagtctgtcctcgaagaagagaaaaaaagactgcgtcaggaaaacgagaatctcgcccggagactggagtcctcctctcaagaggtcgccaggctgagaagaggacaatgcccccagacccgggacacggctagggcagttcctccggggagccgcgaagtgagcacctggaacttggatactcttgcttttcaggaactgaagtcagagttgaccgaagtgccagcaagtcgcattttgaaggaatctcctagtgggtatctgaggtccggagaaggtgatacggggtgcggcgaacttgtgtgggtcggcgaacccctgacactgcggactgctgaaaccattactggtaagtacggcgtgtggatgagagacccaaaacccacttacccctatactcaggagacaacctggaggatcgataccgtggggacagacgttaggcaggttttcgagtacgaccttatctcacagttcatgcaggggtatcccagcaaggtgcacattctccccaggcccttggagtccaccggcgctgttgtgtatagtgggtccctttatttccgcgctcttagtccagaacttagctag

SEQ ID NO: 5815 - DNA, 1515 bp, Artificial Sequence
  derived and/or modified sequence
atgaggttcttctgcgctcggtgttgtagcttcggacccgagatgccagccgtgcagctgctcttactggcatgtctggtctgggatgtaggtgcgaggacggcacaacttcggaaagcaaatgaccagagcggacgttgtcagtacacctttagtgtggcctcccccaacgagagcagctgcccggagcaaagccaagccatgtcggtaatccacaacctccagcgggactcttcgacccaaagactggatctagaagccacgaaagctaggctgagctcactggagtcccttttacaccaactaacactggaccaggccgctcggccacaggaaacacaggaagggcttcaaagagagctcgggacattgcgcagagagagagaccaactcgaaactcagacccgagagctggaaaccgcctactctaatctgctcagggacaaatccgttctcgaggaggagaagaaaaggctcaggcaggaaaacgagaacctggctcggagacttgagagtagttctcaggaggttgcgcgactgcgtagagggcaatgtcctcagactcgtgacaccgctcgcgcagttcctcccggttccagggaggtgtccacctggaacctcgacacgctcgccttccaggaactgaaatccgagcttactgaggtccccgcatcacggattctcaaagagagtccctctggctacctgagaagtggggagggtgataccggatgtggtgagctggtctgggtcggagagcctctcaccctgaggactgccgaaactattaccggcaaatacggggtttggatgcgcgaccccaagccaacgtatccttacacccaggagacaacttggcggatcgatacggtaggcacagacgtccggcaggtgtttgagtacgatcttattagtcagttcatgcaggggtacccatcaaaggtgcacatccttccaaggcctctcgaaagcactggcgctgtagtctactccggctctctttattttcaaggtgccgagagccgcacagtgatcagatacgaactgaataccgagaccgtcaaagccgagaaggaaattcctggggctggctaccacggtcagttcccatattcctggggaggctatacagacatcgacttggctgtcgatgaggcaggactttgggtgatttattctacagacgaagccaaaggcgctatcgtactcagcaaactgaatcctgaaaatcttgagctggaacaaacgtgggaaaccaacatccggaagcagagtgtcgccaatgcgtttataatttgcggaaccctgtataccgtttcttcttacacgagtgccgatgcaacagttaactttgcatatgatactggcacggggatttccaagaccttgacgatcccattcaagaatcgctacaaatatagttccatgatcgactacaatccattggagaaaaagctttttgcatgggacaatctgaatatggtcacttatgacataaaactctccaagatgtag

SEQ ID NO: 5816 - DNA, 1374 bp, Artificial Sequence
  derived and/or modified sequence
atgagattcttctgtgcaagatgctgcagctttggtccagagatgcccgctgtacagctgctgttgctggcctgcttagtatgggatgtcggcgcacggacagctcagctgcgcaaagccaacgatcagagcggaagatgtcagtacactttcagtgtggcgtccccgaacgaatcatcttgccctgaacagagtcaggctatgtcagtcattcataaccttcagagagactcctcaacacagcgcctcgacctggaagccactaaagcacgcctttccagcctcgagagtctgctaagagacaaatctgtgcttgaggaagagaagaagcggctacggcaagaaaatgaaaatcttgcccgacggctcgaaagcagttcccaagaggtggcccgtctcaggagaggtcagtgcccccagactagggacaccgcaagagcggtcccaccagggtccagggaggtctccacgtggaatctcgacaccttggcctttcaggagttgaagagcgaactgacagaggtccccgcaagccgcattttgaaagaatccccttccggctatttaaggagtggcgaaggcgatacaggctgtggcgagcttgtgtgggtgggcgagcccctaactcttaggacggctgagactataactggtaaatacggggtttggatgagagacccaaagcctacctatccatacacgcaggaaacaacgtggcgaatcgataccgtcgggacggacgtaagacaagtgtttgaatacgacctgatctcgcagttcatgcaggggtacccgtctaaggtgcacattcttcccagaccactcgaatcgaccggtgccgtggtgtatagcggttccttatacttccagggggctgaaagtcgaacagtgattcgctatgagctaaacactgagaccgtaaaggcagaaaaggagattcctggggctggctaccatggccagtttccgtatagttggggcggatatacagatatcgacctggctgttgacgaagctggtttgtgggtaatctatagcacagacgaggccaagggcgctatcgtccttagcaaactgaatcctgagaatcttgagctggaacagacctgggaaaccaacatccgcaagcagtcagtcgccaacgctttcattatttgtggaaccctgtatactgtctcaagctacacttctgctgatgccactgtcaattttgcttatgacaccggcaccggcatctccaagacattgaccatcccctttaagaatcgctataagtattcgtctatgatcgattacaatcctcttgaaaagaaactgttcgcctgggataacctaaatatggtgacttacgacatcaaattaagcaagatgtag

SEQ ID NO: 5817 - DNA, 1314 bp, Artificial Sequence
  derived and/or modified sequence
atgtccgttatccacaaccttcagcgcgatagcagtactcaacgcctcgacctcgaagcgaccaaggcaaggctcagctctctggagagtctgctccatcaattgacattagatcaagctgccaggccacaggaaacccaggaaggcctgcagagggaactgggcacattgcgccgtgagcgtgatcagttagagactcagactagagagttagagaccgcctactccaatctgctgcgcgacaaaagcgtactggaggaggagaaaaagagactgaggcaggaaaatgaaaacctggccagacgactggagtcctcctcacaggaggtggcgagactgcggcgagggcagtgtccacagacaagagatactgctcgggctgtccctcctggcagccgtgaggtgtccacctggaatttggataccttagcgttccaggagttgaaatcagagctcacagaggtccccgcttctaggatccttaaagagagtcctagtggatacttacgatccggtgaaggggacactggctgtggcgagctggtgtgggtcggcgagccactgactctgcgcacggccgagacaatcacaggcaaatatggggtctggatgcgggatcctaaacctacctatccctatactcaggagaccacttggcgcattgataccgtggggacagacgtgagacaagtatttgagtacgaccttatctcacagttcatgcaggggtacccatcaaaggtacacatcctaccccgaccgttagaaagtactggagcagtggtttactcggggtctctttatttccagggggcagagtcccgcacggtcattagatacgaactgaatacagaaacagtgaaggcggagaaagagattcctggagcaggttaccacggacagttcccttattcctggggaggttacaccgacattgacctggccgtcgatgaggctggtctttgggtcatctacagcacggacgaagctaagggcgctatcgtgctgagcaaactgaaccccgagaatttagagctggaacagacttgggaaactaatatccggaagcagtcggtggccaacgcgttcatcatctgcggaactctctacactgtaagctcgtacacatccgcagacgctacggtgaatttcgcttacgacacagggaccgggatcagcaaaacactaaccatcccattcaagaatcggtataagtactctagtatgatagattacaaccccttagaaaagaagctattcgcctgggacaaccttaatatggttacctatgacattaagcttagcaagatgtag

SEQ ID NO: 5818 - DNA, 1035 bp, Artificial Sequence
  derived and/or modified sequence
atgcggtttttctgtgctcgctgttgcagcttcgggccagaaatgcctgctgtgcagctgctgctgctggcttgcctggtgtgggacgtgggggctcgcactgcccagctgcgaaaagccaacgatcagtcggggcgttgccagtatacctttagtgtggcatcccccaatgagagcagctgtcctgaacagtcacaggctatgagcgttatccacaatttgcaaagagactctagtacccagagactggatctagaggcaacaaaggcacggctgagtagtcttgaatcactgttgcatcagctgaccctggatcaagccgctaggcctcaagagacacaggaaggacttcagagggagctggggaccttgcgacgcgagagggaccagctggagacccaaaccagggagcttgagaccgcatacagcaacctcctccgcgataagtcagtcttggaggaggaaaagaagcgcctgcgacaggagaatgagaatctcgctcgtcggctggagtcaagctcgcaggaagtggcgcgactcagacggggacagtgccctcaaactagggatactgctcgcgctgtcccgccaggctcccgagaggtgagtacatggaacctggatactctggcgtttcaagagctgaagagtgagctgaccgaggttccagcgagccgaattctcaaggagtccccatccggctacttgagatcaggcgagggcgataccggctgcggggaacttgtctgggtgggagagcctctgaccttaaggaccgccgagacaatcaccgggaaatacggcgtgtggatgagggaccctaagccgacgtatccctatacccaggagacgacctggcgcatcgatactgtgggaacagacgtacgccaggtcttcgagtacgacctgatttcgcagttcatgcagggctacccaagcaaagtgcacatcttaccaagacccctagagtccaccggcgctgtggtctacagcggatctctgtattttcgagcgttgtctccagaactgtcctag

SEQ ID NO: 5819 - DNA, 1515 bp, Artificial Sequence
  derived and/or modified sequence
atgcggttcttctgcgcccggtgctgctcatttggccctgaaatgcccgcagtacagctcttgctgctcgcatgcctcgtgtgggacgtgggtgcaagaacagcccaactacgtaaagccaacgaccagagcgggcgatgtcaatataccttttctgttgctagtcccaatgaatcatcctgccctgagcagtcccaggctatgtccgtgatccacaatctccaacgggacagtagtacacagcgtctggacttggaagccacaaaagcgagactgtccagcctagagagcctgctgcatcaactcactctggatcaggcagctagaccccaagaaacccaggaagggctgcagcgggagcttgggaccctccggagagagcgagaccagctggagacacagactcgcgagcttgagaccgcctacagcaacctgttgagagataaatcagtacttgaggaggagaagaagaggttgcgccaagaaaatgaaaacctggcacgcaggttggagagctcttctcaggaggtagcccggctcagacgcggccaatgcccccaaaccagggataccgcaagagctgtgcctccaggatctagggaagtgtcgacgtggaatttggatacgctggctttccaggagctgaagtcagaacttacagaagtgcccgcaagccgaatccttaaggaatcgccttcgggttacttacgctctggcgagggcgacactggctgtggggaacttgtgtgggtgggtgagccattgactctgcggaccgctgagaccattacaggcaaatatggtgtctggatgagagacccaaaacctacctacccttacacacaggaaacaacttggcgaatagacactgttggcaccgacgtcagacaggtgttcgaatacgacctcatcagccagttcatgcagggttatccaagcaaggtgcatatactgccaagaccactcgaatcaacaggagcggtcgtgtatagtggtagtctctactttcaaggtgctgagagccggaccgtgatccgctatgagttgaacacagaaaccgtgaaggccgagaaagaaatccctggagccggatatcatggtcagttcccatattcctgggggggttacaccgatattgacttagctgtggacgaagccggcctgtgggttatttactcaaccgatgaggctaaaggcgctatagtgctgtctaaactgaacccggaaaacctagagctcgaacagacttgggaaacaaacatccgtaagcaaagcgtggcaaatgcgtttataatttgcggaactctgtacaccgtatcaagttatacctccgccgacgcaaccgtgaattttgcttacgacaccggcactgggataagtaagaccttgaccatcccattcaagaacaggtacaagtactccagcatgatcgactacaaccccctcgaaaaaaaactgtttgcatgggacaacctgaacatggtgacgtatgatataaaactctccaagatgtag

SEQ ID NO: 5820 - DNA, 1515 bp, Artificial Sequence
  derived and/or modified sequence
atgcggttcttctgcgcacgctgttgttcctttggccccgagatgcccgctgtacaactccttctcctcgcttgtctcgtatgggatgttggagccaggacggcacaattgagaaaagccaacgaccagagtgggcgatgtcaatataccttcagtgtggcaagcccaaatgagtcctcttgccctgagcagtcacaggccatgagcgtgatccacaacctgcagcgagattcgtctacacagcgtctcgacctggaagccacaaaggcccgcctgtcttctcttgaatctctgctccatcagctaacactggatcaggctgctagaccccaggaaactcaggaggggctacagagagagcttggcacgttgcgcagagaaagggaccagctagagacccagaccagagagctggaaaccgcatactccaatttgctgcgtgataagagtgtgctggaggaggaaaagaaacgattaaggcaagaaaacgaaaacttagcccgtcggctcgagagcagcagccaagaagttgcaagacttagaagaggtcaatgcccacagacacgcgatactgccagagcagtgccaccaggcagtcgcgaagtgagcacatggaaccttgacacactagcgtttcaggaactcaaaagcgagctgaccgaagtcccggcatctagaatcctgaaggagtcaccaagcggctacctcaggagtggtgagggggataccggatgcggagaactggtctgggtgggagaaccactaacactgaggaccgcagagactatcactggcaagtacggagtgtggatgagggacccaaagccgacctacccctacacacaggaaactacatggcgaatcgacacagtgggaaccgatgtacggcaggtatttgaatatgatctcatctcacagtttatgcagggttatccttctaaagtccacattttgcctcggcctttggaaagtactggcgccgtggtatactccggaagtctttattttcagggggcagaatccagaacagtcattcgttacgagctgaacactgagacagttaaggcggagaaggagattccaggcgcaggttatcacggacaatttccttacagttggggtggctacactgatattgacttagcggtcgacgaagcgggtctttgggtgatttatagcaccgatgaagcaaagggtgctatagttttatcaaaacttaatcccgagaatctggaactggaacaaacgtgggaaacaaacatcagaaagcagtctgtggccaatgcattcataatctgcggaaccttgtacacagttagctcctacaccagcgcagatgcaactgtgaatttcgcatacgacactggcaccggaatttctaagacgctgaccatcccctttaaaaatagatacaagtactcttcaatgatcgactataatccattagagaagaagcttttcgcctgggataatctcaacatggttacttacgatatcaagctttctaagatgtag

SEQ ID NO: 5821 - DNA, 1515 bp, Artificial Sequence
  derived and/or modified sequence
atgagattcttctgcgccagatgctgcagcttcggccccgagatgcccgccgtgcagctgctgctgctggcctgcctggtgtgggacgtgggcgccagaaccgcccagctgagaaaggccaacgaccagagcggcagatgccagtacaccttcagcgtggccagccccaacgagagcagctgccccgagcagagccaggccatgagcgtgatccacaacctgcagagagacagcagcacccagagactggacctggaggccaccaaggccagactgagcagcctggagagcctgctgcaccagctgaccctggaccaggccgccagaccccaggagacccaggagggcctgcagagagagctgggcaccctgagaagagagagagaccagctggagacccagaccagagagctggagaccgcctacagcaacctgctgagagacaagagcgtgctggaggaggagaagaagagactgagacaggagaacgagaacctggccagaagactggagagcagcagccaggaggtggccagactgagaagaggccagtgcccccagaccagagacaccgccagagccgtgccccccggcagcagagaggtgagcacctggaacctggacaccctggccttccaggagctgaagagcgagctgaccgaggtgcccgccagcagaatcctgaaggagagccccagcggctacctgagaagcggcgagggcgacaccggctgcggcgagctggtgtgggtgggcgagcccctgaccctgagaaccgccgagaccatcaccggcaagtacggcgtgtggatgagagaccccaagcccacctacccctacacccaggagaccacctggagaatcgacaccgtgggcaccgacgtgagacaggtgttcgagtacgacctgatcagccagttcatgcagggctaccccagcaaggtgcacatcctgcccagacccctggagagcaccggcgccgtggtgtacagcggcagcctgtacttccagggcgccgagagcagaaccgtgatcagatacgagctgaacaccgagaccgtgaaggccgagaaggagatccccggcgccggctaccacggccagttcccctacagctggggcggctacaccgacatcgacctggccgtggacgaggccggcctgtgggtgatctacagcaccgacgaggccaagggcgccatcgtgctgagcaagctgaaccccgagaacctggagctggagcagacctgggagaccaacatcagaaagcagagcgtggccaacgccttcatcatctgcggcaccctgtacaccgtgagcagctacaccagcgccgacgccaccgtgaacttcgcctacgacaccggcaccggcatcagcaagaccctgaccatccccttcaagaacagatacaagtacagcagcatgatcgactacaaccccctggagaagaagctgttcgcctgggacaacctgaacatggtgacctacgacatcaagctgagcaagatgtag

SEQ ID NO: 5822 - DNA, 1374 bp, Artificial Sequence
  derived and/or modified sequence
atgagattcttctgcgccagatgctgcagcttcggccccgagatgcccgccgtgcagctgctgctgctggcctgcctggtgtgggacgtgggcgccagaaccgcccagctgagaaaggccaacgaccagagcggcagatgccagtacaccttcagcgtggccagccccaacgagagcagctgccccgagcagagccaggccatgagcgtgatccacaacctgcagagagacagcagcacccagagactggacctggaggccaccaaggccagactgagcagcctggagagcctgctgagagacaagagcgtgctggaggaggagaagaagagactgagacaggagaacgagaacctggccagaagactggagagcagcagccaggaggtggccagactgagaagaggccagtgcccccagaccagagacaccgccagagccgtgccccccggcagcagagaggtgagcacctggaacctggacaccctggccttccaggagctgaagagcgagctgaccgaggtgcccgccagcagaatcctgaaggagagccccagcggctacctgagaagcggcgagggcgacaccggctgcggcgagctggtgtgggtgggcgagcccctgaccctgagaaccgccgagaccatcaccggcaagtacggcgtgtggatgagagaccccaagcccacctacccctacacccaggagaccacctggagaatcgacaccgtgggcaccgacgtgagacaggtgttcgagtacgacctgatcagccagttcatgcagggctaccccagcaaggtgcacatcctgcccagacccctggagagcaccggcgccgtggtgtacagcggcagcctgtacttccagggcgccgagagcagaaccgtgatcagatacgagctgaacaccgagaccgtgaaggccgagaaggagatccccggcgccggctaccacggccagttcccctacagctggggcggctacaccgacatcgacctggccgtggacgaggccggcctgtgggtgatctacagcaccgacgaggccaagggcgccatcgtgctgagcaagctgaaccccgagaacctggagctggagcagacctgggagaccaacatcagaaagcagagcgtggccaacgccttcatcatctgcggcaccctgtacaccgtgagcagctacaccagcgccgacgccaccgtgaacttcgcctacgacaccggcaccggcatcagcaagaccctgaccatccccttcaagaacagatacaagtacagcagcatgatcgactacaaccccctggagaagaagctgttcgcctgggacaacctgaacatggtgacctacgacatcaagctgagcaagatgtag

SEQ ID NO: 5823 - DNA, 1314 bp, Artificial Sequence
  derived and/or modified sequence
atgagcgtgatccacaacctgcagagagacagcagcacccagagactggacctggaggccaccaaggccagactgagcagcctggagagcctgctgcaccagctgaccctggaccaggccgccagaccccaggagacccaggagggcctgcagagagagctgggcaccctgagaagagagagagaccagctggagacccagaccagagagctggagaccgcctacagcaacctgctgagagacaagagcgtgctggaggaggagaagaagagactgagacaggagaacgagaacctggccagaagactggagagcagcagccaggaggtggccagactgagaagaggccagtgcccccagaccagagacaccgccagagccgtgccccccggcagcagagaggtgagcacctggaacctggacaccctggccttccaggagctgaagagcgagctgaccgaggtgcccgccagcagaatcctgaaggagagccccagcggctacctgagaagcggcgagggcgacaccggctgcggcgagctggtgtgggtgggcgagcccctgaccctgagaaccgccgagaccatcaccggcaagtacggcgtgtggatgagagaccccaagcccacctacccctacacccaggagaccacctggagaatcgacaccgtgggcaccgacgtgagacaggtgttcgagtacgacctgatcagccagttcatgcagggctaccccagcaaggtgcacatcctgcccagacccctggagagcaccggcgccgtggtgtacagcggcagcctgtacttccagggcgccgagagcagaaccgtgatcagatacgagctgaacaccgagaccgtgaaggccgagaaggagatccccggcgccggctaccacggccagttcccctacagctggggcggctacaccgacatcgacctggccgtggacgaggccggcctgtgggtgatctacagcaccgacgaggccaagggcgccatcgtgctgagcaagctgaaccccgagaacctggagctggagcagacctgggagaccaacatcagaaagcagagcgtggccaacgccttcatcatctgcggcaccctgtacaccgtgagcagctacaccagcgccgacgccaccgtgaacttcgcctacgacaccggcaccggcatcagcaagaccctgaccatccccttcaagaacagatacaagtacagcagcatgatcgactacaaccccctggagaagaagctgttcgcctgggacaacctgaacatggtgacctacgacatcaagctgagcaagatgtag

SEQ ID NO: 5824 - DNA, 1035 bp, Artificial Sequence
  derived and/or modified sequence
atgagattcttctgcgccagatgctgcagcttcggccccgagatgcccgccgtgcagctgctgctgctggcctgcctggtgtgggacgtgggcgccagaaccgcccagctgagaaaggccaacgaccagagcggcagatgccagtacaccttcagcgtggccagccccaacgagagcagctgccccgagcagagccaggccatgagcgtgatccacaacctgcagagagacagcagcacccagagactggacctggaggccaccaaggccagactgagcagcctggagagcctgctgcaccagctgaccctggaccaggccgccagaccccaggagacccaggagggcctgcagagagagctgggcaccctgagaagagagagagaccagctggagacccagaccagagagctggagaccgcctacagcaacctgctgagagacaagagcgtgctggaggaggagaagaagagactgagacaggagaacgagaacctggccagaagactggagagcagcagccaggaggtggccagactgagaagaggccagtgcccccagaccagagacaccgccagagccgtgccccccggcagcagagaggtgagcacctggaacctggacaccctggccttccaggagctgaagagcgagctgaccgaggtgcccgccagcagaatcctgaaggagagccccagcggctacctgagaagcggcgagggcgacaccggctgcggcgagctggtgtgggtgggcgagcccctgaccctgagaaccgccgagaccatcaccggcaagtacggcgtgtggatgagagaccccaagcccacctacccctacacccaggagaccacctggagaatcgacaccgtgggcaccgacgtgagacaggtgttcgagtacgacctgatcagccagttcatgcagggctaccccagcaaggtgcacatcctgcccagacccctggagagcaccggcgccgtggtgtacagcggcagcctgtacttcagagccctgagccccgagctgagctag

SEQ ID NO: 5825 - protein, 743 aa, Artificial Sequence
  derived and/or modified sequence
MEAVAVAAAVGVLLLAGAGGAAGDEAREAAAVRALVARLLGPGPAADFSVSVERALAAKPGLDTYSLGGGGAARVRVRGSTGVAAAAGLHRYLRDFCGCHVAWSGSQLRLPRPLPAVPGELTEATPNRYRYYQNVCTQSYSFVWWDWARWEREIDWMALNGINLALAWSGQEAIWQRVYLALGLTQAEINEFFTGPAFLAWGRMGNLHTWDGPLPPSWHIKQLYLQHRVLDQMRSFGMTPVLPAFAGHVPEAVTRVFPQVNVTKMGSWGHFNCSYSCSFLLAPEDPIFPIIGSLFLRELIKEFGTDHIYGADTFNEMQPPSSEPSYLAAATTAVYEAMTAVDTEAVWLLQGWLFQHQPQFWGPAQIRAVLGAVPRGRLLVLDLFAESQPVYTRTASFQGQPFIWCMLHNFGGNHGLFGALEAVNGGPEAARLFPNSTMVGTGMAPEGISQNEVVYSLMAELGWRKDPVPDLAAWVTSFAARRYGVSHPDAGAAWRLLLRSVYNCSGEACRGHNRSPLVRRPSLQMNTSIWYNRSDVFEAWRLLLTSAPSLATSPAFRYDLLDLTRQAVQELVSLYYEEARSAYLSKELASLLRAGGVLAYELLPALDEVLASDSRFLLGSWLEQARAAAVSEAEADFYEQNSRYQLTLWGPEGNILDYANKQLAGLVANYYTPRWRLFLEALVDSVAQGIPFQQHQFDKNVFQLEQAFVLSKQRYPSQPRGDTVDLAKKIFLKYYPRWVAGSW

SEQ ID NO: 5826 - DNA, 2232 bp, Artificial Sequence
  derived and/or modified sequence
atggaggctgtggctgttgctgctgccgtcggtgtgttacttttggctggagccggtggagcagccggcgacgaggcaagggaagccgcggctgtgagggctctagtagctcggctgctagggcccgggcccgcagccgacttcagtgtctccgtcgagcgtgctttggccgctaagcccgggctggacacctactctctcggaggcggaggagcagctcgcgtgcgcgtccggggctcgactggggtagccgccgctgcagggttgcacaggtatctgcgcgatttttgtggatgccatgtagcttggagcggctcacagctccgactccctcggcccctgccagcagtgccaggtgagctgaccgaagcaacacctaatagatataggtactaccagaacgtatgcacacagtcttacagcttcgtctggtgggactgggcccgctgggaacgggaaattgattggatggcattgaacggtatcaacttggccttggcctggagcggccaggaagccatctggcagcgcgtctacctcgctctgggcttgacccaagccgagataaatgagttcttcaccggacctgcctttctggcttggggaaggatgggaaatttgcatacctgggatggtccacttcccccttcctggcatattaaacagctttacctacaacaccgggtgctggatcaaatgcggagcttcggtatgacgccggtattacccgctttcgccggccacgtacctgaggctgtaacacgagttttccctcaggtaaatgtgactaagatggggagctgggggcatttcaactgtagctacagctgtagcttccttttggcccctgaggatcccatttttccaattattgggtcactctttctgagagagctgattaaagagttcggtaccgaccatatatacggcgctgatactttcaatgaaatgcaacctcccagttcagagccttcctatctagccgctgcgaccacagcggtttacgaggctatgaccgcagtagataccgaggccgtctggctgctacagggatggttattccagcaccaaccgcagttttggggcccagcgcaaattcgcgcagtgctgggggcagttccccgtggcagactgctggtactggatctgttcgccgaatcacagccggtgtacacaagaacggccagctttcagggccagcccttcatctggtgcatgcttcacaacttcgggggcaaccacggtctgtttggagcactggaagccgtgaacggagggccagaggcggctagactctttcctaactcgacgatggtcgggaccggcatggcacctgagggcatatcgcagaatgaggtggtgtactccctcatggccgaactgggatggagaaaggaccccgtgcctgacctggctgcctgggtgactagctttgccgcgaggcggtatggcgtctctcaccctgacgctggagccgcttggaggttgctactaaggtccgtgtataattgcagcggcgaggcctgccggggccacaatcgaagccctcttgtgcgacgtccttcgttgcagatgaacacctctatctggtataacagatccgacgtattcgaggcctggaggcttctattgacctcagcgcctagtctggcgactagcccggcgtttcggtacgaccttttagatctgactagacaggccgtgcaagaacttgtctccctctattacgaagaggctcgttccgcttatttgtcaaaggaacttgctagtctactgcgagcaggtggcgttctggcttatgaactactgcccgcgctggacgaggtgctggcctctgattctagattcctattggggagctggctcgagcaggcccgggccgccgccgtctctgaggctgaggcagatttttatgaacagaattccagataccagttaaccctttgggggcccgaagggaatattctggattatgcaaacaaacagctggcaggcctagtggccaattattacacccctcgatggagactgttcctggaggccctcgtggactctgtggcacagggcattcccttccagcagcaccagtttgacaaaaatgttttccaacttgagcaggcattcgttctcagtaagcagaggtacccttcacagcctaggggcgacactgtggacctggcaaagaaaatttttctgaagtattaccccaggtgggtggctggaagctggtag

SEQ ID NO: 5827 - DNA, 2232 bp, Artificial Sequence
  derived and/or modified sequence
atggaggccgtggccgtggccgctgctgtgggcgtgctgctgctggccggggccggcggcgctgctggagatgaggcccgggaggccgctgctgtgcgggccctggtggcccggctgctgggccctggccctgctgctgacttctctgtgtctgtggagcgggccctggccgccaagccaggcctggacacctacagcctgggcggcggcggggccgcccgggtgcgggtgcggggcagcactggagtggccgctgctgctggcctgcaccgctacctgcgggacttctgtggctgccacgtggcctggagcggcagccagctgcggctgccccggcccctgcctgctgtgcctggagagctgacagaggccacccccaaccgctaccgctactaccagaatgtgtgcacccagagctacagctttgtgtggtgggactgggcccgctgggagcgggagattgactggatggccctgaatggcatcaacctggccctggcctggagcggccaggaggccatctggcagagggtgtacctggccctgggcctgacccaggccgagatcaatgagttcttcaccggccctgccttcctggcctggggccgcatgggcaacctgcacacctgggatggccccctgcccccatcctggcacatcaagcagctgtacctgcagcaccgggtgctggaccagatgaggagctttggcatgacccctgtgctgcctgcctttgctggccacgtgcctgaggccgtgaccagggtcttcccccaggtgaatgtgaccaagatgggctcctggggccacttcaactgcagctacagctgcagcttcctgctggcccctgaggaccccatcttccccatcatcggcagcctcttcctgcgggagctgatcaaggagtttggaacagaccacatctatggagctgacaccttcaatgagatgcagccccccagcagcgagcccagctacctggccgccgccaccacagctgtgtatgaggccatgacagctgtggacacagaagctgtgtggctgctgcagggctggctgttccagcaccagccccagttctggggccctgcccagatccgggctgtgctgggcgctgtgccccggggccgcctgctggtgctggacctgtttgctgagagccagcctgtgtacaccaggacagccagcttccagggccagcccttcatctggtgcatgctgcacaactttggaggcaaccacggcctgtttggagccctggaggccgtgaatggaggccctgaggccgcccggctcttccccaacagcaccatggtgggcaccggcatggcccctgagggcatcagccagaatgaggtggtgtacagcctgatggccgagctgggctggaggaaggaccctgtgcctgacctggccgcctgggtgaccagctttgctgccaggagatatggagtgagccacccagatgctggggccgcctggaggctgctgctgcggtctgtgtacaactgcagcggggaggcctgccggggccacaacagaagccccctggtgagaagacccagcctgcagatgaacaccagcatctggtacaacagaagtgatgtgtttgaggcctggaggctgctgctgaccagcgcccccagcctggccaccagccctgccttccgctatgacctgctggacctgacccggcaggccgtgcaggagctggtgtccctgtactatgaggaggcccggagcgcctacctgagcaaggagctggccagcctgctgcgggccggcggcgtgctggcctatgagctgctgcctgccctggatgaggtgctggccagtgacagccgcttcctgctgggctcctggctggagcaggcccgggctgctgctgtgtctgaggccgaggccgacttctatgagcagaacagccgctaccagctgaccctgtggggccctgagggcaacatcctggactatgccaacaagcagctggccggcctggtggccaactactacaccccccgctggaggctcttcctggaggccctggtggacagcgtggcccagggcatccccttccagcagcaccagtttgacaagaatgtgttccagctggagcaggcctttgtgctgagcaagcagcgctaccccagccagcccaggggggacacagtggacctggccaagaagatcttcctgaagtactacccccgctgggtggccggctcctggtag

SEQ ID NO: 5828 - DNA, 2232 bp, Artificial Sequence
  derived and/or modified sequence
atggaggccgtggccgtggccgccgccgtgggcgtgctgctgctggccggagctggtggcgcggccggcgacgaagcccgggaagccgcagcagtgagggcgctcgttgccagattactcggacctggtcccgcagctgacttcagcgttagtgtggaaagggcactggccgcaaagcccgggctggacacttacagtctaggaggtggcggcgcagcccgcgttagggtgaggggaagtaccggcgtcgctgcagccgctggccttcacaggtacctgagagatttctgtgggtgccacgtagcgtggtctggttcacaactgcgcctgccgcggcccctgcctgctgtccccggagaacttacagaggcaactcctaatcgctatcgctattaccaaaacgtttgcactcaatcatatagctttgtgtggtgggattgggcgcgatgggagcgagagatcgactggatggcactgaatggaattaacctcgcgctggcttggtcaggccaggaggctatttggcaaagggtgtacctggcgttaggcctgacacaggccgaaattaacgagttcttcactggaccagctttcctcgcttggggccggatggggaatctacacacttgggacgggccactacccccaagctggcacatcaagcagctttaccttcagcaccgcgtactcgaccagatgcgatcctttggaatgacccccgttcttcctgccttcgccggtcatgttcctgaagctgtgacgagggtgttcccccaggttaatgtgactaagatgggctcgtgggggcatttcaattgcagctatagctgtagcttcctcctggcgcctgaggacccgatctttcctatcattggctcactttttctaagagaactgatcaaggaattcggaacagaccacatctatggcgccgacacattcaacgaaatgcagccaccatcctctgaaccatcctatctggctgcggctacaacagccgtttatgaagccatgacagctgtcgacaccgaggccgtctggctattacaggggtggctgttccagcatcagccgcagttttgggggccggcccagataagagcggtattgggtgctgtccctcgaggcagactgttggtgcttgatttgtttgctgagtcacagccagtgtacacaagaaccgccagctttcaaggccagccattcatctggtgcatgctccataatttcggcggcaaccacgggctgtttggagcccttgaagctgtcaacggcgggcccgaagctgcacgcttgttccccaacagcactatggttggtactggcatggccccggaaggcatatcacagaatgaagtggtttatagtttgatggccgagctggggtggcgcaaggaccccgtgcccgatctcgcagcttgggtgacatcatttgcagcccggcggtatggggtgtctcatccagatgccggagcggcgtggcgcctgctcttgagatctgtctacaattgcagcggagaggcttgccggggccataatagaagcccacttgtaaggagaccgagtctacagatgaacacgtccatttggtataaccgctccgacgttttcgaggcttggaggctcctgctgacatcagctccatctctagctacttcaccggcattcagatatgacctgctcgatctgactcggcaggctgtccaagagctcgtatcgttgtactatgaagaggctcgcagtgcgtaccttagtaaagaactggccagccttctgagggcaggtggcgtgcttgcttatgagttactgcctgcactggatgaggtgctcgccagcgactctaggtttttactgggctcatggctcgagcaagcccgtgccgctgctgtgtccgaggccgaggcagacttttatgaacagaacagccgctaccagctgacactgtggggcccagaaggcaatattttggattacgccaataaacagttggctggtctggttgccaattactacacccctagatggaggttatttttggaggccctggttgattccgtggcacagggcatcccgttccagcagcaccaattcgataaaaatgttttccagctagaacaagcgttcgtgttaagtaagcagagatacccaagccagccacggggcgacactgtggacctagccaagaaaattttcctcaaatactaccctaggtgggtggccggatcatggtag

SEQ ID NO: 5829 - DNA, 2780 bp, Artificial Sequence
  derived and/or modified sequence
agtagggaagtagctatggcagtgcctgatacaaaataaactccaaatgtgtatttattagatggttggatggaagttatttgcgtgtgaaagcgcgttttacccgaaggcgctctgtgagggccagcgggtccccttcggccctggagccggggtcacacgctccccaccgcgtgcggtcacgagacgcccccaagggagtatcctggtacccggaagccgcgactcctggccctgagcccgggcttagccttcgggtccacgtggccggaggccggcagctgattggacgcgggccgccccaccccctggccgtcgcgggacccgcaggactgagaccatggaggcggtggcggtggccgcggcggtgggggtccttctcctggccggggccgggggcgcggcaggcgacgaggcccgggaggcggcggccgtgcgggcgctcgtggcccggctgctggggccaggccccgcggccgacttctccgtgtcggtggagcgcgctctggctgccaagccgggcttggacacctacagcctgggcggcggcggcgcggcgcgcgtgcgggtgcgcggctccacgggcgtggcggccgccgcggggctgcaccgctacctgcgcgacttctgtggctgccacgtggcctggtccggctctcagctgcgcctgccgcggccactgccagccgtgccgggggagctgaccgaggccacgcccaacaggtaccgctattaccagaatgtgtgcacgcaaagctactctttcgtgtggtgggactgggcccgctgggagcgagagatagactggatggcgctgaatggcatcaacctggcactggcctggagcggccaggaggccatctggcagcgggtgtacctggccttgggcctgacccaggcagagatcaatgagttctttactggtcctgccttcctggcctgggggcgaatgggcaacctgcacacctgggatggccccctgcccccctcctggcacatcaagcagctttacctgcagcaccgggtcctggaccagatgcgctccttcggcatgaccccagtgctgcctgcattcgcggggcatgttcccgaggctgtcaccagggtgttccctcaggtcaatgtcacgaagatgggcagttggggccactttaactgttcctactcctgctccttccttctggctccggaagaccccatattccccatcatcgggagcctcttcctgcgagagctgatcaaagagtttggcacagaccacatctatggggccgacactttcaatgagatgcagccaccttcctcagagccctcctaccttgccgcagccaccactgccgtctatgaggccatgactgcagtggatactgaggctgtgtggctgctccaaggctggctcttccagcaccagccgcagttctgggggcccgcccagatcagggctgtgctgggagctgtgccccgtggccgcctcctggttctggacctgtttgctgagagccagcctgtgtatacccgcactgcctccttccagggccagcccttcatctggtgcatgctgcacaactttgggggaaaccatggtctttttggagccctagaggctgtgaacggaggcccagaagctgcccgcctcttccccaactccaccatggtaggcacgggcatggcccccgagggcatcagccagaacgaagtggtctattccctcatggctgagctgggctggcgaaaggacccagtgccagatttggcagcctgggtgaccagctttgccgcccggcggtatggggtctcccacccggacgcaggggcagcgtggaggctactgctccggagtgtgtacaactgctccggggaggcctgcaggggccacaatcgtagcccgctggtcaggcggccgtccctacagatgaataccagcatctggtacaaccgatctgatgtgtttgaggcctggcggctgctgctcacatctgctccctccctggccaccagccccgccttccgctacgacctgctggacctcactcggcaggcagtgcaggagctggtcagcttgtactatgaggaggcaagaagcgcctacctgagcaaggagctggcctccctgttgagggctggaggcgtcctggcctatgagctgctgccggcactggacgaggtgctggctagtgacagccgcttcttgctgggcagctggctagagcaggcccgagcagcggcagtcagtgaggccgaggccgatttctacgagcagaacagccgctaccagctgaccttgtgggggccagaaggcaacatcctggactatgccaacaagcagctggcggggttggtggccaactactacacccctcgctggcggcttttcctggaggcgctggttgacagtgtggcccagggcatccctttccaacagcaccagtttgacaaaaatgtcttccaactggagcaggccttcgttctcagcaagcagaggtaccccagccagccgcgaggagacactgtggacctggccaagaagatcttcctcaaatattacccccgctgggtggccggctcttggtgatagattcgccaccactgggccttgttttccgctaattccagggcagattccagggcccagagctggacagacatcacaggataacccaggcctgggaggaggccccacggcctgctggtggggtctgacctggggggattggagggaaatgacctgccctccaccaccacccaaagtgtgggattaaagtactgttttctttccactt

SEQ ID NO: 5830 - DNA, 2232 bp, Artificial Sequence
  derived and/or modified sequence
atggaagccgtggccgtggccgctgctgtgggggttttactcctggctggcgcaggcggagcagcaggggacgaagcacgcgaggctgctgcagtgcgtgcactcgtggctcgcctgttaggccctgggcctgccgctgactttagcgtgagcgtggaacgcgcattggctgccaagcctggactggacacctattctttaggtgggggaggggctgcaagagttagagttcgcggtagcactggcgttgcagctgcagccggacttcacagatacctccgagacttctgcggatgccacgtggcttggtccggctcccagctgcggctgccacggcctctgccagctgtgccgggagagttgactgaggctacgcccaatcgctaccgctattatcaaaacgtttgtacacagtcttattccttcgtgtggtgggattgggctagatgggagcgagagatagactggatggccttaaacgggattaatctggcgctcgcgtggtcaggccaggaggccatttggcagcgcgtttacctggccctcggcttgactcaggccgagatcaacgagttcttcacaggcccagcgttcctggcctggggccgaatgggcaacctccatacctgggatggtcctctgcctccatcgtggcatattaagcaactctaccttcagcacagagttctagaccagatgaggagcttcggcatgacgcctgttctccccgcatttgcaggacacgtgcctgaagccgtgacccgtgtgtttccacaggtgaatgtcacaaagatgggatcctggggtcactttaattgcagttacagctgtagtttcttattagctcccgaggatccgatctttcccattattggatccctctttttacgagaactgatcaaagagttcgggactgaccacatttacggggctgacacctttaatgagatgcagcctccatcatccgagcccagttatctggccgctgcaacgactgcagtgtatgaggccatgacagctgtagacacagaggctgtatggctgctgcaaggctggctctttcagcaccagccacaattctggggacctgctcagatcagagctgttctgggggcagtccccagagggcgtctactcgtgctcgatctgtttgccgagtcccagcctgtgtatactcgtactgcttccttccagggccaacccttcatctggtgcatgttacacaatttcggcggtaatcatggactgttcggagcccttgaagccgtgaatggtggccctgaggcagctaggctctttcctaattctaccatggtaggaactggcatggctcccgaaggtatttcccagaatgaggtcgtgtattccctcatggccgagttggggtggagaaaagatccagttcctgatctcgccgcatgggtaaccagctttgccgcacggaggtatggtgtctcacaccccgacgcaggagccgcttggcggctgcttctgcgttccgtgtataattgttctggcgaggcctgtaggggccacaacagatccccattggtaagacgccctagcctgcagatgaatacttccatatggtacaacagaagcgacgtgttcgaggcctggcggctacttctcacatcagcccctagcctcgctaccagccccgctttcaggtatgacctgctcgatctgacccgacaggcagtgcaagagctggtttcgctatactacgaggaggcacggagtgcttacctgtctaaggagctcgcctcattgctcagggctggaggggttctagcttacgagcttttgcctgccttagatgaggtgttagcttcagatagccgattccttctggggtcttggttagaacaggctagagcagctgccgtatctgaggccgaggctgatttttacgagcagaacagtcgctaccaactgacactttggggccctgaaggaaatattctagattacgccaataagcagcttgctggccttgtcgcaaattactacactcctagatggcgtctatttctggaggccttggtggacagcgtggctcaggggatcccctttcaacagcatcaatttgataaaaatgttttccaattggagcaggccttcgtgctatctaagcagcgctaccctagccagccgagaggtgataccgtcgacctcgcaaaaaagatctttcttaagtactatcctcggtgggttgccggatcctggtag

SEQ ID NO: 5831 - DNA, 2232 bp, Artificial Sequence
  derived and/or modified sequence
atggaggccgtggccgtggccgccgccgtgggcgtgctgctgctggccggcgccggcggcgccgccggcgacgaggccagagaggccgccgccgtgagagccctggtggccagactgctgggccccggccccgccgccgacttcagcgtgagcgtggagagagccctggccgccaagcccggcctggacacctacagcctgggcggcggcggcgccgccagagtgagagtgagaggcagcaccggcgtggccgccgccgccggcctgcacagatacctgagagacttctgcggctgccacgtggcctggagcggcagccagctgagactgcccagacccctgcccgccgtgcccggcgagctgaccgaggccacccccaacagatacagatactaccagaacgtgtgcacccagagctacagcttcgtgtggtgggactgggccagatgggagagagagatcgactggatggccctgaacggcatcaacctggccctggcctggagcggccaggaggccatctggcagagagtgtacctggccctgggcctgacccaggccgagatcaacgagttcttcaccggccccgccttcctggcctggggcagaatgggcaacctgcacacctgggacggccccctgccccccagctggcacatcaagcagctgtacctgcagcacagagtgctggaccagatgagaagcttcggcatgacccccgtgctgcccgccttcgccggccacgtgcccgaggccgtgaccagagtgttcccccaggtgaacgtgaccaagatgggcagctggggccacttcaactgcagctacagctgcagcttcctgctggcccccgaggaccccatcttccccatcatcggcagcctgttcctgagagagctgatcaaggagttcggcaccgaccacatctacggcgccgacaccttcaacgagatgcagccccccagcagcgagcccagctacctggccgccgccaccaccgccgtgtacgaggccatgaccgccgtggacaccgaggccgtgtggctgctgcagggctggctgttccagcaccagccccagttctggggccccgcccagatcagagccgtgctgggcgccgtgcccagaggcagactgctggtgctggacctgttcgccgagagccagcccgtgtacaccagaaccgccagcttccagggccagcccttcatctggtgcatgctgcacaacttcggcggcaaccacggcctgttcggcgccctggaggccgtgaacggcggccccgaggccgccagactgttccccaacagcaccatggtgggcaccggcatggcccccgagggcatcagccagaacgaggtggtgtacagcctgatggccgagctgggctggagaaaggaccccgtgcccgacctggccgcctgggtgaccagcttcgccgccagaagatacggcgtgagccaccccgacgccggcgccgcctggagactgctgctgagaagcgtgtacaactgcagcggcgaggcctgcagaggccacaacagaagccccctggtgagaagacccagcctgcagatgaacaccagcatctggtacaacagaagcgacgtgttcgaggcctggagactgctgctgaccagcgcccccagcctggccaccagccccgccttcagatacgacctgctggacctgaccagacaggccgtgcaggagctggtgagcctgtactacgaggaggccagaagcgcctacctgagcaaggagctggccagcctgctgagagccggcggcgtgctggcctacgagctgctgcccgccctggacgaggtgctggccagcgacagcagattcctgctgggcagctggctggagcaggccagagccgccgccgtgagcgaggccgaggccgacttctacgagcagaacagcagataccagctgaccctgtggggccccgagggcaacatcctggactacgccaacaagcagctggccggcctggtggccaactactacacccccagatggagactgttcctggaggccctggtggacagcgtggcccagggcatccccttccagcagcaccagttcgacaagaacgtgttccagctggagcaggccttcgtgctgagcaagcagagataccccagccagcccagaggcgacaccgtggacctggccaagaagatcttcctgaagtactaccccagatgggtggccggcagctggtag

SEQ ID NO: 5832 - protein, 1447 aa, Artificial Sequence
  derived and/or modified sequence
MASAGNAAEPQDRGGGGSGCIGAPGRPAGGGRRRRTGGLRRAAAPDRDYLHRPSYCDAAFALEQISKGKATGRKAPLWLRAKFQRLLFKLGCYIQKNCGKFLVVGLLIFGAFAVGLKAANLETNVEELWVEVGGRVSRELNYTRQKIGEEAMFNPQLMIQTPKEEGANVLTTEALLQHLDSALQASRVHVYMYNRQWKLEHLCYKSGELITETGYMDQIIEYLYPCLIITPLDCFWEGAKLQSGTAYLLGKPPLRWTNFDPLEFLEELKKINYQVDSWEEMLNKAEVGHGYMDRPCLNPADPDCPATAPNKNSTKPLDMALVLNGGCHGLSRKYMHWQEELIVGGTVKNSTGKLVSAHALQTMFQLMTPKQMYEHFKGYEYVSHINWNEDKAAAILEAWQRTYVEVVHQSVAQNSTQKVLSFTTTTLDDILKSFSDVSVIRVASGYLLMLAYACLTMLRWDCSKSQGAVGLAGVLLVALSVAAGLGLCSLIGISFNAATTQVLPFLALGVGVDDVFLLAHAFSETGQNKRIPFEDRTGECLKRTGASVALTSISNVTAFFMAALIPIPALRAFSLQAAVVVVFNFAMVLLIFPAILSMDLYRREDRRLDIFCCFTSPCVSRVIQVEPQAYTDTHDNTRYSPPPPYSSHSFAHETQITMQSTVQLRTEYDPHTHVYYTTAEPRSEISVQPVTVTQDTLSCQSPESTSSTRDLLSQFSDSSLHCLEPPCTKWTLSSFAEKHYAPFLLKPKAKVVVIFLFLGLLGVSLYGTTRVRDGLDLTDIVPRETREYDFIAAQFKYFSFYNMYIVTQKADYPNIQHLLYDLHRSFSNVKYVMLEENKQLPKMWLHYFRDWLQGLQDAFDSDWETGKIMPNNYKNGSDDGVLAYKLLVQTGSRDKPIDISQLTKQRLVDADGIINPSAFYIYLTAWVSNDPVAYAASQANIRPHRPEWVHDKADYMPETRLRIPAAEPIEYAQFPFYLNGLRDTSDFVEAIEKVRTICSNYTSLGLSSYPNGYPFLFWEQYIGLRHWLLLFISVVLACTFLVCAVFLLNPWTAGIIVMVLALMTVELFGMMGLIGIKLSAVPVVILIASVGIGVEFTVHVALAFLTAIGDKNRRAVLALEHMFAPVLDGAVSTLLGVLMLAGSEFDFIVRYFFAVLAILTILGVLNGLVLLPVLLSFFGPYPEVSPANGLNRLPTPSPEPPPSVVRFAMPPGHTHSGSDSSDSEYSSQTTVSGLSEELRHYEAQQGAGGPAHQVIVEATENPVFAHSTVVHPESRHHPPSNPRQQPHLDSGSLPPGRQGQQPRRDPPREGLWPPPYRPRRDAFEISTEGHSGPSNRARWGPRGARSHNPRNPASTAMGSSVPGYCQPITTVTASASVTVAVHPPPVPGPGRNPRGGLCPGYPETDHGLFEDPHVPFHVRCERRDSKVEVIELQDVECEERPRGSSSN

SEQ ID NO: 5833 - protein, 1296 aa, Artificial Sequence
  derived and/or modified sequence
MFNPQLMIQTPKEEGANVLTTEALLQHLDSALQASRVHVYMYNRQWKLEHLCYKSGELITETGYMDQIIEYLYPCLIITPLDCFWEGAKLQSGTAYLLGKPPLRWTNFDPLEFLEELKKINYQVDSWEEMLNKAEVGHGYMDRPCLNPADPDCPATAPNKNSTKPLDMALVLNGGCHGLSRKYMHWQEELIVGGTVKNSTGKLVSAHALQTMFQLMTPKQMYEHFKGYEYVSHINWNEDKAAAILEAWQRTYVEVVHQSVAQNSTQKVLSFTTTTLDDILKSFSDVSVIRVASGYLLMLAYACLTMLRWDCSKSQGAVGLAGVLLVALSVAAGLGLCSLIGISFNAATTQVLPFLALGVGVDDVFLLAHAFSETGQNKRIPFEDRTGECLKRTGASVALTSISNVTAFFMAALIPIPALRAFSLQAAVVVVFNFAMVLLIFPAILSMDLYRREDRRLDIFCCFTSPCVSRVIQVEPQAYTDTHDNTRYSPPPPYSSHSFAHETQITMQSTVQLRTEYDPHTHVYYTTAEPRSEISVQPVTVTQDTLSCQSPESTSSTRDLLSQFSDSSLHCLEPPCTKWTLSSFAEKHYAPFLLKPKAKVVVIFLFLGLLGVSLYGTTRVRDGLDLTDIVPRETREYDFIAAQFKYFSFYNMYIVTQKADYPNIQHLLYDLHRSFSNVKYVMLEENKQLPKMWLHYFRDWLQGLQDAFDSDWETGKIMPNNYKNGSDDGVLAYKLLVQTGSRDKPIDISQLTKQRLVDADGIINPSAFYIYLTAWVSNDPVAYAASQANIRPHRPEWVHDKADYMPETRLRIPAAEPIEYAQFPFYLNGLRDTSDFVEAIEKVRTICSNYTSLGLSSYPNGYPFLFWEQYIGLRHWLLLFISVVLACTFLVCAVFLLNPWTAGIIVMVLALMTVELFGMMGLIGIKLSAVPVVILIASVGIGVEFTVHVALAFLTAIGDKNRRAVLALEHMFAPVLDGAVSTLLGVLMLAGSEFDFIVRYFFAVLAILTILGVLNGLVLLPVLLSFFGPYPEVSPANGLNRLPTPSPEPPPSVVRFAMPPGHTHSGSDSSDSEYSSQTTVSGLSEELRHYEAQQGAGGPAHQVIVEATENPVFAHSTVVHPESRHHPPSNPRQQPHLDSGSLPPGRQGQQPRRDPPREGLWPPPYRPRRDAFEISTEGHSGPSNRARWGPRGARSHNPRNPASTAMGSSVPGYCQPITTVTASASVTVAVHPPPVPGPGRNPRGGLCPGYPETDHGLFEDPHVPFHVRCERRDSKVEVIELQDVECEERPRGSSSN

SEQ ID NO: 5834 - protein, 92 aa, Artificial Sequence
  derived and/or modified sequence
MFNPQLMIQTPKEEGANVLTTEALLQHLDSALQASRVHVYMYNRQWKLEHLCYKSGELITETGYMDQIIEYLYPCLIITPLDCFWEGAKLQS

SEQ ID NO: 5835 - DNA, 4344 bp, Artificial Sequence
  derived and/or modified sequence
atggccagcgccggcaacgccgccgagccccaggacagaggcggcggcggcagcggctgcatcggcgcccccggcagacccgccggcggcggcagaagaagaagaaccggcggcctgagaagagccgccgcccccgacagagactacctgcacagacccagctactgcgacgccgccttcgccctggagcagatcagcaagggcaaggccaccggcagaaaggcccccctgtggctgagagccaagttccagagactgctgttcaagctgggctgctacatccagaagaactgcggcaagttcctggtggtgggcctgctgatcttcggcgccttcgccgtgggcctgaaggccgccaacctggagaccaacgtggaggagctgtgggtggaggtgggcggcagagtgagcagagagctgaactacaccagacagaagatcggcgaggaggccatgttcaacccccagctgatgatccagacccccaaggaggagggcgccaacgtgctgaccaccgaggccctgctgcagcacctggacagcgccctgcaggccagcagagtgcacgtgtacatgtacaacagacagtggaagctggagcacctgtgctacaagagcggcgagctgatcaccgagaccggctacatggaccagatcatcgagtacctgtacccctgcctgatcatcacccccctggactgcttctgggagggcgccaagctgcagagcggcaccgcctacctgctgggcaagccccccctgagatggaccaacttcgaccccctggagttcctggaggagctgaagaagatcaactaccaggtggacagctgggaggagatgctgaacaaggccgaggtgggccacggctacatggacagaccctgcctgaaccccgccgaccccgactgccccgccaccgcccccaacaagaacagcaccaagcccctggacatggccctggtgctgaacggcggctgccacggcctgagcagaaagtacatgcactggcaggaggagctgatcgtgggcggcaccgtgaagaacagcaccggcaagctggtgagcgcccacgccctgcagaccatgttccagctgatgacccccaagcagatgtacgagcacttcaagggctacgagtacgtgagccacatcaactggaacgaggacaaggccgccgccatcctggaggcctggcagagaacctacgtggaggtggtgcaccagagcgtggcccagaacagcacccagaaggtgctgagcttcaccaccaccaccctggacgacatcctgaagagcttcagcgacgtgagcgtgatcagagtggccagcggctacctgctgatgctggcctacgcctgcctgaccatgctgagatgggactgcagcaagagccagggcgccgtgggcctggccggcgtgctgctggtggccctgagcgtggccgccggcctgggcctgtgcagcctgatcggcatcagcttcaacgccgccaccacccaggtgctgcccttcctggccctgggcgtgggcgtggacgacgtgttcctgctggcccacgccttcagcgagaccggccagaacaagagaatccccttcgaggacagaaccggcgagtgcctgaagagaaccggcgccagcgtggccctgaccagcatcagcaacgtgaccgccttcttcatggccgccctgatccccatccccgccctgagagccttcagcctgcaggccgccgtggtggtggtgttcaacttcgccatggtgctgctgatcttccccgccatcctgagcatggacctgtacagaagagaggacagaagactggacatcttctgctgcttcaccagcccctgcgtgagcagagtgatccaggtggagccccaggcctacaccgacacccacgacaacaccagatacagccccccccccccctacagcagccacagcttcgcccacgagacccagatcaccatgcagagcaccgtgcagctgagaaccgagtacgacccccacacccacgtgtactacaccaccgccgagcccagaagcgagatcagcgtgcagcccgtgaccgtgacccaggacaccctgagctgccagagccccgagagcaccagcagcaccagagacctgctgagccagttcagcgacagcagcctgcactgcctggagcccccctgcaccaagtggaccctgagcagcttcgccgagaagcactacgcccccttcctgctgaagcccaaggccaaggtggtggtgatcttcctgttcctgggcctgctgggcgtgagcctgtacggcaccaccagagtgagagacggcctggacctgaccgacatcgtgcccagagagaccagagagtacgacttcatcgccgcccagttcaagtacttcagcttctacaacatgtacatcgtgacccagaaggccgactaccccaacatccagcacctgctgtacgacctgcacagaagcttcagcaacgtgaagtacgtgatgctggaggagaacaagcagctgcccaagatgtggctgcactacttcagagactggctgcagggcctgcaggacgccttcgacagcgactgggagaccggcaagatcatgcccaacaactacaagaacggcagcgacgacggcgtgctggcctacaagctgctggtgcagaccggcagcagagacaagcccatcgacatcagccagctgaccaagcagagactggtggacgccgacggcatcatcaaccccagcgccttctacatctacctgaccgcctgggtgagcaacgaccccgtggcctacgccgccagccaggccaacatcagaccccacagacccgagtgggtgcacgacaaggccgactacatgcccgagaccagactgagaatccccgccgccgagcccatcgagtacgcccagttccccttctacctgaacggcctgagagacaccagcgacttcgtggaggccatcgagaaggtgagaaccatctgcagcaactacaccagcctgggcctgagcagctaccccaacggctaccccttcctgttctgggagcagtacatcggcctgagacactggctgctgctgttcatcagcgtggtgctggcctgcaccttcctggtgtgcgccgtgttcctgctgaacccctggaccgccggcatcatcgtgatggtgctggccctgatgaccgtggagctgttcggcatgatgggcctgatcggcatcaagctgagcgccgtgcccgtggtgatcctgatcgccagcgtgggcatcggcgtggagttcaccgtgcacgtggccctggccttcctgaccgccatcggcgacaagaacagaagagccgtgctggccctggagcacatgttcgcccccgtgctggacggcgccgtgagcaccctgctgggcgtgctgatgctggccggcagcgagttcgacttcatcgtgagatacttcttcgccgtgctggccatcctgaccatcctgggcgtgctgaacggcctggtgctgctgcccgtgctgctgagcttcttcggcccctaccccgaggtgagccccgccaacggcctgaacagactgcccacccccagccccgagcccccccccagcgtggtgagattcgccatgccccccggccacacccacagcggcagcgacagcagcgacagcgagtacagcagccagaccaccgtgagcggcctgagcgaggagctgagacactacgaggcccagcagggcgccggcggccccgcccaccaggtgatcgtggaggccaccgagaaccccgtgttcgcccacagcaccgtggtgcaccccgagagcagacaccacccccccagcaaccccagacagcagccccacctggacagcggcagcctgccccccggcagacagggccagcagcccagaagagacccccccagagagggcctgtggccccccccctacagacccagaagagacgccttcgagatcagcaccgagggccacagcggccccagcaacagagccagatggggccccagaggcgccagaagccacaaccccagaaaccccgccagcaccgccatgggcagcagcgtgcccggctactgccagcccatcaccaccgtgaccgccagcgccagcgtgaccgtggccgtgcaccccccccccgtgcccggccccggcagaaaccccagaggcggcctgtgccccggctaccccgagaccgaccacggcctgttcgaggacccccacgtgcccttccacgtgagatgcgagagaagagacagcaaggtggaggtgatcgagctgcaggacgtggagtgcgaggagagacccagaggcagcagcagcaactag

SEQ ID NO: 5836 - DNA, 279 bp, Artificial Sequence
  derived and/or modified sequence
atgttcaacccccagctgatgatccagacccccaaggaggagggcgccaacgtgctgaccaccgaggccctgctgcagcacctggacagcgccctgcaggccagcagagtgcacgtgtacatgtacaacagacagtggaagctggagcacctgtgctacaagagcggcgagctgatcaccgagaccggctacatggaccagatcatcgagtacctgtacccctgcctgatcatcacccccctggactgcttctgggagggcgccaagctgcagagctag

SEQ ID NO: 5837 - DNA, 4344 bp, Artificial Sequence
  derived and/or modified sequence
atggcttcagctggaaacgctgccgagcctcaggatcgaggcggcgggggtagcggatgtattggtgcccccgggagaccagctggcggaggaagaaggaggcgtactggcggcttacgcagagcagccgcccccgatcgggattatttgcaccggccctcatactgcgatgcagctttcgcgttagaacagatttctaagggtaaagctacaggacgcaaggcacccctttggctgagggccaaatttcaacgtctgctcttcaagctgggttgttacatccagaaaaactgtgggaagttcctggtcgttggcctcctgattttcggcgctttcgctgtggggctgaaggctgcaaatcttgagactaatgtcgaggaactgtgggtggaggtgggaggtcgggttagtagagagctgaattacactcgacagaagataggagaggaggcaatgtttaacccacagctaatgatccaaacgcctaaagaggaaggcgctaacgtgctgacgaccgaggcccttttgcagcacttggacagcgctctccaagcatcccgcgtgcatgtgtatatgtacaaccgccaatggaaactcgagcacctctgttataagtcaggggagttaattactgaaacgggctacatggatcagattattgaatacttatacccctgtctgataataacacctctagactgtttttgggaaggagcgaagttacaatccgggaccgcctacctgcttggtaagccacccctgagatggactaatttcgaccccttagaattcctcgaagagttgaaaaagattaattaccaggtcgattcctgggaagagatgttgaacaaagctgaggtgggccatggctacatggacagaccatgcctgaacccagccgatcctgactgtcctgctaccgctcctaacaagaactctacaaagcctctggatatggctctggtccttaatggtggttgccatggactgagtagaaagtatatgcactggcaagaggagctcattgtgggcgggaccgtcaagaacagcaccggcaaattggtgagcgcccatgctctacagacgatgttccagctgatgacacccaagcagatgtatgagcattttaagggttatgagtatgtgagccatattaactggaacgaggataaggctgctgccattttggaggcatggcagcggacttacgtagaagtcgttcaccagtccgtggcccagaattcaactcagaaggtgttgagtttcacaacaacgaccctggatgacatcctcaaatcattcagcgatgtgagtgttattcgtgtggcttctggctacctgctgatgttggcctatgcttgtttgacaatgctcaggtgggattgttcaaagtcacagggggctgtggggctcgctggcgtcctgctggtcgccctctccgtggccgcgggccttgggttgtgctcattgataggaatttctttcaacgctgcgacaacacaggtgctgccctttctcgctctgggtgtaggggtagacgacgttttcctattagcacacgctttcagtgaaacaggtcagaacaaacgaattccatttgaggacagaactggggagtgcctcaaacgcaccggcgccagcgtggccctgacaagcatcagcaatgtcacagctttttttatggccgctttgataccaattcccgcactccgggcattttccctccaggccgccgtagtggtcgtgttcaacttcgcgatggttctcctgatctttcctgcaattttgagcatggatctctacagacgagaagatcgccgtctggacattttttgttgtttcacatccccctgtgtgagtcgagtgattcaggttgagccccaggcatacaccgacactcacgataacaccaggtacagcccaccccctccgtattcatcccactctttcgcgcatgaaactcagatcacaatgcagtccacagtccagctccggacagagtacgacccccatacccacgtctattacactaccgccgagccaagatccgagatcagcgtacagcccgtgaccgtgacccaggatactctatcgtgccagtcacccgaatccactagttccaccagagatctattgtcacagttcagcgactcatctttacattgcttggaacctccgtgtacaaaatggacgcttagttccttcgccgaaaaacactacgctcccttcctcctgaagccgaaggccaaggtggtggtgatttttctgttcctcgggttgctgggtgtgtcattgtatgggactactagggtaagggatggtcttgaccttaccgacattgtccctagggaaacccgagaatatgactttatcgccgctcagttcaaatacttctcattttataatatgtatattgtgacccagaaagctgattatccaaacatccagcacctcctgtatgatctccacaggtcttttagtaacgttaagtacgtgatgctggaagagaacaaacaactgcccaagatgtggctccactactttcgggactggttacaagggctgcaggatgccttcgatagcgactgggagaccggcaaaataatgcctaacaactataaaaatggttcagacgacggagtgctggcctataagctcctcgtacagacggggtcaagagacaaaccaattgacatctcacagcttactaaacagaggctcgtagatgctgacgggataattaatccgtcggccttttacatttaccttacagcttgggtgtcaaacgatccagtagcttacgcagcatctcaggctaatatccggccgcaccggcctgagtgggtgcacgataaagctgattacatgccggaaacgagacttcgtatccctgcagctgagcctatcgagtatgcccagtttcccttctatctcaacggtctgagagataccagcgattttgtggaagcgattgagaaagtgcgtaccatttgcagcaactacacaagcctgggactgagttcctacccaaacggctatcctttcctgttctgggaacagtacatcggtctgcgccactggcttctgctctttatttcggtggtgctggcctgcacattcctcgtttgcgccgtgtttctgcttaacccttggactgccgggattatagttatggtgctggccttgatgactgttgagctgttcggcatgatgggactcataggaatcaaactcagcgctgtgcctgtggttattttaatcgcctcagtcggaattggtgtggagttcacagtgcacgtggccctagcctttctgactgctatcggcgacaagaacaggcgagctgtcctagcattggagcacatgttcgctcctgttctggatggagctgtttccaccttgctcggggttctgatgctggctggctcagagtttgacttcatcgtacggtatttcttcgcggtcctggccattctgaccatccttggtgtcctcaacggtttggtgcttcttcccgttctgcttagcttctttggcccctatccagaggtgagccctgccaatggacttaacaggctcccaaccccatctccagagccgcccccttcggtcgtgcgcttcgcaatgcccccagggcatacccattctggctccgatagttcggactcggaatacagtagccagacaaccgtgtccggactaagcgaggagctaaggcattacgaggcccagcaaggtgctggtgggccagcccaccaagtcatagtggaggccaccgaaaatccagtctttgcccattctaccgttgttcatccggaaagcaggcaccatccccccagtaatcctcgtcaacagcctcatttggattctggctccctgcctcccggccgtcaggggcagcaacctaggcgggacccccctagagagggtctatggccccccccttatcgtccaagacgagatgctttcgaaattagcaccgaaggtcacagcggcccctctaaccgggcacgttggggccctcggggggctaggtcgcacaatccgagaaaccctgcctctacagccatgggttcttctgttccaggatattgccagcctattaccaccgtgaccgcttcagcaagcgtcaccgtggctgtgcacccaccccccgtgcccggccctggacggaacccgcgagggggcctgtgccccggctaccctgaaacagatcacggcttgttcgaggacccccacgtgccattccacgttaggtgcgagcggcgcgacagcaaggttgaagttattgaactgcaggacgtcgagtgcgaagagaggccccgaggtagcagttcgaactag

SEQ ID NO: 5838 - DNA, 279 bp, Artificial Sequence
  derived and/or modified sequence
atgttcaatccccagctgatgatacagaccccaaaggaggagggggccaacgtcctcaccacagaagcactgctccagcacctcgattcggctctacaggcgtcgcgtgtgcacgtgtatatgtataatcgacaatggaaactggagcacctgtgctacaagagtggcgagctcatcactgagacgggttacatggatcaaatcattgagtacttgtacccttgtctaatcattacaccccttgattgtttctgggagggcgccaaactccaaagttag

SEQ ID NO: 5839 - DNA, 4344 bp, Artificial Sequence
  derived and/or modified sequence
atggccagcgctggaaatgctgctgagccccaggaccggggcggcggcggcagcggctgcattggagcccctggccggcctgctgggggcggcagaagaagaagaactggaggcctgcggcgggctgctgccccagaccgggactacctgcaccggcccagctactgtgatgctgcctttgccctggagcagatcagcaagggcaaggccactggaaggaaggcccccctgtggctgcgggccaagttccagaggctgctcttcaagctgggctgctacatccagaagaactgtgggaagttcctggtggtgggcctgctgatctttggagcctttgctgtgggcctgaaggccgccaacctggagaccaacgtggaggagctgtgggtggaggtgggcggccgggtgtcccgggagctgaactacacccggcagaagattggagaggaggccatgttcaacccccagctgatgatccagacccccaaggaggagggcgccaacgtgctgaccacagaggccctgctgcagcacctggacagcgccctgcaggccagccgggtgcacgtgtacatgtacaaccggcagtggaagctggagcacctgtgctacaagagcggggagctgatcacagaaacaggctacatggaccagatcatcgagtacctgtacccctgcctgatcatcacccccctggactgcttctgggagggcgccaagctgcagagcggcacagcctacctgctgggcaagccacccctgcgctggaccaactttgaccccctggagttcctggaggagctgaagaagatcaactaccaggtggacagctgggaggagatgctgaacaaggccgaggtgggccacggctacatggaccggccctgcctgaacccagctgaccctgactgcccagccacagcccccaacaagaacagcaccaagcccctggacatggccctggtgctgaatggaggctgccacggcctgagcaggaagtacatgcactggcaggaggagctgattgtgggcggcaccgtgaagaacagcacaggcaagctggtgtctgcccacgccctgcagaccatgttccagctgatgacccccaagcagatgtatgagcacttcaagggctatgaatatgtgagccacatcaactggaatgaagacaaggctgctgccatcctggaggcctggcagaggacctacgtggaggtggtgcaccagagcgtggcccagaacagcacccagaaggtgctgtccttcaccaccaccaccctggatgacatcctgaagagcttcagtgatgtgtctgtcatccgggtggccagcggctacctgctgatgctggcctatgcctgcctgaccatgctgcgctgggactgcagcaagagccagggcgctgtgggcctggccggcgtgctgctggtggccctgtctgtggccgccggcctgggcctgtgcagcctgattggcatctccttcaatgctgccaccacccaggtgctgcccttcctggccctgggcgtgggcgtggatgatgtgttcctgctggcccacgccttcagcgagaccggccagaacaagaggatcccctttgaggacagaactggagaatgtctgaagaggactggagcctctgtggccctgaccagcatcagcaatgtgacagccttcttcatggccgccctgatccccatcccagccctgcgggccttcagcctgcaggccgctgtggtggtggtgttcaactttgccatggtgctgctgatcttccctgccatcctgtccatggacctgtaccgccgggaggaccggcggctggacatcttctgctgcttcaccagcccctgtgtgtccagggtcatccaggtggagccccaggcctacacagacacccatgacaacacccgctacagccccccaccaccctacagcagccacagctttgcccacgagacccagatcaccatgcagagcacagtgcagctgaggacagaatatgacccccacacccacgtgtactacaccacagctgagcccaggtctgagatctctgtgcagcctgtgacagtgacccaggacaccctgagctgccagagccctgagagcaccagcagcacccgggacctgctgagccagttcagtgacagcagcctgcactgcctggagcccccctgcaccaagtggaccctgagcagctttgctgagaagcactacgcccccttcctgctgaagcccaaggccaaggtggtggtgatcttcctgttcctgggcctgctgggcgtgtccctgtatggcaccaccagggtgagagatggcctggacctgacagacatcgtgccccgggagacccgggagtatgacttcatcgccgcccagttcaagtacttctccttctacaacatgtacatcgtgacccagaaggctgactaccccaacatccagcacctgctgtatgacctgcaccgctccttcagcaatgtgaagtatgtgatgctggaggagaacaagcagctgcccaagatgtggctgcactacttccgggactggctgcagggcctgcaggatgcctttgacagcgactgggagaccgggaagatcatgcccaacaactacaagaatggaagtgatgatggagtgctggcctacaagctgctggtgcagacaggcagccgggacaagcccatcgacatcagccagctgaccaagcagaggctggtggatgctgatggcatcatcaaccccagcgccttctacatctacctgacagcctgggtgtccaatgaccctgtggcctatgctgccagccaggccaacatccggccccacaggcctgagtgggtgcatgacaaggctgactacatgcctgagacccggctgcgcatcccagctgctgagcccattgaatatgcccagttccccttctacctgaatggcctgcgggacaccagtgactttgtggaggccatcgagaaggtgaggaccatctgcagcaactacaccagcctgggcctgagcagctacccaaatggctaccccttcctgttctgggagcagtacatcggcctgcggcactggctgctgctcttcatctctgtggtgctggcctgcaccttcctggtgtgtgctgtgttcctgctgaacccctggacagctggcatcatcgtgatggtgctggccctgatgacagtggagctgtttggcatgatgggcctcatcggcatcaagctgtctgctgtgcctgtggtgatcctgattgcctctgtgggcatcggcgtggagttcaccgtgcacgtggccctggccttcctgacagccatcggggacaagaacagaagagctgtgctggccctggagcacatgtttgcccctgtgctggatggagctgtgtccaccctgctgggcgtgctgatgctggccggcagcgagtttgacttcatcgtgcgctacttctttgctgtgctggccatcctgaccatcctgggcgtgctgaatggcctggtgctgctgcctgtgctgctgtccttcttcggcccctacccagaggtgtccccagccaacggcctgaaccggctgcccacccccagccctgagcccccaccttctgtggtgcgctttgccatgcctcctggccacacccacagcggcagtgacagcagtgacagcgagtacagcagccagaccaccgtgtctggcctgtctgaggagctgcggcactatgaggcccagcagggcgccggcggccctgcccaccaggtgattgtggaggccacagagaaccctgtgtttgcccacagcacagtggtgcaccctgagagccgccaccacccccccagcaacccccggcagcagccccacctggacagcggcagcctgcccccaggccggcagggccagcagccccggcgggaccccccccgggagggcctgtggcccccaccctaccggcccaggagagatgcctttgagatcagcacagagggccacagcggccccagcaacagagcccgctggggccccaggggggcccggagccacaaccccaggaacccagccagcacagccatgggcagctctgtgcccggctactgccagcccatcaccaccgtgacagccagcgcctctgtgacagtggccgtgcaccccccacctgtgcccggccctggaagaaacccccggggcggcctgtgccccggctacccagagacagaccacggcctgtttgaggacccccacgtgcccttccacgtgcgctgtgagcggcgggacagcaaggtggaggtgattgagctgcaggatgtggagtgtgaggagcggccccggggcagcagcagcaactag

SEQ ID NO: 5840 - DNA, 279 bp, Artificial Sequence
  derived and/or modified sequence
atgttcaacccccagctgatgatccagacccccaaggaggagggcgccaacgtgctgaccacagaggccctgctgcagcacctggacagcgccctgcaggccagccgggtgcacgtgtacatgtacaaccggcagtggaagctggagcacctgtgctacaagtctggagagctgatcacagagaccggctacatggaccagatcatcgagtacctgtacccctgcctgatcatcacccccctggactgcttctgggagggcgccaagctgcagagctag

SEQ ID NO: 5841 - DNA, 4344 bp, Artificial Sequence
  derived and/or modified sequence
atggccagcgccggcaacgccgccgagccccaggaccggggcggcggcgggtccggatgtatcggcgccccgggccgacccgcaggcggtggacggaggcggaggaccgggggcctgagacgggcagccgcaccagatagggattatcttcaccggccatcctactgcgatgcggcatttgctctggagcagattagtaagggaaaagctaccgggcgaaaggcacccctctggctacgggctaagtttcagcgcctgttattcaaactcggatgctatattcagaaaaactgcggaaagtttctcgttgtggggctgctcatctttggcgcctttgctgtgggcttgaaggccgctaaccttgaaactaacgtggaggagctttgggttgaggtaggaggacgagtttcccgagagctgaactacacaaggcaaaagatcggcgaggaggccatgttcaatccccagctcatgatccaaactccaaaagaggagggtgctaatgtgttgaccactgaggcgctgctgcagcatttagactctgctctgcaggcctcccgggtgcatgtctacatgtacaatcgccagtggaagctagaacatttgtgctataagtcaggagagctaatcaccgaaactggatacatggatcagatcatcgaatacctgtatccttgcttaattataaccccactggactgcttttgggagggggccaagttacagagcgggaccgcttaccttttaggcaagccacctctcaggtggaccaacttcgatcctcttgagttcctcgaggaactcaaaaaaatcaattatcaggtggacagctgggaggagatgcttaataaggcagaggttggccacgggtacatggaccgaccctgcctaaatcctgctgatccggactgtccggctacggctccgaacaagaacagtaccaaacccttagatatggccctggtgctcaacggaggctgtcatggcctgagcaggaagtacatgcactggcaagaggaattgatcgtgggggggaccgtcaaaaattcaacggggaaactagtcagcgctcatgctctgcagaccatgtttcagttaatgacccccaagcagatgtatgaacattttaagggctacgagtacgtgagccatatcaattggaatgaggacaaggccgcggccatactggaggcctggcagcgcacatacgtggaggttgtgcatcagtccgtggcacaaaatagtacccagaaggtcctcagcttcacaaccacaacactggacgatatattgaagagctttagtgatgtgagcgtgattcgggtggcatccgggtacttgctgatgttagcttacgcctgtttaactatgcttagatgggactgctccaaatcccagggagccgtgggattagctggagtgcttctggtcgccttgagcgtggctgccgggttaggcctttgctcactgatcggtattagctttaacgctgccacgacgcaggtgcttccgtttctggcattgggcgtgggcgtagacgatgtgttccttctcgcccacgcttttagcgaaacagggcaaaacaagcgtatccctttcgaagatcggacaggagaatgtctgaaacggactggggccagcgtggcccttacttcgattagcaatgtcactgcattcttcatggctgctttgatcccaattccagcactacgtgcattttcccttcaggccgccgtggtcgtggtcttcaacttcgccatggtgttactgatatttccagcaattctatcaatggacctttatcgacgcgaagaccggaggctcgacatcttctgttgttttacctccccttgtgtttcccgcgtcattcaagtggagccgcaggcctacacagatacccacgataacacacgatatagtcctcctcctccatattcatcacattcttttgcccacgagacccagattacaatgcagtctaccgttcagctccggacggaatatgacccccatacccacgtctattacactactgcagagcccagaagtgaaatttctgtccaaccagtgaccgttacccaagatacgttgagttgtcagagccccgagtctacatcttctacacgggacctgctgtcacagtttagcgactcaagtttgcattgcctggaacccccatgcacaaagtggaccctctccagctttgccgagaagcattacgcaccttttctgctcaagcccaaggccaaggtggtcgtcatctttctgttcttaggccttttaggggtctctctctacggtaccacaagggtgagggacggccttgacctgaccgatattgttccaagggagacccgagaatacgactttatcgctgcacagtttaagtacttttccttctataacatgtatattgtaacacagaaagccgactatcctaacatccagcatttgttatacgaccttcatcgcagcttttcaaacgtaaaatatgtgatgctcgaagaaaataaacagctgcctaaaatgtggttacattattttcgggactggttgcaggggctccaagacgccttcgactccgactgggaaacagggaagattatgcccaacaattacaaaaatgggagcgatgacggggtactcgcctataaattattggttcagactggctctcgggataagcctattgatatttcgcagcttacgaaacagaggctggtggatgctgatggaatcattaacccatccgcattctacatctacctgaccgcatgggtgtctaatgatcccgtcgcctatgccgcatcgcaggccaacatcaggccccatcgaccggaatgggtgcacgataaggctgactatatgcctgaaacccgattgcgaattcccgcggctgagcccatcgaatacgcacagtttcctttttatttaaacggcctcagagatacttcggactttgtcgaggccattgagaaggtgcggactatatgttcgaactacacttcgctcggactctcctcttaccccaacggctacccgtttctcttctgggagcagtacatcggcctgcggcactggctgctgttgttcatttcagtcgtgttggcctgcacattcttggtgtgtgccgtgttccttctcaacccttggacagctggaattatcgtcatggtgttagccttgatgacggtcgaactgtttggtatgatgggtctgataggcattaaactatccgctgtcccggtggtaatactgattgcatctgtgggcataggcgtcgagtttacagtacacgtcgcgttggctttccttacggcgatcggcgacaagaaccgtcgggcagttcttgccttagaacacatgtttgcacccgtgcttgatggcgcagtgtccactctgctgggagtcctcatgctggctggtagcgagtttgattttatcgtaaggtacttctttgcagttctggcaatactaaccatactgggcgtgttgaatgggctagtactgctgcccgtgttgctgtccttttttggaccctaccccgaggtatccccagctaacgggctgaaccgcctgcccactccaagccctgagcccccaccatcagtggtccgctttgccatgccccctggccacactcacagcggatccgacagttctgacagtgaatacagttcacaaaccaccgtctcagggctcagcgaggagctgcgccactacgaggcccagcaaggcgctggtggtcccgctcatcaagtaatcgtggaagccacagagaaccctgtcttcgctcacagcacagtagtccatcctgagagtaggcaccacccaccttccaatccccgccaacagccacacctcgactcaggttctcttccaccgggacgacagggtcaacaaccgaggcgcgacccaccccgagagggattgtggccgcccccataccggccaaggagagacgctttcgagatctccacagagggacactctggccctagcaaccgcgcccgctggggcccccggggcgcacgttctcataatccacgtaaccctgcttcaacggccatgggctcttctgttccaggatactgccagcctattactactgtgactgccagtgctagtgttaccgtagctgtccacccaccgcctgtccctggcccaggacgaaatcctaggggcggcctgtgccctggttacccggaaaccgaccacggactgtttgaagaccctcacgtaccgtttcatgttaggtgtgaaaggagagactctaaagtggaggtcatcgagctgcaggatgtggagtgtgaagaacggcccagaggcagcagctccaactag

SEQ ID NO: 5842 - DNA, 279 bp, Artificial Sequence
  derived and/or modified sequence
atgttcaacccccagctgatgatccagacccccaaggaggagggcgccaatgttctgaccaccgaggcacttctgcagcacctggatagtgctctgcaggcaagtagagtacatgtatacatgtacaacaggcaatggaagttggaacacttgtgttacaagagtggcgagctgataaccgagactggctacatggaccagatcattgaatatctgtacccttgtcttatcatcaccccacttgattgcttttgggaaggcgcaaaactgcaatcctag

SEQ ID NO: 5843 - DNA, 4344 bp, Artificial Sequence
  derived and/or modified sequence
atggcttccgccggaaatgccgctgaacctcaggatagggggggaggcggaagcggatgcattggagcacccggacgccctgcgggaggcggaaggaggcgccgaactggcggactacgaagagccgctgcaccagatcgggattacctccaccggccatcatattgtgacgccgcatttgctctcgagcaaatctctaagggaaaggccactggccgaaaggctcctttgtggctgagggccaaattccagaggttactgtttaagttagggtgctatattcaaaagaattgtggcaaatttctcgtggtgggactgctgatttttggggctttcgccgtcggtctgaaggcggctaacctggaaaccaacgtagaggaactctgggtagaagtaggagggagggtcagtcgggagctgaattatactcggcagaagattggggaggaggcgatgtttaatccccaattgatgatacagacccccaaagaagagggagccaacgtgctgacaacggaagcacttctgcaacacctggacagtgctcttcaggcctctagagtccacgtctatatgtacaatcggcaatggaagctggagcacctttgctacaaatccggcgagctgatcaccgagactggctatatggatcagatcatcgaatatctgtacccatgtctgataatcacacctttggattgcttttgggagggagcaaagctgcagagcggtaccgcctacttgctgggtaaaccccctttgaggtggacaaacttcgacccactcgagttcctggaggaattgaaaaaaatcaactaccaggtcgattcgtgggaagaaatgcttaataaagcggaagtggggcacggctacatggaccgcccttgcctgaaccctgccgatccagattgtcccgcaaccgctccgaataagaattctacaaagccccttgacatggccttagtactcaacggagggtgtcacggtttatcacggaaatacatgcattggcaagaagagctaattgtgggtggaaccgtgaagaacagcactggcaaactggtctcagcccatgctctgcagacaatgttccagctcatgacccccaagcaaatgtatgaacatttcaagggctatgagtatgtctcacacattaactggaatgaggacaaagctgcggcaatactcgaggcctggcagcggacctatgtggaggtggttcaccaaagcgtggcacagaattccacccagaaagtgctgtcttttaccactacgactctcgacgatatccttaagagtttctccgatgtgtcggtcattcgggtggcaagtggttatctgctaatgcttgcctacgcatgcctgactatgttacgttgggactgctccaaaagtcagggggctgtggggctagccggagtgctgctcgtggccctgtctgtggccgcagggctcggcctctgctcactgatcgggatatccttcaacgccgctacaacccaagtactgccattcctggcactgggagtcggtgtagacgatgtgtttctgttagcccacgcattttccgaaactggacagaataagcgcatcccctttgaggacagaaccggtgagtgtctgaaaaggaccggcgctagcgttgctctgacctcaatttccaacgtgaccgcgtttttcatggctgctctgattcctatccccgctctccgcgctttcagtcttcaagcagctgtggtggtggttttcaattttgcaatggtactgctgatcttcccagctattctctcaatggatctctacagaagggaggatcgtcgcctcgacattttctgttgcttcactagcccttgcgtgtcgcgcgttatacaagtcgagcctcaggcatataccgatacccacgataacacaagatactcgccccctcctccctactcttcccatagcttcgctcatgaaactcagatcaccatgcagagcacagtgcagctgcgaacagagtacgatccccacacccatgtatactacaccaccgccgagccacgttctgaaatctcggtgcagccagtcaccgtgacacaggacacactgtcttgccaatcgcctgaaagcaccagttccacccgcgacctgctttcacaattcagcgatagcagtcttcactgtcttgaacctccttgtaccaagtggactctttctagcttcgcagaaaagcactacgctccattcctgctgaagcctaaagccaaagttgtggtaatctttctgttcctgggactgctcggggtcagcctctacggcacgaccagagtgagagacggcttagacctgacagatatcgtccctcgcgagacaagagagtacgactttatcgccgctcaatttaagtatttctccttttacaacatgtatatagtgactcaaaaagctgattatccaaacattcagcacctgctgtacgatctccacaggtctttttccaacgttaaatacgtgatgctggaggagaacaagcagctccccaaaatgtggttgcactatttccgagactggctccaggggctgcaagatgctttcgacagtgactgggaaacggggaaaatcatgccaaacaactataaaaatgggtccgacgacggcgttcttgcatacaagctccttgtgcaaaccggatcccgagacaagcccattgacatctcacagcttacgaagcaaaggctcgtcgatgcagatggaattattaacccttctgcattctacatatacctcacagcatgggtgagcaatgaccccgtcgcctatgcggctagccaagcaaacatccgtccacaccggcctgaatgggttcacgataaagctgattacatgcctgagactcgtctgcgaatccctgctgctgagcccattgaatatgcacagtttcccttctatctgaacgggctccgagacactagtgattttgtcgaagcaatcgaaaaagtgaggaccatctgttcaaactatacctctctgggactcagcagctacccgaacggatacccgtttctgttttgggagcagtacatcgggctgaggcattggcttctgttatttatttccgttgttctggcctgcacctttctcgtgtgcgccgtctttttgctcaacccatggacagccggaatcatcgtcatggttctggcactgatgaccgtagagctgttcggaatgatgggactgattggcataaaactttctgctgtgcctgtggtgatcctgatcgccagcgtgggaatcggtgttgagttcacagtgcacgtcgccttagcttttttaactgctattggtgacaaaaatcgccgtgccgtgctggcgctggagcatatgtttgcgcctgtcctggacggcgctgtaagcacactcctgggcgtgcttatgttagccggaagcgaattcgacttcatcgtgagatactttttcgcggtgcttgccatcttgaccatcctgggagtgctgaacggcctcgtgcttttacccgtgctgctctctttcttcggaccgtaccctgaggtttccccagccaacggactgaatcggttgccaaccccttccccagaacctcctccaagcgtggtcaggttcgccatgccccctgggcatacacattctggtagtgattccagcgattctgagtatagctctcagacaaccgtgtcgggcctttcagaagagctgagacattatgaagctcagcagggagcgggaggccctgcccatcaggtgatcgtagaagccactgaaaatcctgtgttcgcccactctaccgtagtccatccagagtcacggcaccaccctccaagcaaccctcggcagcagcctcacctggacagcggttctctccctcctggcaggcaaggccagcaaccacgcagagaccccccacgggagggcctctggccaccgccataccgccctcgacgggacgctttcgagattagtactgaaggacattccggcccatccaaccgggcacggtggggcccaaggggagcccgttcacataaccctaggaatcctgcgtctaccgcgatgggaagttccgtgcccggttactgccagccaataactactgtgaccgccagtgcctccgtgaccgtcgctgttcaccctcctccggtacccggtccaggacgaaatccaaggggtggactgtgccctggctaccctgaaacggaccatggtttgttcgaagatcctcatgtacccttccacgttaggtgcgagagaagagattcgaaagtggaagtgattgagctccaggacgtggagtgcgaggaaaggcctagagggtcatcttctaattag

SEQ ID NO: 5844 - DNA, 279 bp, Artificial Sequence
  derived and/or modified sequence
atgttcaacccccagctgatgatccaaactccaaaagaagaaggcgctaatgtgctaactacagaagctttactccaacacctggactctgctctgcaggcatcaagagtccatgtctatatgtataatcgccagtggaaactcgagcacttgtgctataagtccggcgaacttataacagagaccggttatatggatcagattatcgagtatctgtacccttgtttaatcatcaccccattggattgcttctgggagggagctaagttgcagtcctag

SEQ ID NO: 5845 - DNA, 8057 bp, Artificial Sequence
  derived and/or modified sequence
gaactggatgtgggcagcggcggccgcagagacctcgggacccccgcgcaatgtggcaatggaaggcgcagggtctgactccccggcagcggccgcggccgcagcggcagcagcgcccgccgtgtgagcagcagcagcggctggtctgtcaaccggagcccgagcccgagcagcctgcggccagcagcgtcctcgcaagccgagcgcccaggcgcgccaggagcccgcagcagcggcagcagcgcgccgggccgcccgggaagcctccgtccccgcggcggcggcggcggcggcggcaacatggcctcggctggtaacgccgccgagccccaggaccgcggcggcggcggcagcggctgtatcggtgccccgggacggccggctggaggcgggaggcgcagacggacgggggggctgcgccgtgctgccgcgccggaccgggactatctgcaccggcccagctactgcgacgccgccttcgctctggagcagatttccaaggggaaggctactggccggaaagcgccgctgtggctgagagcgaagtttcagagactcttatttaaactgggttgttacattcaaaaaaactgcggcaagttcttggttgtgggcctcctcatatttggggccttcgcggtgggattaaaagcagcgaacctcgagaccaacgtggaggagctgtgggtggaagttggaggacgagtaagtcgtgaattaaattatactcgccagaagattggagaagaggctatgtttaatcctcaactcatgatacagacccctaaagaagaaggtgctaatgtcctgaccacagaagcgctcctacaacacctggactcggcactccaggccagccgtgtccatgtatacatgtacaacaggcagtggaaattggaacatttgtgttacaaatcaggagagcttatcacagaaacaggttacatggatcagataatagaatatctttacccttgtttgattattacacctttggactgcttctgggaaggggcgaaattacagtctgggacagcatacctcctaggtaaacctcctttgcggtggacaaacttcgaccctttggaattcctggaagagttaaagaaaataaactatcaagtggacagctgggaggaaatgctgaataaggctgaggttggtcatggttacatggaccgcccctgcctcaatccggccgatccagactgccccgccacagcccccaacaaaaattcaaccaaacctcttgatatggcccttgttttgaatggtggatgtcatggcttatccagaaagtatatgcactggcaggaggagttgattgtgggtggcacagtcaagaacagcactggaaaactcgtcagcgcccatgccctgcagaccatgttccagttaatgactcccaagcaaatgtacgagcacttcaaggggtacgagtatgtctcacacatcaactggaacgaggacaaagcggcagccatcctggaggcctggcagaggacatatgtggaggtggttcatcagagtgtcgcacagaactccactcaaaaggtgctttccttcaccaccacgaccctggacgacatcctgaaatccttctctgacgtcagtgtcatccgcgtggccagcggctacttactcatgctcgcctatgcctgtctaaccatgctgcgctgggactgctccaagtcccagggtgccgtggggctggctggcgtcctgctggttgcactgtcagtggctgcaggactgggcctgtgctcattgatcggaatttcctttaacgctgcaacaactcaggttttgccatttctcgctcttggtgttggtgtggatgatgtttttcttctggcccacgccttcagtgaaacaggacagaataaaagaatcccttttgaggacaggaccggggagtgcctgaagcgcacaggagccagcgtggccctcacgtccatcagcaatgtcacagccttcttcatggccgcgttaatcccaattcccgctctgcgggcgttctccctccaggcagcggtagtagtggtgttcaattttgccatggttctgctcatttttcctgcaattctcagcatggatttatatcgacgcgaggacaggagactggatattttctgctgttttacaagcccctgcgtcagcagagtgattcaggttgaacctcaggcctacaccgacacacacgacaatacccgctacagccccccacctccctacagcagccacagctttgcccatgaaacgcagattaccatgcagtccactgtccagctccgcacggagtacgacccccacacgcacgtgtactacaccaccgctgagccgcgctccgagatctctgtgcagcccgtcaccgtgacacaggacaccctcagctgccagagcccagagagcaccagctccacaagggacctgctctcccagttctccgactccagcctccactgcctcgagcccccctgtacgaagtggacactctcatcttttgctgagaagcactatgctcctttcctcttgaaaccaaaagccaaggtagtggtgatcttcctttttctgggcttgctgggggtcagcctttatggcaccacccgagtgagagacgggctggaccttacggacattgtacctcgggaaaccagagaatatgactttattgctgcacaattcaaatacttttctttctacaacatgtatatagtcacccagaaagcagactacccgaatatccagcacttactttacgacctacacaggagtttcagtaacgtgaagtatgtcatgttggaagaaaacaaacagcttcccaaaatgtggctgcactacttcagagactggcttcagggacttcaggatgcatttgacagtgactgggaaaccgggaaaatcatgccaaacaattacaagaatggatcagacgatggagtccttgcctacaaactcctggtgcaaaccggcagccgcgataagcccatcgacatcagccagttgactaaacagcgtctggtggatgcagatggcatcattaatcccagcgctttctacatctacctgacggcttgggtcagcaacgaccccgtcgcgtatgctgcctcccaggccaacatccggccacaccgaccagaatgggtccacgacaaagccgactacatgcctgaaacaaggctgagaatcccggcagcagagcccatcgagtatgcccagttccctttctacctcaacggcttgcgggacacctcagactttgtggaggcaattgaaaaagtaaggaccatctgcagcaactatacgagcctggggctgtccagttaccccaacggctaccccttcctcttctgggagcagtacatcggcctccgccactggctgctgctgttcatcagcgtggtgttggcctgcacattcctcgtgtgcgctgtcttccttctgaacccctggacggccgggatcattgtgatggtcctggcgctgatgacggtcgagctgttcggcatgatgggcctcatcggaatcaagctcagtgccgtgcccgtggtcatcctgatcgcttctgttggcataggagtggagttcaccgttcacgttgctttggcctttctgacggccatcggcgacaagaaccgcagggctgtgcttgccctggagcacatgtttgcacccgtcctggatggcgccgtgtccactctgctgggagtgctgatgctggcgggatctgagttcgacttcattgtcaggtatttctttgctgtgctggcgatcctcaccatcctcggcgttctcaatgggctggttttgcttcccgtgcttttgtctttctttggaccatatcctgaggtgtctccagccaacggcttgaaccgcctgcccacaccctcccctgagccaccccccagcgtggtccgcttcgccatgccgcccggccacacgcacagcgggtctgattcctccgactcggagtatagttcccagacgacagtgtcaggcctcagcgaggagcttcggcactacgaggcccagcagggcgcgggaggccctgcccaccaagtgatcgtggaagccacagaaaaccccgtcttcgcccactccactgtggtccatcccgaatccaggcatcacccaccctcgaacccgagacagcagccccacctggactcagggtccctgcctcccggacggcaaggccagcagccccgcagggacccccccagagaaggcttgtggccacccccctacagaccgcgcagagacgcttttgaaatttctactgaagggcattctggccctagcaatagggcccgctggggccctcgcggggcccgttctcacaaccctcggaacccagcgtccactgccatgggcagctccgtgcccggctactgccagcccatcaccactgtgacggcttctgcctccgtgactgtcgccgtgcacccgccgcctgtccctgggcctgggcggaacccccgagggggactctgcccaggctaccctgagactgaccacggcctgtttgaggacccccacgtgcctttccacgtccggtgtgagaggagggattcgaaggtggaagtcattgagctgcaggacgtggaatgcgaggagaggccccggggaagcagctccaactgagggtgattaaaatctgaagcaaagaggccaaagattggaaaccccccacccccacctctttccagaactgcttgaagagaactggttggagttatggaaaagatgccctgtgccaggacagcagttcattgttactgtaaccgattgtattattttgttaaatatttctataaatatttaagagatgtacacatgtgtaatataggaaggaaggatgtaaagtggtatgatctggggcttctccactcctgccccagagtgtggaggccacagtggggcctctccgtatttgtgcattgggctccgtgccacaaccaagcttcattagtcttaaatttcagcatatgttgctgctgcttaaatattgtataatttacttgtataattctatgcaaatattgcttatgtaataggattattttgtaaaggtttctgtttaaaatattttaaatttgcatatcacaaccctgtggtagtatgaaatgttactgttaactttcaaacacgctatgcgtgataatttttttgtttaatgagcagatatgaagaaagcacgttaatcctggtggcttctctaggtgtcgttgtgtgcggtcctcttgtttggctgtgcgtgtgaacacgtgtgtgagttcaccatgtactgtactgtgattttttttttgtcttgttttgtttctctacactgtctgtaacctgtagtaggctctgacctagtcaggctggaagcgtcaggatatcttttcttcgtgctggtgagggctggccctaaacatccacctaatcctttcaaatcagcccggcaaaagctagactctcctcgtgtctacggcatctcttatgatcattggctgccatccaggaccccaatttgtgcttcagggggataatctccttctctcggatcattgtgatggatgctggaacctcagggtatggagctcacatcagttcatcatggtgggtgttagagaattcggtgacatgcctagtgctgagccttggctgggccatgagagtctgtatactctaaaaagcatgcagcatggtgcccctcttctgaccaacacacacacgacccctcccccaacacccccaaattcaagagtggatgtggccctgtcacaggtagaaaaacctatttagttaattctttcttggcccacagtctcccagaaatgatgttttgagtccctatagtttaaactccctctcttaaatggagcagctggttgaggctttctagatctgtttgcatcttctttaaaactaagtggtgagcatgcattgtggtgtagaggcaggcattatgtaggataagagctccggggggattcttcatgcaccagtgtttagggtacgtgcttcctaagtaaatccaaacattgtctccatcctccccgtcattagtgctctttcaatgtgatgtgggaaagcaggaggatggacacaccccactgaaagatgtaggcaggggcaggtctctcaaccaggcatatttttaaaagttgcttctgtactggttctcttcttttgctctgaggtgtgggctccctcatctcgtaaccagagaccagcacatgtcagggaagcacccagtgtcggctccccatccaaatccacaccagcaccttgttacagacaagaagtcagaggaaagggcggggtccctgcagggctgaagcctaagctactgtgaggcgctcacgagtggcagctcctgttactcccttttaaattacctgggaaatcttaacagaaaggtaatgggcccccagaaatacccacagcatagtgacctcagaccctgatactcaccacaaaacttttaagatgctgattgggagccgcttgtggctgctgggtgtgtgtgtgtgtgtgtgcgtgcgtgcgtgtgtgtgtgtctctgctggggaccctggccacccccctgctgctgtcttggtgcctgtcacccacatggtctgccatcctaacacccagctctgctcagaaaacgtcctgcgtggaggagggatgatgcagaattctgaagtcgacttccctctggctcctggcgtgccctcgctcccttcctgagcccagctcgtgttgcgccggaggctgcgcggcccctgatttctgcatggtgtagaactttctccaatagtcacattggcaaagggagaactggggtgggcggggggtggggctggcagggaattagaatttctctctctcttttaatagttttattttgtctgtcctgtttgttcatttggatgttttaatttttaaaaaaaaaaaaactttgctgatatttataattttgtatcataagaatgttttcctctacagtatttgtcatgccagtttataacaaaaaaaaatgcagggattttatttctattggaaacattacagctatgttttacttttggacagaatttttatttgtatagagtgcttactaatgttaaatagttcagagtatataacatttacattaaggactcatggtaggttttagggtaaggagtttaaaggaaataaatattcaaactgggtctcattgccaattttggtggaaatgagtttgtgtcatttcaattacaaagataaaagtatgccatataatttatttatatgaagatttatttttgtagtgtacatagtagtcatcaagtcttttgacagaagtatatttttaaagaatttatatgtgatgaatccataatgtctggaactttgctgagacatgagtgggcacagttttcattgtaaattacagcaaggaaagaaaatgtttaacagtgttaagagagtcagagcagagtggatattcatgcgattatgaagtgtttattagttaccattggcgacctagcatgcttctcatttcaaaccttggaaggtgaaaatgtacaaactctctaaataattaatgttcaaacactgatagaaattctaacatgaataaaaaataatataacttgttggttatatctttgtttgtagaatgctttttttctttaaaatacttgggagagacagttagtgttggagccatcagaaactgttgtttcatcttgctgaccttgtgacactcttcttttttgctctatctgatggagagagttttaggttttcctcctttttgttttgtataaatagtgggtataagcatagctctgttacatggatgtattacaaagtgggggctgagcttttagtgtgatcatcacccaaatagtgtacattgtacccattaattaatttcttatcacctgaccctatttttgttttctcataccaagaaacttcctaagttaaccatcaaaattagtccttctgtcatctctcttagcatacttatttcccttatgtgatgcctaataatgagggaacataaataaagccaaattcaaagatga

SEQ ID NO: 5846 - DNA, 4388 bp, Artificial Sequence
  derived and/or modified sequence
ttctttgctgtgctggcgatcctcaccatcctcggcgttctcaatgggctggttttgcttcccgtgcttttgtctttctttggaccatatcctgaggtcagtagtgacacggggatgtcccacgtgtaggccggctgaatgctgtgtttcctgtgccgctcttcacttcgatacttaggtgcctccccacttgctggtggttcttcagtaaacatctcagagtcatgtctgttttcctcttcggtgtactggctttgagggctagagggcgggttcggtttggttcctctaaatcaactgattggcagcctgggtcttacagatctttatacagtaaatgaagactttccccttgagatgcataattggacttcacaagagtaaaaagtacacatcctgcctttccagtgtggagcagaggacagttcttctgctccagctgcgggacctgaaggtcctccaggtggtagagaaggggaggttaatacggcacagtgcgcagggccccagggcagggaacagaggcccctgaaaaataccgtgctttgagctttgagtgtggccagcaggtaaatggacaagaacacttttaacatggaatccccttaaataggtgtctccagccaacggcttgaaccgcctgcccacaccctcccctgagccaccccccagcgtggtccgcttcgccatgccgcccggccacacgcacagcgggtctgattcctccgactcggagtatagttcccagacgacagtgtcaggcctcagcgaggagcttcggcactacgaggcccagcagggcgcgggaggccctgcccaccaagtgatcgtggaagccacagaaaaccccgtcttcgcccactccactgtggtccatcccgaatccaggcatcacccaccctcgaacccgagacagcagccccacctggactcagggtccctgcctcccggacggcaaggccagcagccccgcagggacccccccagagaaggcttgtggccacccccctacagaccgcgcagagacgcttttgaaatttctactgaagggcattctggccctagcaatagggcccgctggggccctcgcggggcccgttctcacaaccctcggaacccagcgtccactgccatgggcagctccgtgcccggctactgccagcccatcaccactgtgacggcttctgcctccgtgactgtcgccgtgcacccgccgcctgtccctgggcctgggcggaacccccgagggggactctgcccaggctaccctgagactgaccacggcctgtttgaggaccccacgtgcctttccacgtccggtgtgagaggagggattcgaaggtggaagtcattgagctgcaggacgtggaatgcgaggagaggccccggggaagcagctccaactgagggtgattaaaatctgaagcaaagaggccaaagattggaaaccccccacccccacctctttccagaactgcttgaagagaactggttggagttatggaaaagatgccctgtgccaggacagcagttcattgttactgtaaccgattgtattattttgttaaatatttctataaatatttaagagatgtacacatgtgtaatataggaaggaaggatgtaaagtggtatgatctggggcttctccactcctgccccagagtgtggaggccacagtggggcctctccgtatttgtgcattgggctccgtgccacaaccaagcttcattagtcttaaatttcagcatatgttgctgctgcttaaatattgtataatttacttgtataattctatgcaaatattgcttatgtaataggattattttgtaaaggtttctgtttaaaatattttaaatttgcatatcacaaccctgtggtagtatgaaatgttactgttaactttcaaacacgctatgcgtgataatttttttgtttaatgagcagatatgaagaaagcacgttaatcctggtggcttctctaggtgtcgttgtgtgcggtcctcttgtttggctgtgcgtgtgaacacgtgtgtgagttcaccatgtactgtactgtgattttttttttgtcttgttttgtttctctacactgtctgtaacctgtagtaggctctgacctagtcaggctggaagcgtcaggatatcttttcttcgtgctggtgagggctggccctaaacatccacctaatcctttcaaatcagcccggcaaaagctagactctcctcgtgtctacggcatctcttatgatcattggctgccatccaggaccccaatttgtgcttcagggggataatctccttctctcggatcattgtgatggatgctggaacctcagggtatggagctcacatcagttcatcatggtgggtgttagagaattcggtgacatgcctagtgctgagccttggctgggccatgagagtctgtatactctaaaaagcatgcagcatggtgcccctcttctgaccaacacacacacgacccctcccccaacacccccaaattcaagagtggatgtggccctgtcacaggtagaaaaacctatttagttaattctttcttggcccacagtctcccagaaatgatgttttgagtccctatagtttaaactccctctcttaaatggagcagctggttgaggctttctagatctgtttgcatcttctttaaaactaagtggtgagcatgcattgtggtgtagaggcaggcattatgtaggataagagctccggggggattcttcatgcaccagtgtttagggtacgtgcttcctaagtaaatccaaacattgtctccatcctccccgtcattagtgctctttcaatgtgatgtgggaaagcaggaggatggacacaccccactgaaagatgtaggcaggggcaggtctctcaaccaggcatatttttaaaagttgcttctgtactggttctcttcttttgctctgaggtgtgggctccctcatctcgtaaccagagaccagcacatgtcagggaagcacccagtgtcggctccccatccaaatccacaccagcaccttgttacagacaagaagtcagaggaaagggcggggtccctgcagggctgaagcctaagctactgtgaggcgctcacgagtggcagctcctgttactcccttttaaattacctgggaaatcttaacagaaaggtaatgggcccccagaaatacccacagcatagtgacctcagaccctgatactcaccacaaaacttttaagatgctgattgggagccgcttgtggctgctgggtgtgtgtgtgtgtgtgtgcgtgcgtgcgtgtgtgtgtgtctctgctggggaccctggccacccccctgctgctgtcttggtgcctgtcacccacatggtctgccatcctaacacccagctctgctcagaaaacgtcctgcgtggaggagggatgatgcagaattctgaagtcgacttccctctggctcctggcgtgccctcgctcccttcctgagcccagctcgtgttgcgccggaggctgcgcggcccctgatttctgcatggtgtagaactttctccaatagtcacattggcaaagggagaactggggtgggcggggggtggggctggcagggaattagaatttctctctctcttttaatagttttattttgtctgtcctgtttgttcatttggatgttttaatttttaaaaaaaaaaaaactttgctgatatttataattttgtatcataagaatgttttcctctacagtatttgtcatgccagtttataacaaaaaaaaatgcagggattttatttctattggaaacattacagctatgttttacttttggacagaatttttatttgtatagagtgcttactaatgttaaatagttcagagtatataacatttacattaaggactcatggtaggttttagggtaaggagtttaaaggaaataaatattcaaactgggtctcattgccaattttggtggaaatgagtttgtgtcatttcaattacaaagataaaagtatgccatataatttatttatatgaagatttatttttgtagtgtacatagtagtcatcaagtcttttgacagaagtatatttttaaagaatttatatgtgatgaatccataatgtctggaactttgctgagacatgagtgggcacagttttcattgtaaattacagcaaggaaagaaaatgtttaacagtgttaagagagtcagagcagagtggatattcatgcgattatgaagtgtttattagttaccattggcgacctagcatgcttctcatttcaaaccttggaaggtgaaaatgtacaaactctctaaataattaatgttcaaacactgatagaaattctaacatgaataaaaaataatataacttgttggtt

SEQ ID NO: 5847 - protein, 390 aa, Artificial Sequence
  derived and/or modified sequence
MGDTFIRHIALLGFEKRFVPSQHYVYMFLVKWQDLSEKVVYRRFTEIYEFHKTLKEMFPIEAGAINPENRIIPHLPAPKWFDGQRAAENRQGTLTEYCGTLMSLPTKISRCPHLLDFFKVRPDDLKLPTDNQTKKPETYLMPKDGKSTATDITGPIILQTYRAIANYEKTSGSEMALSTGDVVEVVEKSESGWWFCQMKAKRGWIPASFLEPLDSPDETEDPEPNYAGEPYVAIKAYTAVEGDEVSLLEGEAVEVIHKLLDGWWVIRKDDVTGYFPSMYLQKSGQDVSQAQRQIKRGAPPRRSSIRNAHSIHQRSRKRLSQDAYRRNSVRFLQQRRRQARPGPQSPGSPLEEERQTQRSKPQPAVPPRPSADLILNRCSESTKRKLASAV

SEQ ID NO: 5848 - DNA, 1173 bp, Artificial Sequence
  derived and/or modified sequence
atgggggacactttcattaggcacatcgccttgttgggctttgagaagaggtttgttccgagtcagcattatgtctacatgtttcttgttaaatggcaggatttgtctgaaaaagtcgtatacagaaggtttacggaaatctacgaattccataaaactctgaaggagatgtttccaatagaggctggggcgataaatccggagaatagaataataccgcacctaccagcaccgaagtggttcgacgggcagagggccgcggaaaatcgccaaggcaccctgacggagtactgcgggaccctgatgagcctgccaactaagatcagccgctgcccccatttgttggatttcttcaaagtgaggcctgatgatcttaaactccctacggacaatcaaacaaaaaaacccgaaacatacctgatgccgaaggatggtaagagcacagcgactgacatcaccgggcctatcatactgcaaacttatcgcgctattgcgaactatgagaagacaagtggatcggaaatggccctctcaacaggcgacgttgttgaagtcgtggagaaatctgagtcgggctggtggttttgccagatgaaggccaagcgtggctggatccccgcttcctttttggagcccttagacagccccgatgagactgaagacccagaaccaaattatgcaggggagccctatgttgccattaaggcctacactgccgtggagggtgacgaagtctccctgttggaaggagaagccgttgaagtaatccacaaactccttgatggatggtgggtgatccggaaagacgacgtgacaggctactttccttcaatgtacctgcagaagagcggacaggatgtgtcccaggctcagcgtcaaatcaaaaggggagccccacccagacggagtagcataagaaatgcgcacagcattcatcagcgaagccgaaagagattgtcccaagacgcctatagacgaaactcagtgcgctttctccagcagcgccgcaggcaggcgaggccaggtccccagtctcccggctctcctctggaggaggagcgacaaacgcagcgatcgaagccgcagccagcagtccctccgaggccgtctgcagatctgatcctgaaccgatgtagcgagagtaccaagaggaagttggcatccgccgtatag

SEQ ID NO: 5849 - DNA, 1173 bp, Artificial Sequence
  derived and/or modified sequence
atgggagacaccttcatccgccacatcgccctgctgggctttgagaagagatttgtgcccagccagcactacgtgtacatgttcctggtgaagtggcaggacctgtctgagaaggtggtgtaccgccgcttcacagagatctatgagttccacaagaccctgaaggagatgttccccatcgaggccggggccatcaaccctgagaaccgcatcatcccccacctgcctgcccccaagtggtttgatggccagagagctgctgagaaccggcagggcaccctgacagagtactgcggcaccctgatgagcctgcccaccaagatcagccgctgcccccacctgctggacttcttcaaggtgcggccagatgacctgaagctgcccacagacaaccagaccaagaagccagagacctacctgatgcccaaggatggcaagagcacagccacagacatcaccggccccatcatcctgcagacctaccgggccatcgccaactatgagaagaccagcggcagcgagatggccctgagcactggagatgtggtggaggtggtggagaagtctgagagcggctggtggttctgccagatgaaggccaagaggggctggatcccagccagcttcctggagcccctggacagcccagatgaaacagaggaccctgagcccaactatgctggggagccctacgtggccatcaaggcctacacagctgtggagggagatgaggtgtccctgctggagggggaggccgtggaggtgatccacaagctgctggatggctggtgggtgatcaggaaggatgatgtgacaggctacttccccagcatgtacctgcagaagagcggccaggatgtgtcccaggcccagaggcagatcaagagaggagcccccccaagaagaagcagcatcagaaatgcccacagcatccaccagaggagcaggaagaggctgagccaggatgcctacagaagaaacagcgtgcgcttcctgcagcagaggcggcggcaggcccggcccggcccccagagccctggcagccccctggaggaggagcggcagacccagaggagcaagccccagcctgctgtgcccccccggcccagcgctgacctgatcctgaaccgctgcagcgagagcaccaagaggaagctggccagcgctgtgtag

SEQ ID NO: 5850 - DNA, 1173 bp, Artificial Sequence
  derived and/or modified sequence
atgggcgacaccttcatccggcacatcgccctgctgggcttcgagaagagatttgtaccgtcccaacattacgtgtacatgtttttggttaaatggcaggacctatccgagaaggtggtttaccgccgctttacggaaatctacgaattccataagacactgaaagaaatgttcccaatagaagccggcgctatcaatcccgagaacagaattattccccaccttcctgcccctaagtggtttgacgggcagcgagctgccgagaaccgtcagggcacccttacagaatattgcggaaccctgatgtcacttccaacaaaaatctctcgatgccctcacttgctcgacttcttcaaagtgaggccagatgatcttaaacttcccaccgataaccagacgaaaaagcccgaaacctatctcatgcctaaggatggaaaaagtaccgcaacagatattactgggcccataattcttcaaacatatagagctattgcgaattatgagaagacatcaggatcagaaatggcactgagtaccggtgacgttgtggaggtcgtggaaaagtctgagtcgggctggtggttctgccagatgaaagcaaagcgtggctggatacctgcatccttcctcgagcccctggattctccagacgagacagaagacccagagcccaactacgcgggagagccttacgttgcaattaaagcttataccgcagtcgaaggggacgaggtgagcctccttgagggggaggctgtcgaggtgatacacaaattactggacggctggtgggtcattagaaaagacgacgtaactggatatttcccctctatgtatctgcaaaagagtggacaggatgtatcgcaggcccagcgacagataaaaaggggcgctccacccaggcgttcctccattcgcaacgcacatagcattcaccagcgatctagaaagaggctgtcccaggatgcctacagaaggaatagcgtgaggtttttacagcagcggcgaagacaggcaaggcccgggccacaatccccagggagtcccctggaagaagaaaggcagacgcaacgatctaaaccccagcccgcagtacctccacgcccaagtgctgatctgatcctcaatcgctgctccgagagcaccaaacggaaactggctagcgcagtgtag

SEQ ID NO: 5851 - DNA, 1396 bp, Artificial Sequence
  derived and/or modified sequence
cgacttcctctttccagtgcatttaaggcgcagcctggaagtgccagggagcactggaggccacccagtcatgggggacaccttcatccgtcacatcgccctgctgggctttgagaagcgcttcgtacccagccagcactatgtgtacatgttcctggtgaaatggcaggacctgtcggagaaggtggtctaccggcgcttcaccgagatctacgagttccataaaaccttaaaagaaatgttccctattgaggcaggggcgatcaatccagagaacaggatcatcccccacctcccagctcccaagtggtttgacgggcagcgggccgccgagaaccgccagggcacacttaccgagtactgcggcacgctcatgagcctgcccaccaagatctcccgctgtccccacctcctcgacttcttcaaggtgcgccctgatgacctcaagctccccacggacaaccagacaaaaaagccagagacatacttgatgcccaaagatggcaagagtaccgcgacagacatcaccggccccatcatcctgcagacgtaccgcgccattgccaactacgagaagacctcgggctccgagatggctctgtccacgggggacgtggtggaggtcgtagagaagagcgagagcggttggtggttctgtcagatgaaagcaaagcgaggctggatcccagcgtccttcctcgagcccctggacagtcctgacgagacggaagaccctgagcccaactatgcaggtgagccatacgtcgccatcaaggcctacactgctgtggagggggacgaggtgtccctgctcgagggtgaagctgttgaggtcattcacaagctcctggacggctggtgggtcatcaggaaagacgacgtcacaggctacttcccgtccatgtacctgcaaaagtcagggcaagacgtgtcccaggcccaacgccagatcaagcggggggcgccgccccgcaggtcgtccatccgcaacgcgcacagcatccaccagcggtcgcggaagcgcctcagccaggacgcctatcgccgcaacagcgtccgttttctgcagcagcgacgccgccaggcgcggccgggaccgcagagccccgggagcccgctcgaggaggagcggcagacgcagcgctctaaaccgcagccggcggtgcccccgcggccgagcgccgacctcatcctgaaccgctgcagcgagagcaccaagcggaagctggcgtctgccgtctgaggctggagcgcagtccccagctagcgtctcggcccttgccgccccgtgcctgtacatacgtgttctatagagcctggcgtctggacgccgagggcagccccgacccctgtccagcgcggctcccgccaccctcaataaatgttgcttggagtg

SEQ ID NO: 5852 - DNA, 1173 bp, Artificial Sequence
  derived and/or modified sequence
atgggagatacctttatacgacacatcgcactattaggcttcgagaagcggtttgttccatcgcaacattacgtctatatgtttctggtgaagtggcaggacctcagcgagaaagtagtgtaccggcgatttactgagatttacgagtttcacaaaacgctgaaagagatgttccccattgaagctggtgcgattaacccagagaacagaatcatcccgcacctcccagcccctaagtggtttgatggccagcgcgctgctgaaaacaggcaggggacactgaccgaatattgcggaacattaatgtccctgcctactaagatctcccgctgtcctcacttgttagatttctttaaggtaagaccagacgacttaaagcttccaaccgacaatcagactaagaaacccgagacatatctcatgccaaaagatggcaaatccacggccactgatatcaccgggcctattattttacagacatatcgagccattgctaattacgagaagacttccgggtcagagatggcgctctctaccggagatgtggtggaggtggtggagaagagtgaaagcggctggtggttttgtcagatgaaggccaagcgtggctggatacccgcatccttcctggagcccctggacagtccagacgagaccgaggaccccgaacccaactacgccggagaaccctatgttgctattaaggcatacaccgctgtggagggcgacgaagtgagtttgctggagggcgaagccgttgaagtgatacacaaactacttgatggatggtgggtgatcaggaaagatgatgtgaccggatacttcccctccatgtacctccaaaagtcaggccaggatgtgagtcaagctcaaaggcagattaagcgtggcgcaccccctcgacggtctagcattcgaaacgctcattcgattcatcagagaagtaggaagcgccttagccaggacgcttatagaaggaactcagtccggttcctgcaacaacgacgcagacaagctcgccctgggccacagtctcccggatcccctctggaagaggaacgccagacccagcgctccaaaccccaaccagcagtgcccccacggccatccgctgatctgattcttaaccggtgcagcgagagcacaaaacgaaaacttgcctcagccgtgtag

SEQ ID NO: 5853 - DNA, 1173 bp, Artificial Sequence
  derived and/or modified sequence
atgggcgacaccttcatcagacacatcgccctgctgggcttcgagaagagattcgtgcccagccagcactacgtgtacatgttcctggtgaagtggcaggacctgagcgagaaggtggtgtacagaagattcaccgagatctacgagttccacaagaccctgaaggagatgttccccatcgaggccggcgccatcaaccccgagaacagaatcatcccccacctgcccgcccccaagtggttcgacggccagagagccgccgagaacagacagggcaccctgaccgagtactgcggcaccctgatgagcctgcccaccaagatcagcagatgcccccacctgctggacttcttcaaggtgagacccgacgacctgaagctgcccaccgacaaccagaccaagaagcccgagacctacctgatgcccaaggacggcaagagcaccgccaccgacatcaccggccccatcatcctgcagacctacagagccatcgccaactacgagaagaccagcggcagcgagatggccctgagcaccggcgacgtggtggaggtggtggagaagagcgagagcggctggtggttctgccagatgaaggccaagagaggctggatccccgccagcttcctggagcccctggacagccccgacgagaccgaggaccccgagcccaactacgccggcgagccctacgtggccatcaaggcctacaccgccgtggagggcgacgaggtgagcctgctggagggcgaggccgtggaggtgatccacaagctgctggacggctggtgggtgatcagaaaggacgacgtgaccggctacttccccagcatgtacctgcagaagagcggccaggacgtgagccaggcccagagacagatcaagagaggcgccccccccagaagaagcagcatcagaaacgcccacagcatccaccagagaagcagaaagagactgagccaggacgcctacagaagaaacagcgtgagattcctgcagcagagaagaagacaggccagacccggcccccagagccccggcagccccctggaggaggagagacagacccagagaagcaagccccagcccgccgtgccccccagacccagcgccgacctgatcctgaacagatgcagcgagagcaccaagagaaagctggccagcgccgtgtag

SEQ ID NO: 5854 - protein, 133 aa, Artificial Sequence
  derived and/or modified sequence
MRKHVLAASFSMLSLLVIMGDTDSKTDSSFIMDSDPRRCMRHHYVDSISHPLYKCSSKMVLLARCEGHCSQASRSEPLVSFSTVLKQPFRSSCHCCRPQTSKLKALRLRCSGGMRLTATYRYILSCHCEECNS

SEQ ID NO: 5855 - DNA, 402 bp, Artificial Sequence
  derived and/or modified sequence
atgagaaaacacgtgctcgccgcatccttttcaatgctgtccctgctggtcattatgggcgacaccgacagcaaaaccgattcatcatttattatggacagtgaccctaggcgatgtatgcggcaccactatgttgactccatttcccaccccctctacaagtgcagctcgaagatggttctgctcgcccggtgcgaaggccactgctctcaagcttccaggagcgagcctttggtgtcctttagtaccgtgctgaagcagccgttccgatcatcttgccactgttgccgtcctcagaccagcaagctgaaagcactgaggttgagatgctcgggtggcatgagacttacggctacatatagatacatacttagctgccactgcgaagagtgcaactcctag

SEQ ID NO: 5856 - DNA, 402 bp, Artificial Sequence
  derived and/or modified sequence
atgaggaagcacgtgctggccgccagcttctccatgctgagcctgctggtgatcatgggagacacagacagcaagacagacagcagcttcatcatggacagcgacccccggcgctgcatgaggcaccactacgtggacagcatcagccaccccctgtacaagtgcagcagcaagatggtgctgctggcccgctgtgagggccactgcagccaggccagccgctctgagcccctggtgtccttcagcacagtgctgaagcagcccttccgcagcagctgccactgctgccggccccagaccagcaagctgaaggccctgcggctgcgctgcagcggcggcatgaggctgacagccacctaccgctacatcctgagctgccactgtgaggagtgcaacagctag

SEQ ID NO: 5857 - DNA, 402 bp, Artificial Sequence
  derived and/or modified sequence
atgcggaagcacgtgctggccgccagcttcagcatgctgagcctgctggtcatcatgggtgacacggacagtaagaccgactcaagctttatcatggacagcgacccaagacgatgtatgcgacaccactacgtcgattcaatctcccaccctctgtacaagtgttctagcaaaatggtcttgcttgctaggtgtgaggggcactgcagccaggcaagccgctctgaacctctcgtctctttcagcacggtgcttaagcagccattcaggtcctcttgccactgttgtaggcctcagacttctaaactcaaggctctgagattaagatgcagtggaggtatgagactgacggcaacttaccgctacattctgtcctgccactgcgaggaatgtaactcttag

SEQ ID NO: 5858 - DNA, 1833 bp, Artificial Sequence
  derived and/or modified sequence
cctctctctctctccctctctctctccctctctctctctccctgtgtcgcttaaacaacagtcctaacttttgtgtgttgcaaatataaaaggcaagccatgtgacagagggacagaagaacaaaagcatttggaagtaacaggacctctttctagctctcagaaaagtctgagaagaaaggagccctgcgttcccctaagctgtgcagcagatactgtgatgatggattgcaagtgcaaagagtaagacaaaactccagcacataaaggacaatgacaaccagaaagcttcagcccgatcctgccctttccttgaacgggactggatcctaggaggtgaagccatttccaattttttgtcctctgcctccctctgctgttcttctagagaagtttttccttacaacaatgagaaaacatgtactagctgcatccttttctatgctctccctgctggtgataatgggagatacagacagtaaaacggacagctcattcataatggactcggaccctcgacgctgcatgaggcaccactatgtggattctatcagtcacccattgtacaagtgtagctcaaagatggtgctcctggccaggtgcgaggggcactgcagccaggcgtcacgctccgagcctttggtgtcgttcagcactgtcctcaagcaacccttccgttcctcctgtcactgctgccggccccagacttccaagctgaaggcactgcggctgcgatgctcagggggcatgcgactcactgccacctaccggtacatcctctcctgtcactgcgaggaatgcaattcctgaggcccgctgctgtgtgtggcttctggatgggacaactgtagaggcagttcgaccagccagggaaagactggcaagaaaagagttaaggcaaaaaaggatgcaacaattctcccgggactctgcatattctagtaataaagactctacatgcttgttgacagagagagatactctgggaacttctttgcagttcccatctcctttctctggtacaatttcttttggttcattttcagattcaggcattttcccccttggctctcaatgctgtttgggtttccaacaattcagcattagtgggaaaaagtgggccctcatacacaagcgtgtcaggctgtcagtgtttggtgcacgctggggaagaatttactttggaaagtagaaaagcccagcttttcctgggacatcttctgttattgttgatgtttttttttaccttgtcattttggtctaaggttgccattgctgctaaaggttaccgatttcaaagtccagataccaagcatgtggatatgtttagctacgtttactcacagccagcgaactgacattaaaataactaacaaacagattcttttatgtgatgctggaactcttgacagctataattattattcagaaatgactttttgaaagtaaaagcagcataaagaatttgtcacaggaaggctgtctcagataaattatggtaaaattttgtaagggagcagacttttaaagacttgcacaaatacggatcctgcactgactctggaaaaggcatatatgtactagtggcatggagaatgcaccatactcatgcatgcaaattagacaaccaagtatgaatctatttgtgggtgtgctatagctttagccgtgtcacgggcatcattctctaatatccacttgtccatgtgaaacatgttgccaaaatggtggcctggcttgtcttctgaacgtttggttcaaatgtgttttggtcctggaggctcaaattttgagttattcccacgttttgaaataaaaagagtatattcaaaa

SEQ ID NO: 5859 - DNA, 402 bp, Artificial Sequence
  derived and/or modified sequence
atgcggaagcacgtgttggccgcatctttttcaatgttgagcttgctggtgatcatgggggatacagacagtaaaactgatagttcctttataatggatagtgaccctagacggtgtatgcggcaccactatgtcgattccatatctcatcctctgtacaagtgctcaagcaagatggtccttttagcacggtgtgaggggcattgtagccaggcaagcaggtccgagccacttgtgagcttttcgacagtgctcaagcagccattcagatcaagctgccactgttgtcgccctcagactagcaaactaaaagctctcagactaagatgttctgggggtatgcggctgacggctacttaccgctacatactctcttgtcactgcgaggagtgcaatagctag

SEQ ID NO: 5860 - DNA, 402 bp, Artificial Sequence
  derived and/or modified sequence
atgagaaagcacgtgctggccgccagcttcagcatgctgagcctgctggtgatcatgggcgacaccgacagcaagaccgacagcagcttcatcatggacagcgaccccagaagatgcatgagacaccactacgtggacagcatcagccaccccctgtacaagtgcagcagcaagatggtgctgctggccagatgcgagggccactgcagccaggccagcagaagcgagcccctggtgagcttcagcaccgtgctgaagcagcccttcagaagcagctgccactgctgcagaccccagaccagcaagctgaaggccctgagactgagatgcagcggcggcatgagactgaccgccacctacagatacatcctgagctgccactgcgaggagtgcaacagctag

SEQ ID NO: 5861 - protein, 2818 aa, Artificial Sequence
  derived and/or modified sequence
MAAHRPVEWVQAVVSRFDEQLPIKTGQQNTHTKVSTEHNKECLINISKYKFSLVISGLTTILKNVNNMRIFGEAAEKNLYLSQLIILDTLEKCLAGQPKDTMRLDETMLVKQLLPEICHFLHTCREGNQHAAELRNSASGVLFSLSCNNFNAVFSRISTRLQELTVCSEDNVDVHDIELLQYINVDCAKLKRLLKETAFKFKALKKVAQLAVINSLEKAFWNWVENYPDEFTKLYQIPQTDMAECAEKLFDLVDGFAESTKRKAAVWPLQIILLILCPEIIQDISKDVVDENNMNKKLFLDSLRKALAGHGGSRQLTESAAIACVKLCKASTYINWEDNSVIFLLVQSMVVDLKNLLFNPSKPFSRGSQPADVDLMIDCLVSCFRISPHNNQHFKICLAQNSPSTFHYVLVNSLHRIITNSALDWWPKIDAVYCHSVELRNMFGETLHKAVQGCGAHPAIRMAPSLTFKEKVTSLKFKEKPTDLETRSYKYLLLSMVKLIHADPKLLLCNPRKQGPETQGSTAELITGLVQLVPQSHMPEIAQEAMEALLVLHQLDSIDLWNPDAPVETFWEISSQMLFYICKKLTSHQMLSSTEILKWLREILICRNKFLLKNKQADRSSCHFLLFYGVGCDIPSSGNTSQMSMDHEELLRTPGASLRKGKGNSSMDSAAGCSGTPPICRQAQTKLEVALYMFLWNPDTEAVLVAMSCFRHLCEEADIRCGVDEVSVHNLLPNYNTFMEFASVSNMMSTGRAALQKRVMALLRRIEHPTAGNTEAWEDTHAKWEQATKLILNYPKAKMEDGQAAESLHKTIVKRRMSHVSGGGSIDLSDTDSLQEWINMTGFLCALGGVCLQQRSNSGLATYSPPMGPVSERKGSMISVMSSEGNADTPVSKFMDRLLSLMVCNHEKVGLQIRTNVKDLVGLELSPALYPMLFNKLKNTISKFFDSQGQVLLTDTNTQFVEQTIAIMKNLLDNHTEGSSEHLGQASIETMMLNLVRYVRVLGNMVHAIQIKTKLCQLVEVMMARRDDLSFCQEMKFRNKMVEYLTDWVMGTSNQAADDDVKCLTRDLDQASMEAVVSLLAGLPLQPEEGDGVELMEAKSQLFLKYFTLFMNLLNDCSEVEDESAQTGGRKRGMSRRLASLRHCTVLAMSNLLNANVDSGLMHSIGLGYHKDLQTRATFMEVLTKILQQGTEFDTLAETVLADRFERLVELVTMMGDQGELPIAMALANVVPCSQWDELARVLVTLFDSRHLLYQLLWNMFSKEVELADSMQTLFRGNSLASKIMTFCFKVYGATYLQKLLDPLLRIVITSSDWQHVSFEVDPTRLEPSESLEENQRNLLQMTEKFFHAIISSSSEFPPQLRSVCHCLYQVVSQRFPQNSIGAVGSAMFLRFINPAIVSPYEAGILDKKPPPRIERGLKLMSKILQSIANHVLFTKEEHMRPFNDFVKSNFDAARRFFLDIASDCPTSDAVNHSLSFISDGNVLALHRLLWNNQEKIGQYLSSNRDHKAVGRRPFDKMATLLAYLGPPEHKPVADTHWSSLNLTSSKFEEFMTRHQVHEKEEFKALKTLSIFYQAGTSKAGNPIFYYVARRFKTGQINGDLLIYHVLLTLKPYYAKPYEIVVDLTHTGPSNRFKTDFLSKWFVVFPGFAYDNVSAVYIYNCNSWVREYTKYHERLLTGLKGSKRLVFIDCPGKLAEHIEHEQQKLPAATLALEEDLKVFHNALKLAHKDTKVSIKVGSTAVQVTSAERTKVLGQSVFLNDIYYASEIEEICLVDENQFTLTIANQGTPLTFMHQECEAIVQSIIHIRTRWELSQPDSIPQHTKIRPKDVPGTLLNIALLNLGSSDPSLRSAAYNLLCALTCTFNLKIEGQLLETSGLCIPANNTLFIVSISKTLAANEPHLTLEFLEECISGFSKSSIELKHLCLEYMTPWLSNLVRFCKHNDDAKRQRVTAILDKLITMTINEKQMYPSIQAKIWGSLGQITDLLDVVLDSFIKTSATGGLGSIKAEVMADTAVALASGNVKLVSSKVIGRMCKIIDKTCLSPTPTLEQHLMWDDIAILARYMLMLSFNNSLDVAAHLPYLFHVVTFLVATGPLSLRASTHGLVINIIHSLCTCSQLHFSEETKQVLRLSLTEFSLPKFYLLFGISKVKSAAVIAFRSSYRDRSFSPGSYERETFALTSLETVTEALLEIMEACMRDIPTCKWLDQWTELAQRFAFQYNPSLQPRALVVFGCISKRVSHGQIKQIIRILSKALESCLKGPDTYNSQVLIEATVIALTKLQPLLNKDSPLHKALFWVAVAVLQLDEVNLYSAGTALLEQNLHTLDSLRIFNDKSPEEVFMAIRNPLEWHCKQMDHFVGLNFNSNFNFALVGHLLKGYRHPSPAIVARTVRILHTLLTLVNKHRNCDKFEVNTQSVAYLAALLTVSEEVRSRCSLKHRKSLLLTDISMENVPMDTYPIHHGDPSYRTLKETQPWSSPKGSEGYLAATYPTVGQTSPRARKSMSLDMGQPSQANTKKLLGTRKSFDHLISDTKAPKRQEMESGITTPPKMRRVAETDYEMETQRISSSQQHPHLRKVSVSESNVLLDEEVLTDPKIQALLLTVLATLVKYTTDEFDQRILYEYLAEASVVFPKVFPVVHNLLDSKINTLLSLCQDPNLLNPIHGIVQSVVYHEESPPQYQTSYLQSFGFNGLWRFAGPFSKQTQIPDYAELIVKFLDALIDTYLPGIDEETSEESLLTPTSPYPPALQSQLSITANLNLSNSMTSLATSQHSPGIDKENVELSPTTGHCNSGRTRHGSASQVQKQRSAGSFKRNSIKKIV

SEQ ID NO: 5862 - DNA, 8457 bp, Artificial Sequence
  derived and/or modified sequence
atggccgcccacagacccgtggagtgggtgcaggccgtggtgagcagattcgacgagcagctgcccatcaagaccggccagcagaacacccacaccaaggtgagcaccgagcacaacaaggagtgcctgatcaacatcagcaagtacaagttcagcctggtgatcagcggcctgaccaccatcctgaagaacgtgaacaacatgagaatcttcggcgaggccgccgagaagaacctgtacctgagccagctgatcatcctggacaccctggagaagtgcctggccggccagcccaaggacaccatgagactggacgagaccatgctggtgaagcagctgctgcccgagatctgccacttcctgcacacctgcagagagggcaaccagcacgccgccgagctgagaaacagcgccagcggcgtgctgttcagcctgagctgcaacaacttcaacgccgtgttcagcagaatcagcaccagactgcaggagctgaccgtgtgcagcgaggacaacgtggacgtgcacgacatcgagctgctgcagtacatcaacgtggactgcgccaagctgaagagactgctgaaggagaccgccttcaagttcaaggccctgaagaaggtggcccagctggccgtgatcaacagcctggagaaggccttctggaactgggtggagaactaccccgacgagttcaccaagctgtaccagatcccccagaccgacatggccgagtgcgccgagaagctgttcgacctggtggacggcttcgccgagagcaccaagagaaaggccgccgtgtggcccctgcagatcatcctgctgatcctgtgccccgagatcatccaggacatcagcaaggacgtggtggacgagaacaacatgaacaagaagctgttcctggacagcctgagaaaggccctggccggccacggcggcagcagacagctgaccgagagcgccgccatcgcctgcgtgaagctgtgcaaggccagcacctacatcaactgggaggacaacagcgtgatcttcctgctggtgcagagcatggtggtggacctgaagaacctgctgttcaaccccagcaagcccttcagcagaggcagccagcccgccgacgtggacctgatgatcgactgcctggtgagctgcttcagaatcagcccccacaacaaccagcacttcaagatctgcctggcccagaacagccccagcaccttccactacgtgctggtgaacagcctgcacagaatcatcaccaacagcgccctggactggtggcccaagatcgacgccgtgtactgccacagcgtggagctgagaaacatgttcggcgagaccctgcacaaggccgtgcagggctgcggcgcccaccccgccatcagaatggcccccagcctgaccttcaaggagaaggtgaccagcctgaagttcaaggagaagcccaccgacctggagaccagaagctacaagtacctgctgctgagcatggtgaagctgatccacgccgaccccaagctgctgctgtgcaaccccagaaagcagggccccgagacccagggcagcaccgccgagctgatcaccggcctggtgcagctggtgccccagagccacatgcccgagatcgcccaggaggccatggaggccctgctggtgctgcaccagctggacagcatcgacctgtggaaccccgacgcccccgtggagaccttctgggagatcagcagccagatgctgttctacatctgcaagaagctgaccagccaccagatgctgagcagcaccgagatcctgaagtggctgagagagatcctgatctgcagaaacaagttcctgctgaagaacaagcaggccgacagaagcagctgccacttcctgctgttctacggcgtgggctgcgacatccccagcagcggcaacaccagccagatgagcatggaccacgaggagctgctgagaacccccggcgccagcctgagaaagggcaagggcaacagcagcatggacagcgccgccggctgcagcggcaccccccccatctgcagacaggcccagaccaagctggaggtggccctgtacatgttcctgtggaaccccgacaccgaggccgtgctggtggccatgagctgcttcagacacctgtgcgaggaggccgacatcagatgcggcgtggacgaggtgagcgtgcacaacctgctgcccaactacaacaccttcatggagttcgccagcgtgagcaacatgatgagcaccggcagagccgccctgcagaagagagtgatggccctgctgagaagaatcgagcaccccaccgccggcaacaccgaggcctgggaggacacccacgccaagtgggagcaggccaccaagctgatcctgaactaccccaaggccaagatggaggacggccaggccgccgagagcctgcacaagaccatcgtgaagagaagaatgagccacgtgagcggcggcggcagcatcgacctgagcgacaccgacagcctgcaggagtggatcaacatgaccggcttcctgtgcgccctgggcggcgtgtgcctgcagcagagaagcaacagcggcctggccacctacagcccccccatgggccccgtgagcgagagaaagggcagcatgatcagcgtgatgagcagcgagggcaacgccgacacccccgtgagcaagttcatggacagactgctgagcctgatggtgtgcaaccacgagaaggtgggcctgcagatcagaaccaacgtgaaggacctggtgggcctggagctgagccccgccctgtaccccatgctgttcaacaagctgaagaacaccatcagcaagttcttcgacagccagggccaggtgctgctgaccgacaccaacacccagttcgtggagcagaccatcgccatcatgaagaacctgctggacaaccacaccgagggcagcagcgagcacctgggccaggccagcatcgagaccatgatgctgaacctggtgagatacgtgagagtgctgggcaacatggtgcacgccatccagatcaagaccaagctgtgccagctggtggaggtgatgatggccagaagagacgacctgagcttctgccaggagatgaagttcagaaacaagatggtggagtacctgaccgactgggtgatgggcaccagcaaccaggccgccgacgacgacgtgaagtgcctgaccagagacctggaccaggccagcatggaggccgtggtgagcctgctggccggcctgcccctgcagcccgaggagggcgacggcgtggagctgatggaggccaagagccagctgttcctgaagtacttcaccctgttcatgaacctgctgaacgactgcagcgaggtggaggacgagagcgcccagaccggcggcagaaagagaggcatgagcagaagactggccagcctgagacactgcaccgtgctggccatgagcaacctgctgaacgccaacgtggacagcggcctgatgcacagcatcggcctgggctaccacaaggacctgcagaccagagccaccttcatggaggtgctgaccaagatcctgcagcagggcaccgagttcgacaccctggccgagaccgtgctggccgacagattcgagagactggtggagctggtgaccatgatgggcgaccagggcgagctgcccatcgccatggccctggccaacgtggtgccctgcagccagtgggacgagctggccagagtgctggtgaccctgttcgacagcagacacctgctgtaccagctgctgtggaacatgttcagcaaggaggtggagctggccgacagcatgcagaccctgttcagaggcaacagcctggccagcaagatcatgaccttctgcttcaaggtgtacggcgccacctacctgcagaagctgctggaccccctgctgagaatcgtgatcaccagcagcgactggcagcacgtgagcttcgaggtggaccccaccagactggagcccagcgagagcctggaggagaaccagagaaacctgctgcagatgaccgagaagttcttccacgccatcatcagcagcagcagcgagttccccccccagctgagaagcgtgtgccactgcctgtaccaggtggtgagccagagattcccccagaacagcatcggcgccgtgggcagcgccatgttcctgagattcatcaaccccgccatcgtgagcccctacgaggccggcatcctggacaagaagcccccccccagaatcgagagaggcctgaagctgatgagcaagatcctgcagagcatcgccaaccacgtgctgttcaccaaggaggagcacatgagacccttcaacgacttcgtgaagagcaacttcgacgccgccagaagattcttcctggacatcgccagcgactgccccaccagcgacgccgtgaaccacagcctgagcttcatcagcgacggcaacgtgctggccctgcacagactgctgtggaacaaccaggagaagatcggccagtacctgagcagcaacagagaccacaaggccgtgggcagaagacccttcgacaagatggccaccctgctggcctacctgggcccccccgagcacaagcccgtggccgacacccactggagcagcctgaacctgaccagcagcaagttcgaggagttcatgaccagacaccaggtgcacgagaaggaggagttcaaggccctgaagaccctgagcatcttctaccaggccggcaccagcaaggccggcaaccccatcttctactacgtggccagaagattcaagaccggccagatcaacggcgacctgctgatctaccacgtgctgctgaccctgaagccctactacgccaagccctacgagatcgtggtggacctgacccacaccggccccagcaacagattcaagaccgacttcctgagcaagtggttcgtggtgttccccggcttcgcctacgacaacgtgagcgccgtgtacatctacaactgcaacagctgggtgagagagtacaccaagtaccacgagagactgctgaccggcctgaagggcagcaagagactggtgttcatcgactgccccggcaagctggccgagcacatcgagcacgagcagcagaagctgcccgccgccaccctggccctggaggaggacctgaaggtgttccacaacgccctgaagctggcccacaaggacaccaaggtgagcatcaaggtgggcagcaccgccgtgcaggtgaccagcgccgagagaaccaaggtgctgggccagagcgtgttcctgaacgacatctactacgccagcgagatcgaggagatctgcctggtggacgagaaccagttcaccctgaccatcgccaaccagggcacccccctgaccttcatgcaccaggagtgcgaggccatcgtgcagagcatcatccacatcagaaccagatgggagctgagccagcccgacagcatcccccagcacaccaagatcagacccaaggacgtgcccggcaccctgctgaacatcgccctgctgaacctgggcagcagcgaccccagcctgagaagcgccgcctacaacctgctgtgcgccctgacctgcaccttcaacctgaagatcgagggccagctgctggagaccagcggcctgtgcatccccgccaacaacaccctgttcatcgtgagcatcagcaagaccctggccgccaacgagccccacctgaccctggagttcctggaggagtgcatcagcggcttcagcaagagcagcatcgagctgaagcacctgtgcctggagtacatgaccccctggctgagcaacctggtgagattctgcaagcacaacgacgacgccaagagacagagagtgaccgccatcctggacaagctgatcaccatgaccatcaacgagaagcagatgtaccccagcatccaggccaagatctggggcagcctgggccagatcaccgacctgctggacgtggtgctggacagcttcatcaagaccagcgccaccggcggcctgggcagcatcaaggccgaggtgatggccgacaccgccgtggccctggccagcggcaacgtgaagctggtgagcagcaaggtgatcggcagaatgtgcaagatcatcgacaagacctgcctgagccccacccccaccctggagcagcacctgatgtgggacgacatcgccatcctggccagatacatgctgatgctgagcttcaacaacagcctggacgtggccgcccacctgccctacctgttccacgtggtgaccttcctggtggccaccggccccctgagcctgagagccagcacccacggcctggtgatcaacatcatccacagcctgtgcacctgcagccagctgcacttcagcgaggagaccaagcaggtgctgagactgagcctgaccgagttcagcctgcccaagttctacctgctgttcggcatcagcaaggtgaagagcgccgccgtgatcgccttcagaagcagctacagagacagaagcttcagccccggcagctacgagagagagaccttcgccctgaccagcctggagaccgtgaccgaggccctgctggagatcatggaggcctgcatgagagacatccccacctgcaagtggctggaccagtggaccgagctggcccagagattcgccttccagtacaaccccagcctgcagcccagagccctggtggtgttcggctgcatcagcaagagagtgagccacggccagatcaagcagatcatcagaatcctgagcaaggccctggagagctgcctgaagggccccgacacctacaacagccaggtgctgatcgaggccaccgtgatcgccctgaccaagctgcagcccctgctgaacaaggacagccccctgcacaaggccctgttctgggtggccgtggccgtgctgcagctggacgaggtgaacctgtacagcgccggcaccgccctgctggagcagaacctgcacaccctggacagcctgagaatcttcaacgacaagagccccgaggaggtgttcatggccatcagaaaccccctggagtggcactgcaagcagatggaccacttcgtgggcctgaacttcaacagcaacttcaacttcgccctggtgggccacctgctgaagggctacagacaccccagccccgccatcgtggccagaaccgtgagaatcctgcacaccctgctgaccctggtgaacaagcacagaaactgcgacaagttcgaggtgaacacccagagcgtggcctacctggccgccctgctgaccgtgagcgaggaggtgagaagcagatgcagcctgaagcacagaaagagcctgctgctgaccgacatcagcatggagaacgtgcccatggacacctaccccatccaccacggcgaccccagctacagaaccctgaaggagacccagccctggagcagccccaagggcagcgagggctacctggccgccacctaccccaccgtgggccagaccagccccagagccagaaagagcatgagcctggacatgggccagcccagccaggccaacaccaagaagctgctgggcaccagaaagagcttcgaccacctgatcagcgacaccaaggcccccaagagacaggagatggagagcggcatcaccaccccccccaagatgagaagagtggccgagaccgactacgagatggagacccagagaatcagcagcagccagcagcacccccacctgagaaaggtgagcgtgagcgagagcaacgtgctgctggacgaggaggtgctgaccgaccccaagatccaggccctgctgctgaccgtgctggccaccctggtgaagtacaccaccgacgagttcgaccagagaatcctgtacgagtacctggccgaggccagcgtggtgttccccaaggtgttccccgtggtgcacaacctgctggacagcaagatcaacaccctgctgagcctgtgccaggaccccaacctgctgaaccccatccacggcatcgtgcagagcgtggtgtaccacgaggagagccccccccagtaccagaccagctacctgcagagcttcggcttcaacggcctgtggagattcgccggccccttcagcaagcagacccagatccccgactacgccgagctgatcgtgaagttcctggacgccctgatcgacacctacctgcccggcatcgacgaggagaccagcgaggagagcctgctgacccccaccagcccctacccccccgccctgcagagccagctgagcatcaccgccaacctgaacctgagcaacagcatgaccagcctggccaccagccagcacagccccggcatcgacaaggagaacgtggagctgagccccaccaccggccactgcaacagcggcagaaccagacacggcagcgccagccaggtgcagaagcagagaagcgccggcagcttcaagagaaacagcatcaagaagatcgtgtag

SEQ ID NO: 5863 - DNA, 8457 bp, Artificial Sequence
  derived and/or modified sequence
atggccgctcacaggcccgtcgagtgggttcaggctgtcgtctccaggttcgacgagcagttaccaatcaaaaccgggcaacagaacacacatacgaaagttagcaccgagcacaataaggagtgtctgattaatatctcaaaatataagtttagtttggtcatcagcggtctgactactattctcaagaacgtcaataacatgcgcattttcggggaggccgccgagaagaacctttacctgagccagcttataattctggacactctggagaagtgtcttgctgggcaaccgaaggacaccatgaggctcgacgagaccatgctggtgaagcagttgctccccgaaatctgccacttcctgcatacctgcagggagggcaaccagcatgctgccgagttacggaactctgcttccggcgtactgttcagcctctcctgtaataacttcaacgccgtcttctctaggataagtactcgcctgcaagagttaaccgtgtgcagcgaggataatgtggacgtacatgatattgaactattacagtacattaacgtggactgtgcaaaattgaagaggttgctcaaggagacagcgtttaaattcaaagctctgaaaaaggtggcccaactggctgtgatcaattcactggagaaggcattctggaactgggtggaaaactaccctgacgaatttactaaactctatcagatcccccagacagacatggccgagtgcgcggagaagctttttgacctcgtggatggctttgccgagtccacaaaaagaaaagctgccgtctggccactccaaataatcctgctgattctgtgccctgaaattatccaggatatcagcaaggacgtcgttgatgagaacaacatgaacaagaagctgtttttggattcactccggaaggccctcgccggccacggaggctctcggcagctgaccgaatcagccgccattgcgtgtgtgaagctgtgtaaggcctctacatatatcaattgggaggataacagcgttatatttttgctggtgcagtcaatggtcgtcgatctgaagaatcttcttttcaaccctagtaaacccttctcgcggggcagccaacccgcggatgtagatctcatgatcgattgtctcgtgtcctgtttcaggatatcccctcacaataaccagcacttcaaaatctgtctcgcgcagaatagcccaagcactttccactatgtcctggtaaatagcctccacagaattattactaactcagcgctcgactggtggcctaaaatagatgccgtctattgtcactccgttgaattgagaaatatgtttggagagacccttcacaaggccgttcaggggtgtggggcgcaccctgccatcagaatggcaccatcattgactttcaaagagaaagtcacgtcacttaagttcaaagagaaaccgacggacctggaaacccgatcatacaagtaccttttgctgtctatggtgaagctcattcatgccgatcccaagctgcttttgtgtaaccctcggaagcaaggaccagaaactcagggcagcacagcagaactcataaccggtctcgtccagctggttcctcagagccacatgcccgaaatcgcccaagaggcaatggaggccctcttggtgttgcaccagcttgacagcatagacctctggaacccggacgcacccgtggaaaccttctgggagatcagttcacagatgctattctacatatgcaaaaaattgactagccaccagatgctgtcatctacagaaattctgaagtggcttcgggagatactgatctgcaggaacaaattcttgttaaagaataagcaagccgacagaagctcttgccacttccttctcttttatggcgtggggtgcgacattccatcctcaggcaataccagccagatgtctatggatcatgaagagctgctacggacacccggcgcttcactccgcaagggcaaggggaatagcagcatggactccgcagccgggtgttccggcacaccacccatttgccggcaggctcagacgaagttagaggtggccctctacatgttcctttggaatccggataccgaggcggttctggtggcaatgtcctgctttaggcacttgtgtgaggaggcagacattagatgcggagtggacgaagtctctgtgcacaatctgctgcccaactacaataccttcatggagtttgcctccgtaagcaatatgatgtccaccggacgggctgcactgcaaaagagagtcatggctttattacgccgcatcgagcacccgactgcaggtaacaccgaagcatgggaagatacccacgctaagtgggagcaggccaccaagttgattttgaactacccaaaggccaaaatggaagacggccaggctgccgaatcactgcacaagaccatcgttaaaagacgcatgtcacacgtaagtggaggcggcagcattgatttaagtgataccgattcactgcaggagtggatcaacatgacgggatttctatgtgcgcttggtggggtgtgccttcagcaaagatccaatagcggtctcgccacttatagcccaccgatgggacccgtgtcggaaagaaagggcagcatgatctccgtgatgtcctccgaaggcaacgccgacacgcctgtcagcaaattcatggatcgattgcttagtctgatggtgtgcaatcacgaaaaggtgggactgcagattaggacaaatgtgaaagatttagtcggtttggagttgtccccggccctctacccaatgcttttcaacaagctgaagaacactatttctaagttttttgatagccaagggcaggtactcctaactgacactaatacacagtttgttgagcagacaatagctattatgaaaaacctgcttgacaaccacacggaggggagctcagaacacttgggccaggcaagcatagaaactatgatgcttaacctggtgcggtacgtgcgggtcctgggcaacatggtccacgctatccaaatcaagacaaagctctgccagttagtcgaagtgatgatggcccgccgggacgatctctctttctgccaggaaatgaaattccgcaataagatggttgagtacctgacagactgggtcatggggactagcaatcaggcagctgacgatgatgtcaaatgcctgacacgggacttggatcaagcaagcatggaagcggtcgtaagtctgctggccgggcttccgctgcagccagaggagggcgacggagtcgagttaatggaggccaagtcacaactgttcctcaagtacttcacactctttatgaatttgctcaacgattgtagcgaggtcgaggatgaatcagcccagaccgggggacggaaacggggaatgtctaggcgactggcctctttgcggcattgtacagttctcgccatgtctaacctgcttaatgcgaatgtggattccggcctgatgcatagcatcggtctgggataccacaaagacctgcagacgcgggctacgtttatggaagtcctgactaagattctccagcaaggcacagagttcgacaccctcgccgaaaccgtgttagccgaccggttcgaacggctggtcgaactcgttacaatgatgggcgatcagggcgaacttcccatcgccatggctctagccaatgtcgtgccttgttcacaatgggatgaactggctagagtgttggtcactctgttcgacagtcggcatctgttataccagttgctttggaacatgtttagcaaggaggtcgagctggcagatagtatgcagaccctgttcagaggcaatagcctggcttctaaaataatgacattttgttttaaagtgtacggggccacgtatctgcaaaagttactggaccccctgctccggattgtaattacttcttccgattggcaacacgtatcattcgaggtcgatccaactcggctggagccatccgagtcacttgaagagaaccagcgtaatctgcttcaaatgacagagaagttcttccacgccatcatctccagttcctctgaattccctccccaactccggagtgtgtgccactgcctttaccaggtggtgtctcagcgcttccctcagaactcaattggagcagtgggaagcgcaatgttccttaggttcattaaccccgctattgtttctccctacgaagccgggatcctcgacaaaaagcctccacctcggatcgaaagaggcctgaagttgatgtctaagatattacagagcatcgcaaatcacgttctttttactaaagaagagcacatgagacccttcaatgactttgtgaagtccaacttcgatgccgcgagacggttcttccttgacatagccagtgactgtcctactagtgacgccgtaaaccacagcctgagcttcattagcgatggtaatgtattagcgctccatcgtctcttgtggaataatcaggaaaaaatcggccaatacctgagctctaatcgagaccacaaagccgttggtcgacgcccttttgacaagatggcaaccctcctcgcatatctcgggcctcccgaacacaagcctgttgctgatactcactggagttctttgaatctgacctcaagcaaatttgaagaattcatgactcggcaccaagtgcacgagaaggaagagtttaaggccctaaaaaccttatccattttctaccaggcgggcacgtccaaggccggtaatcccattttctactatgtcgccagacggttcaagacaggtcaaatcaatggggacctgctgatttaccacgtcctcctaaccctgaagccttactacgccaaaccttacgagatcgtggtcgatctgacccacactgggccaagcaatcgcttcaaaactgactttttgtcaaagtggtttgtggtgttccctggcttcgcctacgacaacgtttctgctgtctacatatataattgtaatagttgggtgcgtgagtacacaaaataccatgagcgtttgctaactggcttgaaaggcagcaagcgacttgtctttattgattgccccggtaagctggccgagcatatcgaacacgagcagcaaaaactccctgctgcgaccctcgcactggaagaggatctcaaagtgttccacaatgccctgaagctggctcacaaggacacaaaggtgtccataaaggtaggctctacagcagtgcaggtgacatctgccgaaagaaccaaggtactgggtcagagcgtgtttctgaatgacatttattacgcctctgagattgaggagatctgcctggtcgatgagaaccagtttaccctcacaatcgctaatcaggggacaccgctgacttttatgcatcaggaatgcgaggccatagtgcagtccatcatacatatccgcacgagatgggagctgtcacagccggatagtatacctcagcacactaaaatcaggcctaaagacgtccccggaacgcttctgaatattgctctgctaaatcttggctccagcgatccttcactccggtcggccgcctacaatctgctctgcgccttgacgtgtacttttaatctaaaaatcgaaggccaactgctcgaaacaagtggactctgtattccagcaaataatactctgtttatcgtttcgataagtaagactcttgccgctaatgaaccacacctgacactggagtttttggaggagtgtatctcgggcttcagcaagagcagtatcgagctgaaacatttatgcttagaatacatgacaccttggttatccaatctggtgcgtttttgtaaacataatgacgacgctaaacgccagcgtgtgaccgccattctggacaagcttattacaatgacgattaatgagaaacaaatgtacccttccattcaggcaaaaatatggggatcacttgggcaaattaccgatctgctggacgtcgtgctggactcttttattaagacctcagccacgggagggttggggagcatcaaagcggaggtcatggctgacactgctgtggcactcgcctcagggaacgtgaaactagtgtcaagcaaggtgattggtcggatgtgtaagatcattgataagacctgcctgagcccgacccctactttggaacagcatctcatgtgggacgacatcgcgatcctggcgaggtatatgctcatgctcagtttcaacaactctttagatgtggccgcccacctgccctatctgttccatgtagtgaccttcctggtggccacaggtcctttaagcttgcgcgcttccacgcacgggctcgtaattaatattatccattcactgtgcacctgtagtcagctgcacttcagtgaagaaactaagcaagtcctccggctgtcactcaccgagttctctttaccaaagttttatctcctcttcgggatctcaaaagtgaagtcggccgccgtcatcgcattcaggtcatcttacagagatcgaagtttctcgcccgggtcttacgagcgggagacgtttgccctaacttccctggaaactgtgacagaagcccttctggagataatggaggcatgcatgcgagatatccctacctgcaagtggctcgatcagtggaccgagctagcccagaggttcgcttttcagtataacccatctcttcagccaagggcactcgtggtgtttggttgtatttcgaagagagttagccatggccagatcaaacagattatacgtatactgtcaaaggcactagagagctgtctgaagggccccgacacatacaactcacaggtcctcattgaagctaccgtcatcgccttaactaaactgcaacctctcttgaataaagactccccactgcacaaggctctcttttgggtggctgttgccgtcctgcaattagatgaagtaaatttgtacagcgccggaactgccttgctggaacagaacctccacactttggactcgttaaggatctttaatgataagagccctgaggaggtgtttatggccattcgcaacccactagagtggcactgcaaacagatggatcactttgtgggcctgaactttaattcaaacttcaacttcgcccttgtggggcatctcctgaaagggtacaggcacccaagcccagccatcgtggcgcggactgtgcggattctgcatactctactcaccctggtcaataagcaccgcaattgtgataagtttgaggtcaatacacagtcggtcgcctatttggctgccctgctgactgttagtgaagaagttaggtcccgctgcagtttgaagcatcgtaagagcttactgttgactgatatttctatggagaatgtgcctatggatacctatcccattcatcacggcgatccctcctatagaacactaaaggagactcagccatggtccagccctaaaggatcagaaggctacttggccgcaacgtaccctaccgtcggccagaccagccctagagctcgaaagtcaatgtcattagatatggggcagccaagtcaggcgaatacaaaaaagctcctgggtactcggaaatccttcgatcacttgatttccgataccaaggcaccaaaacgacaggagatggaatcaggtataacgactccgcccaagatgagacgggtcgccgagacagactacgagatggagacgcaacgtatctcttctagccaacagcatccacatctccgcaaggtcagcgtcagcgaaagcaatgtactgcttgacgaggaagtgctcactgaccccaaaatccaggccctgctgctgacagtacttgcaacgctggttaaatacactacagatgagttcgaccaaaggatcttatatgagtacctggctgaagcttcggtagtgttccccaaggtttttccagtcgtccacaacctgctggattctaaaattaatacactgcttagcctgtgccaggaccccaacctgctgaatcccattcacggaattgtgcaatctgtggtgtaccacgaggagagcccgccacaatatcagacatcttacctgcaatcgttcggctttaacggactgtggagatttgcgggaccgtttagcaaacagacgcagatacctgattacgcggaactgattgtgaaattcctcgacgcattgatcgatacgtatctgcctggaatagatgaggagacctctgaggaaagcctgctaaccccaacctccccatatccccccgcgctgcaatcacagttgagtatcacagccaatctgaatctgtccaacagcatgacttctctggccacttcgcaacattcacctgggatcgataaggaaaacgtggagctctcccccaccacaggacattgtaactctggccgaacacgccacgggtctgctagccaggtacagaagcaaaggtctgcaggcagcttcaagcggaacagtatcaagaaaatcgtgtag

SEQ ID NO: 5864 - DNA, 8457 bp, Artificial Sequence
  derived and/or modified sequence
atggccgcccacaggcctgtggagtgggtgcaggccgtggtgtccagatttgatgagcagctgcccatcaagacaggccagcagaacacccacaccaaggtgtccacagagcacaacaaggaatgtctcatcaacatcagcaagtacaagttcagcctggtgatcagcggcctgaccaccatcctgaagaatgtgaacaacatgaggatctttggagaggccgctgagaagaacctgtacctgagccagctgatcatcctggacaccctggagaagtgcctggccggccagcccaaggacaccatgaggctggatgagaccatgctggtgaagcagctgctgcctgagatctgccacttcctgcacacctgccgggagggcaaccagcacgccgctgagctgagaaattctgccagcggcgtgctcttcagcctgagctgcaacaacttcaatgctgtgttcagccgcatcagcacccggctgcaggagctgactgtgtgcagtgaagataatgtggatgtgcatgacatcgagctgctgcagtacatcaacgtggactgtgccaagctgaagaggctgctgaaggagacagccttcaagttcaaggccctgaagaaggtggcccagctggccgtcatcaacagcctggagaaggccttctggaactgggtggagaactacccagatgagttcaccaagctgtaccagatcccccagacagacatggccgagtgtgccgagaagctgtttgacctggtggatggctttgctgagagcaccaagaggaaggctgctgtgtggcccctgcagatcatcctgctgatcctgtgcccagagatcatccaggacatcagcaaggatgtggtggatgagaacaacatgaacaagaagctgttcctggacagcctgaggaaggccctggccggccacggcggcagccggcagctgacagaatctgctgccatcgcctgtgtgaagctgtgcaaggccagcacctacatcaactgggaggacaacagcgtcatcttcctgctggtgcagagcatggtggtggacctgaagaacctgctcttcaaccccagcaagcccttcagccggggcagccagcctgcagatgtggacctgatgattgactgcctggtgtcctgcttccgcatcagcccccacaacaaccagcacttcaagatctgcctggcccagaacagccccagcaccttccactacgtgctggtgaacagcctgcaccgcatcatcaccaacagcgccctggactggtggcccaagattgatgctgtgtactgccacagcgtggagctgaggaacatgtttggagagaccctgcacaaggctgtgcagggctgtggggcccacccagccatccgcatggcccccagcctgaccttcaaggagaaggtgaccagcctgaagttcaaggagaagcccacagacctggagaccaggagctacaagtacctgctgctgtccatggtgaagctgattcatgctgaccccaagctgctgctgtgcaaccccaggaagcagggccctgagacccagggcagcacagctgagctgatcaccggcctggtgcagctggtgccccagagccacatgcctgagatcgcccaggaggccatggaggccctgctggtgctgcaccagctggacagcattgacctgtggaacccagatgcccctgtggagaccttctgggagatcagcagccagatgctgttctacatctgcaagaagctgaccagccaccagatgctgagcagcacagagatcctgaagtggctgcgggagatcctgatctgcaggaacaagttcctgctgaagaacaagcaggccgacaggagcagctgccacttcctgctcttctacggcgtgggctgtgacatccccagcagcggcaacaccagccagatgtccatggaccacgaggagctgctgcggacccctggggccagcctgaggaagggcaagggcaacagctccatggattctgctgctggctgcagcggcaccccacccatctgccggcaggcccagaccaagctggaggtggccctgtacatgttcctgtggaacccagacacagaggccgtgctggtggccatgagctgcttccgccacctgtgtgaggaggccgacatccgctgtggggtggatgaggtgtctgtgcacaacctgctgcccaactacaacaccttcatggagtttgcctctgtgagcaacatgatgagcacaggccgggccgccctgcagaagagggtgatggccctgctgcggcgcatcgagcaccccacagctggcaacacagaggcctgggaggacacccacgccaagtgggagcaggccaccaagctgatcctgaactaccccaaggccaagatggaggatggccaggccgctgagagcctgcacaagaccatcgtgaagaggaggatgagccacgtgtctgggggcggcagcattgacctgagtgacacagacagcctgcaggagtggatcaacatgacaggcttcctgtgtgccctgggcggcgtgtgcctgcagcagaggagcaacagcggcctggccacctacagcccccccatgggccctgtgtctgagaggaagggctccatgatctctgtgatgagcagcgagggcaatgctgacacccctgtgtccaagttcatggaccggctgctgagcctgatggtgtgcaaccacgagaaggtgggcctgcagatccgcaccaacgtgaaggacctggtgggcctggagctgagccctgccctgtaccccatgctgttcaacaagctgaagaacaccatcagcaagttctttgacagccagggccaggtgctgctgacagacaccaacacccagtttgtggagcagaccatcgccatcatgaagaacctgctggacaaccacacagagggcagcagcgagcacctgggccaggccagcattgagaccatgatgctgaacctggtgcgctacgtgcgggtgctgggcaacatggtgcacgccatccagatcaagaccaagctgtgccagctggtggaggtgatgatggccaggagagatgacctgtccttctgccaggagatgaagttcaggaacaagatggtggagtacctgacagactgggtgatgggcaccagcaaccaggccgcagatgatgatgtgaagtgcctgacccgggacctggaccaggcctccatggaggccgtggtgtccctgctggccggcctgcccctgcagcctgaggagggagatggagtggagctgatggaggccaagagccagctgttcctgaagtacttcaccctcttcatgaacctgctgaatgactgcagcgaggtggaggatgagagcgcccagacaggaggcaggaagaggggcatgagccggcggctggccagcctgcggcactgcaccgtgctggccatgagcaacctgctgaatgccaacgtggacagcggcctgatgcacagcatcggcctgggctaccacaaggacctgcagacccgggccaccttcatggaggtgctgaccaagatcctgcagcagggcacagaatttgacaccctggccgagaccgtgctggccgacagatttgagcggctggtggagctggtgaccatgatgggagaccagggcgagctgcccatcgccatggccctggccaacgtggtgccctgcagccagtgggatgagctggcccgggtgctggtgaccctgtttgacagccgccacctgctgtaccagctgctgtggaacatgttcagcaaggaggtggagctggccgacagcatgcagaccctcttccggggcaacagcctggccagcaagatcatgaccttctgcttcaaggtgtatggagccacctacctgcagaagctgctggaccccctgctgagaattgtcatcaccagcagtgactggcagcacgtgtcctttgaggtggaccccacccggctggagcccagcgagagcctggaggagaaccagaggaacctgctgcagatgacagagaagttcttccacgccatcatcagcagcagcagcgagttccccccccagctgcggtctgtgtgccactgcctgtaccaggtggtgtcccagcgcttcccccagaacagcattggagctgtgggcagcgccatgttcctgcgcttcatcaacccagccatcgtgagcccctatgaagctggcatcctggacaagaagcccccaccccgcatcgagcggggcctgaagctgatgagcaagatcctgcagagcatcgccaaccacgtgctcttcaccaaggaggagcacatgaggcccttcaatgactttgtgaagagcaactttgatgctgcccggcgcttcttcctggacatcgccagtgactgccccaccagtgatgctgtgaaccacagcctgtccttcatcagtgatggaaatgtgctggccctgcaccggctgctgtggaacaaccaggagaagattggccagtacctgagcagcaacagagaccacaaggctgtgggccggcggccctttgacaagatggccaccctgctggcctacctgggccccccagagcacaagcctgtggccgacacccactggagcagcctgaacctgaccagcagcaagtttgaggagttcatgaccaggcaccaggtgcatgagaaggaggagttcaaggccctgaagaccctgagcatcttctaccaggccggcaccagcaaggccggcaaccccatcttctactacgtggcccggcgcttcaagacaggccagatcaacggggacctgctgatctaccacgtgctgctgaccctgaagccctactatgccaagccctatgagatcgtggtggacctgacccacacaggccccagcaaccgcttcaagacagacttcctgagcaagtggtttgtggtgtttcctggctttgcctatgacaacgtgtctgctgtgtacatctacaactgcaacagctgggtgcgggagtacaccaagtaccacgagcggctgctgaccggcctgaagggcagcaagaggctggtgttcatcgactgccctgggaagctggccgagcacatcgagcacgagcagcagaagctgcctgctgccaccctggccctggaggaggacctgaaggtgttccacaatgccctgaagctggcccacaaggacaccaaggtgtccatcaaggtgggcagcacagctgtgcaggtgaccagcgctgagaggaccaaggtgctgggccagagcgtcttcctgaatgacatctactatgccagcgagattgaggagatctgcctggtggatgagaaccagttcaccctgaccatcgccaaccagggcacccccctgaccttcatgcaccaggagtgtgaggccatcgtgcagagcatcatccacatccgcacccgctgggagctgagccagcctgacagcatcccccagcacaccaagatccggcccaaggatgtgcccggcaccctgctgaacatcgccctgctgaacctgggcagcagtgaccccagcctgcggtctgctgcctacaacctgctgtgtgccctgacctgcaccttcaacctgaagattgagggccagctgctggagaccagcggcctgtgcatcccagccaacaacaccctcttcatcgtgtccatcagcaagaccctggccgccaatgagccccacctgaccctggagttcctggaggagtgcatcagcggcttcagcaagagcagcattgagctgaagcacctgtgcctggagtacatgaccccctggctgagcaacctggtgcgcttctgcaagcacaatgatgatgccaagaggcagagggtgacagccatcctggacaagctgatcaccatgaccatcaatgagaagcagatgtaccccagcatccaggccaagatctggggcagcctgggccagatcacagacctgctggatgtggtgctggacagcttcatcaagaccagcgccactggaggcctgggcagcatcaaggccgaggtgatggctgacacagctgtggccctggccagcggaaatgtgaagctggtgagcagcaaggtgattggccgcatgtgcaagatcatcgacaagacctgcctgagccccacccccaccctggagcagcacctgatgtgggatgacatcgccatcctggcccgctacatgctgatgctgtccttcaacaacagcctggatgtggccgcccacctgccctacctgttccacgtggtgaccttcctggtggccaccggccccctgagcctgcgggccagcacccacggcctggtgatcaacatcatccacagcctgtgcacctgcagccagctgcacttcagcgaggagaccaagcaggtgctgcggctgagcctgacagagttcagcctgcccaagttctacctgctgtttggcatcagcaaggtgaagtctgctgctgtgattgccttccgcagcagctacagagaccgctccttcagccctggcagctatgagcgggagacctttgccctgaccagcctggagaccgtgacagaggccctgctggagatcatggaggcctgcatgagggacatccccacctgcaagtggctggaccagtggacagagctggcccagagatttgccttccagtacaaccccagcctgcagccccgggccctggtggtgtttggctgcatcagcaagagggtgagccacggccagatcaagcagatcatccgcatcctgagcaaggccctggagagctgcctgaagggccctgacacctacaacagccaggtgctgattgaggccaccgtgattgccctgaccaagctgcagcccctgctgaacaaggacagccccctgcacaaggccctcttctgggtggccgtggccgtgctgcagctggatgaggtgaacctgtacagcgctggaacagccctgctggagcagaacctgcacaccctggacagcctgcgcatcttcaatgacaagagccctgaggaggtgttcatggccatccggaaccccctggagtggcactgcaagcagatggaccactttgtgggcctgaacttcaacagcaacttcaactttgccctggtgggccacctgctgaagggctaccgccaccccagccctgccatcgtggccaggacagtgcgcatcctgcacaccctgctgaccctggtgaacaagcacaggaactgtgacaagtttgaggtgaacacccagagcgtggcctacctggccgccctgctgactgtgtctgaggaggtgcgcagccgctgcagcctgaagcacaggaagagcctgctgctgacagacatctccatggagaatgtgcccatggacacctaccccatccaccacggggaccccagctaccgcaccctgaaggagacccagccctggagcagccccaagggcagcgagggctacctggccgccacctaccccaccgtgggccagaccagcccccgggccaggaagtccatgagcctggacatgggccagcccagccaggccaacaccaagaagctgctgggcaccaggaagagctttgaccacctgatcagtgacaccaaggcccccaagaggcaggagatggagagcggcatcaccaccccacccaagatgagaagagtggccgagacagattatgagatggagacccagaggatcagcagcagccagcagcacccccacctgaggaaggtgtctgtgtctgagagcaatgtgctgctggatgaggaggtgctgacagaccccaagatccaggccctgctgctgactgtgctggccaccctggtgaagtacaccacagatgaatttgaccagaggatcctgtatgagtacctggccgaggcctctgtggtgttccccaaggtgtttcctgtggtgcacaacctgctggacagcaagatcaacaccctgctgagcctgtgccaggaccccaacctgctgaaccccatccatggaattgtgcagagcgtggtgtaccacgaggagagccccccccagtaccagaccagctacctgcagagctttggcttcaacggcctgtggaggtttgctggccccttcagcaagcagacccagatcccagactatgcagagctgattgtgaagttcctggatgccctgattgacacctacctgcccggcattgatgaggagaccagcgaggagagcctgctgacccccaccagcccctaccccccagccctgcagagccagctgagcatcacagccaacctgaacctgagcaacagcatgaccagcctggccaccagccagcacagccctggcatcgacaaggaaaatgtggagctgagccccaccaccggccactgcaacagcggccgcaccaggcatggcagcgccagccaggtgcagaagcagaggtctgctggcagcttcaagagaaattccatcaagaagatcgtgtag

SEQ ID NO: 5865 - DNA, 8457 bp, Artificial Sequence
  derived and/or modified sequence
atggccgcccaccggcccgtggagtgggtgcaggccgtggtgagccgcttcgatgaacagctgcccatcaaaactggacagcagaacacacacactaaagttagcacggagcataacaaggagtgcctaatcaatatctccaagtataaattttccctcgtcatcagcggcctcaccaccatactgaaaaatgtgaacaatatgcgcatattcggagaggcggccgagaaaaatttgtatctgtcgcagctcataatcttagacaccctcgagaaatgcctggcagggcaacccaaggataccatgcggctggatgaaaccatgttggtcaagcagctgctgcctgaaatatgccacttcctgcacacatgtagggaaggaaaccagcacgcagccgagttgcgcaatagcgctagtggagtcctgttcagtctatcctgcaataactttaatgccgtcttctccagaatatcgacccgccttcaagaactgactgtgtgctcggaggataatgttgatgtccacgatattgagctgctacaatacattaacgtagattgcgcaaagcttaagaggttgctcaaggagaccgcttttaagttcaaagccttgaaaaaagttgcccagctggccgtcataaactccctggagaaagctttctggaattgggtggaaaattatccggacgaatttacaaaactgtaccagatccctcagaccgacatggccgaatgtgctgagaagctgttcgatttagtcgacgggttcgccgaatctacaaagcgaaaagccgcggtttggcccttgcagatcatacttctgattctctgccctgaaatcatccaggatatctccaaagacgtcgttgacgaaaacaatatgaacaaaaaattattcttggattctttgcgcaaggctctggccggccacggaggctcgcgccaactgaccgaatctgctgcgatcgcttgtgtgaaactatgtaaggccagcacatatataaactgggaggataacagtgtcatttttctcctagtgcaatcgatggtggtcgatctgaagaatttactgttcaacccctcaaaacctttctctagggggtcccagccagcagacgtggatctgatgattgattgtctcgtgtcttgctttagaatcagccctcataacaaccagcactttaagatctgtctcgcccagaattctcccagcacctttcactatgttctcgtgaattcgctgcacaggataattaccaacagcgctttggactggtggcccaagatcgatgccgtctattgccactcagtggaattacgcaacatgttcggagagacacttcacaaggcagtacagggatgcggggctcaccctgccatacgaatggctccatctttgacatttaaggagaaggtgacctctctcaaatttaaagaaaagcctaccgacttggagactagaagctacaaatatctcctgttgtcgatggtgaaactaatacacgccgaccccaaactcctgttgtgtaatccccgtaagcagggaccagaaacccagggttcaactgccgaactgattaccggattagtacagctggtgccacagtcccacatgcctgagatcgcacaggaagccatggaagctctcctggtactgcaccagctggactcaatagacttatggaatcccgacgcccctgtggagactttctgggaaatctcaagtcaaatgcttttttacatttgcaaaaaactcaccagccatcagatgctgtcaagcactgagatcctaaagtggctgagagaaatattaatctgtcgaaacaaattcctgctgaagaataaacaggctgatcggtcctcctgccatttcctgttgttttacggcgtcggatgtgatatcccgtcttcaggcaatacctcccagatgtccatggatcacgaggagttattgcgcacacccggggcatctctgcggaagggcaaggggaacagctccatggactccgcagctggatgcagtgggactccccccatttgtaggcaggcccagactaaactcgaggtggctttgtacatgttcttgtggaatcccgataccgaggccgtgctggtcgctatgagttgcttccgccacctgtgcgaagaagccgacatcagatgcggcgtagacgaggttagcgtgcataacctgctgcccaactataacacctttatggaatttgcatccgtgtctaacatgatgtctaccggccgagccgccctccaaaagcgtgttatggccttgcttagaagaatagagcatccaaccgccggaaatacagaggcgtgggaggatacacacgcaaagtgggaacaggcaactaaactcatcctaaactaccccaaagcgaagatggaggacggacaggccgcggaatctctgcacaagaccatcgtaaagcgaagaatgtcacacgtgtctgggggtggatccatcgatctgtcggatacggactccctccaagagtggataaacatgaccggcttcctgtgtgcccttggtggcgtctgtctgcagcagcgaagcaattctgggctcgcaacatacagcccacccatggggcccgtgtcagaacggaaggggtccatgatctccgttatgtcatccgaaggtaatgccgatacgccagtgagcaaatttatggataggctgctgtccctcatggtctgtaaccacgaaaaggtcgggctacaaatcaggactaacgtaaaggatttggtggggctcgaactgtcacccgccctctatcctatgttgttcaataaactaaagaacacaatcagcaagttttttgattcgcaggggcaggtcctgctgacagataccaacactcagtttgtggagcagacaatcgccattatgaagaatctgttggataaccatactgagggatctagtgagcacctgggacaggcctcaatcgagacaatgatgttgaacctcgtgcgatacgtgcgagtcctgggcaatatggttcacgctatccaaatcaagaccaaactatgtcaacttgtcgaggttatgatggccagacgggacgatcttagtttctgtcaagagatgaagtttcggaacaagatggtagaatatctgaccgactgggtgatgggtacatccaaccaggctgctgacgacgatgtgaaatgcctcacaagagacctggatcaggctagtatggaagccgttgtcagccttttggcaggcctgccacttcagcccgaagagggcgatggtgtggaacttatggaagccaaatcccaattgttcctgaagtatttcactctgttcatgaacctgctaaatgactgctctgaagtggaagacgaatccgcgcagacgggcgggagaaagcggggtatgagtaggaggctcgctagcctgcgccattgcaccgttctcgccatgagtaatctcttaaacgccaacgtggactctggcctgatgcactctatcggcctcggatatcataaagacctacagacacgcgcgacattcatggaggtcctgaccaagatcctgcagcaaggaaccgaattcgacaccctcgcggagacagtgctcgccgaccggttcgagcggttggtagagttagtaaccatgatgggggaccagggcgagctacccatcgcgatggccctggctaacgtagtgccttgttcccagtgggacgagctggcccgtgtcttagtgacactcttcgactcacggcacctcctgtaccagctgctgtggaacatgtttagcaaagaggtggagcttgccgacagtatgcagaccttattcagaggtaacagccttgcttcaaagattatgacattctgctttaaggtgtatggagctacctacctccagaagttgctagatcccttacttagaatcgtgataacttcgagcgattggcagcacgtgtcctttgaggtggatccaactagattggagcctagtgaatcccttgaggaaaaccagagaaacttgttgcagatgacagagaagttctttcacgctataatttcatcatcgagcgagttcccaccacagctgagatccgtctgtcactgcctttatcaggtggttagccagaggttcccccagaattctatcggcgctgtaggctccgccatgttcctcagattcattaaccctgcgattgtctcaccttacgaggctggtattttggacaaaaaacctccgccgcgaattgaaaggggcctcaagcttatgtctaagatcttacagagtatcgccaatcatgtgctattcaccaaggaggagcacatgcgtcctttcaacgacttcgtgaagtctaacttcgacgcagccaggagattcttcctggatatagcatccgattgccccacctctgacgcggtaaaccattcactttcattcatttccgatggcaacgttcttgctctgcatcgccttttatggaacaatcaagagaagattgggcagtatctaagctctaaccgggatcacaaagccgtggggcgtcgccctttcgacaaaatggccacactattagcgtacctgggtcccccggaacacaagccagtggcagatacccactggtcctcattgaatctaacttccagtaaatttgaggaatttatgacaagacaccaggtccatgagaaagaagaatttaaggcccttaaaactttgtcaatcttttaccaggccggcactagtaaagctggaaatcctatcttctactatgtcgcacggagattcaagacggggcagataaatggcgatctcctgatctaccatgttctgttgactcttaagccgtattacgctaagccttatgaaatcgtcgtggacctgacccacacgggccccagcaatcggttcaaaacagactttttgagtaagtggttcgtggttttcccgggattcgcctatgacaatgtaagcgccgtctacatctacaattgcaattcttgggtcagagaatacacaaagtaccatgagcggctgctcaccggcctcaagggatccaaaaggctggtgtttatcgactgtccaggtaagttggccgagcacattgaacacgaacagcagaaattgcccgccgcaactctggccctggaagaagatctcaaagtttttcacaatgcactcaagttagcccacaaggacaccaaagtgagtatcaaggtcggatccacggcggtccaagtgacttctgcagagcgcacaaaggtgttgggccagtcggtgttcctaaacgatatctattatgccagcgaaatagaagagatctgcttggtcgacgagaaccagtttaccttaacaatcgccaatcaggggactcccttgactttcatgcatcaggaatgcgaagccatagtccaatcgatcattcacattagaaccagatgggagctgagccagccagattctattccacagcatacaaagatcagaccaaaagacgtaccaggaacgctgctcaacatcgccctattaaacctgggctctagtgatcctagtctgcggagcgcagcttataacctactgtgcgccttaacgtgcaccttcaatctaaagattgagggtcagctgctcgagaccagtggactttgtatcccagctaataacactctctttatcgtgtcaatcagtaagaccctggccgccaatgagccgcatcttacactagagtttctagaggaatgcatctctggtttttcaaaaagcagcatcgaactgaagcacctttgtttggagtacatgacgccttggctaagcaacctcgtccggttctgtaaacataatgatgatgcgaaacgtcagcgtgtcaccgccattctggacaagctgatcactatgaccattaatgaaaagcaaatgtatccatcgatccaggcaaaaatctggggtagcctcggccagatcacagaccttctcgacgttgtgctggacagcttcatcaagacgagtgccactggagggctgggatccatcaaagctgaagtgatggccgataccgctgtagctcttgctagcggaaacgtcaagctggtgtcctctaaagtaatcggccgtatgtgcaaaattatcgataagacctgtctgtcaccaacaccaactctggagcagcaccttatgtgggacgatatcgctatcctggccaggtacatgcttatgctgtcttttaacaactcactggatgttgctgctcacctcccatatctgttccacgtcgtgacctttttggtggctactggaccactaagtttgagagcgtccacacacggactcgtgatcaatatcatccattctctttgcacttgtagccagctccatttcagtgaggagaccaaacaggtgttacggctgtcgcttacagaattttcactgccgaagttctacctgttatttggaattagcaaggtgaagtcagccgccgtcatcgcatttagaagctcctacagggatcgaagtttttcccccggaagttacgaacgcgagacatttgctctcacatcactcgaaacagtaaccgaggccttgctagaaataatggaggcatgcatgagagacatccccacctgcaaatggttagaccagtggactgaacttgcccaacgattcgcattccagtacaatccctctcttcagccccgcgcgttggtggtttttggctgtatcagcaaacgcgtcagccatggccaaatcaagcagatcattcgcattctgagtaaggccctcgagagttgtcttaaagggcctgacacgtataactctcaagtgctcattgaagccacagtgatagctcttaccaagttgcaaccacttcttaacaaggattcccccctccacaaggctctgttttgggtggcggtcgcagtactgcagctggacgaggtgaatctgtactctgctggcaccgccctgcttgaacagaatttgcatacattagactctcttaggattttcaatgacaagagcccagaagaagtgttcatggcaatccggaaccccctggagtggcactgtaagcagatggaccattttgttgggctaaatttcaactctaattttaatttcgcgctggtgggtcatctgctgaaaggttaccgacaccctagcccagccattgtggcccgaactgtacggattcttcacacactgctcacattagtaaacaaacatcggaattgtgataaattcgaggtgaatactcaatctgttgcgtacctggcggcgctgctcactgtttctgaggaagtacgatctcggtgcagcttgaaacataggaagagtctgctcttgaccgatatcagcatggaaaatgttccaatggacacatatcccattcatcacggtgatcctagttataggaccttgaaggaaacacaaccttggtcatcaccaaagggatccgagggatatctggctgccacttatccaaccgtggggcaaaccagccctcgggcaagaaaatctatgagtttggacatggggcagccgtctcaggcgaataccaagaaactgctgggcacgcggaaatctttcgaccatctgatctccgacactaaagccccaaagcggcaggagatggagtcaggaattacaacacctcccaagatgagacgggtggcagagaccgattacgagatggaaactcagagaatctcttcatcccagcagcacccccaccttcgtaaggtctccgtttccgaaagcaacgtgctccttgacgaagaggtcctgacagaccccaagatacaggcgctgcttctgactgtcctcgctacattggtcaaatacaccaccgatgagtttgaccagaggatattgtacgagtatcttgctgaggccagcgtagtgttcccaaaggtgttcccagtggtgcataatttactggactccaagatcaacactctgctttcattgtgccaggaccccaacctgctcaatcccattcatggaatcgtccagagcgtggtttaccacgaagagagcccaccccaataccaaacctcttatctgcagtcctttgggttcaacggattgtggcgcttcgcaggcccctttagtaagcaaacgcagatcccggactatgccgaactgatcgtgaagttcttggacgcgctcattgacacttacctgcctggtatcgacgaggagacatcagaggagtcactactcactcctacttccccatacccccccgctctacagtcccaactgtccattacggccaatcttaacctgtcaaactctatgacgtcactcgccacatctcagcactctccgggcatcgacaaggagaatgtcgagttgagccctactacaggacactgcaattccggcagaactaggcacggctctgcctctcaggtccagaagcagcgctccgctggaagttttaaaaggaattccataaaaaagattgtgtag

SEQ ID NO: 5866 - DNA, 12362 bp, Artificial Sequence
  derived and/or modified sequence
aatctctagctcgctcgcgctccctctccccgggccgtggaaaggatcccacttccggtggggtgtcatggcggcgtctcggactgtgatggctgtggggagacggcgctagtggggagagcgaccaagaggccccctcccctccccgggtccccttcccctatccccctccccccagcctccttgccaacgccccctttccctctccccctcccgctcggcgctgaccccccatccccacccccgtgggaacactgggagcctgcactccacagaccctctccttgcctcttccctcacctcagcctccgctccccgccctcttcccggcccagggcgccggcccacccttccctccgccgccccccggccgcggggaggacatggccgcgcacaggccggtggaatgggtccaggccgtggtcagccgcttcgacgagcagcttccaataaaaacaggacagcagaacacacataccaaagtcagtactgagcacaacaaggaatgtctaatcaatatttccaaatacaagttttctttggttataagcggcctcactactattttaaagaatgttaacaatatgagaatatttggagaagctgctgaaaaaaatttatatctctctcagttgattatattggatacactggaaaaatgtcttgctgggcaaccaaaggacacaatgagattagatgaaacgatgctggtcaaacagttgctgccagaaatctgccattttcttcacacctgtcgtgaaggaaaccagcatgcagctgaacttcggaattctgcctctggggttttattttctctcagctgcaacaacttcaatgcagtctttagtcgcatttctaccaggttacaggaattaactgtttgttcagaagacaatgttgatgttcatgatatagaattgttacagtatatcaatgtggattgtgcaaaattaaaacgactcctgaaggaaacagcatttaaatttaaagccctaaagaaggttgcgcagttagcagttataaatagcctggaaaaggcattttggaactgggtagaaaattatccagatgaatttacaaaactgtaccagatcccacagactgatatggctgaatgtgcagaaaagctatttgacttggtggatggttttgctgaaagcaccaaacgtaaagcagcagtttggccactacaaatcattctccttatcttgtgtccagaaataatccaggatatatccaaagacgtggttgatgaaaacaacatgaataagaagttatttctggacagtctacgaaaagctcttgctggccatggaggaagtaggcagctgacagaaagtgctgcaattgcctgtgtcaaactgtgtaaagcaagtacttacatcaattgggaagataactctgtcattttcctacttgttcagtccatggtggttgatcttaagaacctgctttttaatccaagtaagccattctcaagaggcagtcagcctgcagatgtggatctaatgattgactgccttgtttcttgctttcgtataagccctcacaacaaccaacactttaagatctgcctggctcagaattcaccttctacatttcactatgtgctggtaaattcactccatcgaatcatcaccaattccgcattggattggtggcctaagattgatgctgtgtattgtcactcggttgaacttcgaaatatgtttggtgaaacacttcataaagcagtgcaaggttgtggagcacacccagcaatacgaatggcaccgagtcttacatttaaagaaaaagtaacaagccttaaatttaaagaaaaacctacagacctggagacaagaagctataagtatcttctcttgtccatggtgaaactaattcatgcagatccaaagctcttgctttgtaatccaagaaaacaggggcccgaaacccaaggcagtacagcagaattaattacagggctcgtccaactggtccctcagtcacacatgccagagattgctcaggaagcaatggaggctctgctggttcttcatcagttagatagcattgatttgtggaatcctgatgctcctgtagaaacattttgggagattagctcacaaatgcttttttacatctgcaagaaattaactagtcatcaaatgcttagtagcacagaaattctcaagtggttgcgggaaatattgatctgcaggaataaatttcttcttaaaaataagcaggcagatagaagttcctgtcactttctccttttttacggggtaggatgtgatattccttctagtggaaataccagtcaaatgtccatggatcatgaagaattactacgtactcctggagcctctctccggaagggaaaagggaactcctctatggatagtgcagcaggatgcagcggaacccccccgatttgccgacaagcccagaccaaactagaagtggccctgtacatgtttctgtggaaccctgacactgaagctgttctggttgccatgtcctgtttccgccacctctgtgaggaagcagatatccggtgtggggtggatgaagtgtcagtgcataacctcttgcccaactataacacattcatggagtttgcctctgtcagcaatatgatgtcaacaggaagagcagcacttcagaaaagagtgatggcactgctgaggcgcattgagcatcccactgcaggaaacactgaggcttgggaagatacacatgcaaaatgggaacaagcaacaaagctaatccttaactatccaaaagccaaaatggaagatggccaggctgctgaaagccttcacaagaccattgttaagaggcgaatgtcccatgtgagtggaggaggatccatagatttgtctgacacagactccctacaggaatggatcaacatgactggcttcctttgtgcccttgggggagtgtgcctccagcagagaagcaattctggcctggcaacctatagcccacccatgggtccagtcagtgaacgtaagggttctatgatttcagtgatgtcttcagagggaaacgcagatacacctgtcagcaaatttatggatcggctgttgtccttaatggtgtgtaaccatgagaaagtgggacttcaaatacggaccaatgttaaggatctggtgggtctagaattgagtcctgctctgtatccaatgctatttaacaaattgaagaataccatcagcaagttttttgactcccaaggacaggttttattgactgataccaatactcaatttgtagaacaaaccatagctataatgaagaacttgctagataatcatactgaaggcagctctgaacatctagggcaagctagcattgaaacaatgatgttaaatctggtcaggtatgttcgtgtgcttgggaatatggtccatgcaattcaaataaaaacgaaactgtgtcaattagttgaagtaatgatggcaaggagagatgacctctcattttgccaagagatgaaatttaggaataagatggtagaatacctgacagactgggttatgggaacatcaaaccaagcagcagatgatgatgtaaaatgtcttacaagagatttggaccaggcaagcatggaagcagtagtttcacttctagctggtctccctctgcagcctgaagaaggagatggtgtggaattgatggaagccaaatcacagttatttcttaaatacttcacattatttatgaaccttttgaatgactgcagtgaagttgaagatgaaagtgcgcaaacaggtggcaggaaacgtggcatgtctcggaggctggcatcactgaggcactgtacggtccttgcaatgtcaaacttactcaatgccaacgtagacagtggtctcatgcactccataggcttaggttaccacaaggatctccagacaagagctacatttatggaagttctgacaaaaatccttcaacaaggcacagaatttgacacacttgcagaaacagtattggctgatcggtttgagagattggtggaactggtcacaatgatgggtgatcaaggagaactccctatagcgatggctctggccaatgtggttccttgttctcagtgggatgaactagctcgagttctggttactctgtttgattctcggcatttactctaccaactgctctggaacatgttttctaaagaagtagaattggcagactccatgcagactctcttccgaggcaacagcttggccagtaaaataatgacattctgtttcaaggtatatggtgctacctatctacaaaaactcctggatcctttattacgaattgtgatcacatcctctgattggcaacatgttagctttgaagtggatcctaccaggttagaaccatcagagagccttgaggaaaaccagcggaacctccttcagatgactgaaaagttcttccatgccatcatcagttcctcctcagaattcccccctcaacttcgaagtgtgtgccactgtttataccaggtggttagccagcgtttccctcagaacagcatcggtgcagtaggaagtgccatgttcctcagatttatcaatcctgccattgtctcaccgtatgaagcagggattttagataaaaagccaccacctagaatcgaaaggggcttgaagttaatgtcaaagatacttcagagtattgccaatcatgttctcttcacaaaagaagaacatatgcggcctttcaatgattttgtgaaaagcaactttgatgcagcacgcaggtttttccttgatatagcatctgattgtcctacaagtgatgcagtaaatcatagtctttccttcataagtgacggcaatgtgcttgctttacatcgtctactctggaacaatcaggagaaaattgggcagtatctttccagcaacagggatcataaagctgttggaagacgaccttttgataagatggcaacacttcttgcatacctgggtcctccagagcacaaacctgtggcagatacacactggtccagccttaaccttaccagttcaaagtttgaggaatttatgactaggcatcaggtacatgaaaaagaagaattcaaggctttgaaaacgttaagtattttctaccaagctgggacttccaaagctgggaatcctattttttattatgttgcacggaggttcaaaactggtcaaatcaatggtgatttgctgatataccatgtcttactgactttaaagccatattatgcaaagccatatgaaattgtagtggaccttacccataccgggcctagcaatcgctttaaaacagactttctctctaagtggtttgttgtttttcctggctttgcttacgacaacgtctccgcagtctatatctataactgtaactcctgggtcagggagtacaccaagtatcatgagcggctgctgactggcctcaaaggtagcaaaaggcttgttttcatagactgtcctgggaaactggctgagcacatagagcatgaacaacagaaactacctgctgccaccttggctttagaagaggacctgaaggtattccacaatgctctcaagctagctcacaaagacaccaaagtttctattaaagttggttctactgctgtccaagtaacttcagcagagcgaacaaaagtcctagggcaatcagtctttctaaatgacatttattatgcttcggaaattgaagaaatctgcctagtagatgagaaccagttcaccttaaccattgcaaaccagggcacgccgctcaccttcatgcaccaggagtgtgaagccattgtccagtctatcattcatatccggacccgctgggaactgtcacagcccgactctatcccccaacacaccaagattcggccaaaagatgtccctgggacactgctcaatatcgcattacttaatttaggcagttctgacccgagtttacggtcagctgcctataatcttctgtgtgccttaacttgtacctttaatttaaaaatcgagggccagttactagagacatcaggtttatgtatccctgccaacaacaccctctttattgtctctattagtaagacactggcagccaatgagccacacctcacgttagaatttttggaagagtgtatttctggatttagcaaatctagtattgaattgaaacacctttgtttggaatacatgactccatggctgtcaaatctagttcgtttttgcaagcataatgatgatgccaaacgacaaagagttactgctattcttgacaagctgataacaatgaccatcaatgaaaaacagatgtacccatctattcaagcaaaaatatggggaagccttgggcagattacagatctgcttgatgttgtactagacagtttcatcaaaaccagtgcaacaggtggcttgggatcaataaaagctgaggtgatggcagatactgctgtagctttggcttctggaaatgtgaaattggtttcaagcaaggttattggaaggatgtgcaaaataattgacaagacatgcttatctccaactcctactttagaacaacatcttatgtgggatgatattgctattttagcacgctacatgctgatgctgtccttcaacaattcccttgatgtggcagctcatcttccctacctcttccacgttgttactttcttagtagccacaggtccgctctcccttagagcttccacacatggactggtcattaatatcattcactctctgtgtacttgttcacagcttcattttagtgaagagaccaagcaagttttgagactcagtctgacagagttctcattacccaaattttacttgctgtttggcattagcaaagtcaagtcagctgctgtcattgccttccgttccagttaccgggacaggtcattctctcctggctcctatgagagagagacttttgctttgacatccttggaaacagtcacagaagctttgttggagatcatggaggcatgcatgagagatattccaacgtgcaagtggctggaccagtggacagaactagctcaaagatttgcattccaatataatccatccctgcaaccaagagctcttgttgtctttgggtgtattagcaaacgagtgtctcatgggcagataaagcagataatccgtattcttagcaaggcacttgagagttgcttaaaaggacctgacacttacaacagtcaagttctgatagaagctacagtaatagcactaaccaaattacagccacttcttaataaggactcgcctctgcacaaagccctcttttgggtagctgtggctgtgctgcagcttgatgaggtcaacttgtattcagcaggtaccgcacttcttgaacaaaacctgcatactttagatagtctccgtatattcaatgacaagagtccagaggaagtatttatggcaatccggaatcctctggagtggcactgcaagcaaatggatcattttgttggactcaatttcaactctaactttaactttgcattggttggacaccttttaaaagggtacaggcatccttcacctgctattgttgcaagaacagtcagaattttacatacactactaactctggttaacaaacacagaaattgtgacaaatttgaagtgaatacacagagcgtggcctacttagcagctttacttacagtgtctgaagaagttcgaagtcgctgcagcctaaaacatagaaagtcacttcttcttactgatatttcaatggaaaatgttcctatggatacatatcccattcatcatggtgacccttcctataggacactaaaggagactcagccatggtcctctcccaaaggttctgaaggataccttgcagccacctatccaactgtcggccagaccagtccccgagccaggaaatccatgagcctggacatggggcaaccttctcaggccaacactaagaagttgcttggaacaaggaaaagttttgatcacttgatatcagacacaaaggctcctaaaaggcaagaaatggaatcagggatcacaacaccccccaaaatgaggagagtagcagaaactgattatgaaatggaaactcagaggatttcctcatcacaacagcacccacatttacgtaaagtttcagtgtctgaatcaaatgttctcttggatgaagaagtacttactgatccgaagatccaggcgctgcttcttactgttctagctacactggtaaaatataccacagatgagtttgatcaacgaattctttatgaatacttagcagaggccagtgttgtgtttcccaaagtctttcctgttgtgcataatttgttggactctaagatcaacaccctgttatcattgtgccaagatccaaatttgttaaatccaatccatggaattgtgcagagtgtggtgtaccatgaagaatccccaccacaataccaaacatcttacctgcaaagttttggttttaatggcttgtggcggtttgcaggaccgttttcaaagcaaacacaaattccagactatgctgagcttattgttaagtttcttgatgccttgattgacacgtacctgcctggaattgatgaagaaaccagtgaagaatccctcctgactcccacatctccttaccctcctgcactgcagagccagcttagtatcactgccaaccttaacctttctaattccatgacctcacttgcaacttcccagcattccccaggaatcgacaaggagaacgttgaactctcccctaccactggccactgtaacagtggacgaactcgccacggatccgcaagccaagtgcagaagcaaagaagcgctggcagtttcaaacgtaatagcattaagaagatcgtgtgaagcttgcttgctttcttttttaaaatcaacttaacatgggctcttcactagtgaccccttccctgtccttgccctttccccccatgttgtaatgctgcacttcctgttttataatgaacccatccggtttgccatgttgccagatgatcaactcttcgaagccttgcctaaatttaatgctgccttttctttaactttttttcttctacttttggcgtgtatctggtatatgtaagtgttcagaacaactgcaaagaaagtgggaggtcaggaaacttttaactgagaaatctcaattgtaagagaggatgaattcttgaatactgctactactggccagtgatgaaagccatttgcacagagctctgccttctgtggttttcccttcttcatcctacagagtaaagtgttagtcctatttatacatttttcaagatacaagtttatgagagaaatagtattataaccccagtatgtttaatcttttagctgtggactttttttttaaccgtacaaaactgaaagaaccatagaggtcaagcctcagtgacttgacaccataaagccacagacaaggtacttgggggggagggcagggaaatttcatattttatagtggattcttaagaaatactaacacttgagtattagcaataattacaggaaaataagtgcgaccacatatatcttaacattactgaattaaaactatggcttctaagtccttatccaaactcagtcatccaaactagtttatttttttctccagttgattatcttttaatttttaattttgctaaaggtggtttttttgtgttttgttttttgtaaaccaaaactatactaagtatagtaattatatatatatatatattttttcccctccccctcttctttcctaactaattctgagcagggtaatcagtgaacaaagtgttgaaaattgttcccagaaggtaattttcatagatgtttgcattagctccatagcaaaatggaatggtacgtgacatttagggtagctgatatttttattttgttaaataatttccaagaatagagtatggtgtatattataaatttctttgataagatgtattttgaatgtcttttaatcttcctcctcctctccaaaaaaatcagaaacctctttaagaaaacatgtaggttatatatgctagaattgcatttaatcactgtgaaaagactggtcagcctgcattagtatgacagtaggggggctgttagaattgctgctatactggtggtatggattatcatggcattggaattttcatagtaatgcagatccaatttctttgtggtacctgcagtttacaaaataatttgacttcagtgagcatattggtatctggatgttccaatttagaactaaaccatatttattacaaaaagatattaatccctctactcccaggttccctttatatgttaagatataatggctttgaggggggaaaaaataaacctaggggagaggggagtttcctgtagtgctgtttcattagaggatttcagtaaattaaattccacagctaattcaataaataatggtacatttaagtgttctgattttaataatatatttcacatttatccacacagtaacaatgtaatatgttaatgtaaataaaattggttttgatactcagaaataacaagaatttaattttttaaatttgtttacagtcctgggaaaagtaagaattatttgccaaaataagaggaaagaaaaccttagtattattaatgagtttaccatagaattgttggaaatactgaagacaggtgcaatttactaaacttttgtttttaaactattgtagaggctgcattagaagaaaatgtttataatgacagagcaactatgactatataaaaaagctgaaattagaactgtgtttagaaatagatcagtaacccagtgccaaggatgccaagctgccaccatggtcttggctctcccacaacccagtgtttctggggtaagtttcacagtttctaggccctggaatagcaggcagtgtaagcctttgataactttagttcgatgtttttcttgtttttgtttgttggtttggtgcatatgatagtgggtgttatgctattttgctcttcccatcaaaataaagaaacttccagaggtttactgttaaaaatactgatatttccataaacgggtttaccaagggtgtagtatttcataccgcctgaaatgatcagcattggcacaaatcaaaattcagccgcctttgaaatgcaaaaatacctttgactagtaagtacatcctaggagtttgaaaacttaactaaggtttaaaatttaccttgtttaaagaacttctgacttttgaggaaaatctagctttccaagtaactaaaatgtacatgagataaacctctcaccactatgtgtcccttgagaaatgcaacacttttttagtcttcatacttgtaatctataaaagaaattctgaagtttagaccaagttgcccatttctgcgtaattgacataagttctgttaaaaatattataagtaattcgtttcggtttgtagatgtttcccctgacttgttaaagaggaaaccaggaactcagtcatgtttttgtcctggataatctacctgttatgccagtactcccatccgaggggcatgcccttagttgcccagatggagatgcagttcagtagatttggggcaaagtggctacagctctgtcttccattcactcaacacctgttcatgactgagccaggtgcccaggacacatcctaaacagtcagcttctatcctgtgtcctagttggggagacagagtgccagccagcaaccctcccaggtttgtaggttttaggggttttcagttttgtttgggttttttgttttttgtttttgtttctacatccttccccgactcccaggcataatgaggcatgtcttactcaatgttatgcaatggatttaggcaaaaattcattcttagtgtcagccacacaattttttttaatgcagtatattcacctgtaaatagtttgtgtaaaatttgacaaaaaaagtatatttactatactgtaaatatatgtgatgatatattgtattattttgcttttttgtaaagcagttagttgctgcacatggataacaacaaaaatttgattattctcgtgttagtattgttaacttctttttgcgactgcgttacatcatttaaagaaaatgctgtgtattgtaaacttaaattgtatatgataacttactgtcctttccatccgggcctaaactttggcagttcctttgtctacaaccttgttaatactgtaaacagttgtacgccagcaggaaaaatactgcccaacagacaaaatcgatcattgtaggggaaaatcatagaaatccatttcagatctttattgttcctcaccccattttcctccttgtgtatgtacttcccccacccccctttttttaagtaaaatgtaaattcaatctgctctaaga

SEQ ID NO: 5867 - DNA, 8456 bp, Artificial Sequence
  derived and/or modified sequence
atggccgcacacagaccggtcgaatgggttcaagcagtggttagccggtttgacgagcagctgccaatcaagactgggcagcagaacactcacactaaggtatcaactgagcataacaaagaatgcctaatcaatatctctaagtacaaatttagtctggtgatctccgggctgacaactatccttaaaaacgtcaacaacatgcgtattttcggagaggccgcagagaaaaacctatacctgagccagctgatcatactggacacactagaaaaatgcttagccggacagccaaaggatacaatgcgattagacgaaaccatgctggtaaaacaactgctgcctgaaatatgtcatttcctccacacctgtcgggaaggcaatcagcatgctgccgaactcagaaatagtgctagcggagtactgttctcgctttcgtgtaataattttaacgcagtgttctccaggatttctaccagactgcaggaactgaccgtgtgctctgaggacaacgtggatgtgcacgatatcgagttgctccagtacatcaatgtagattgtgcaaagctgaagagattgttgaaggaaaccgcatttaaatttaaggccctgaagaaagtagctcagctggcagttattaactcactggaaaaagccttttggaactgggtggagaactacccagatgagttcaccaagttgtatcagatccctcagaccgacatggcggaatgcgctgagaagctttttgatttggtggacggctttgccgaaagcactaaacggaaagctgcagtttggcctcttcaaattatattactgatcctctgccctgagattattcaggatatcagtaaggacgtggtagacgagaacaatatgaacaagaagctgttcctcgacagcctccgaaaggccttagcgggacatggcggttctaggcaactgaccgagagtgccgcaatagcctgcgtcaagctgtgtaaagcgagtacctatattaattgggaagataattctgtcatattcctgttagtgcagagcatggtcgtggatctgaaaaacctgctgtttaacccaagtaaaccattctctcgcggaagtcaacctgctgatgtagatctcatgatagactgtctagtgagttgctttaggatcagtcctcacaacaatcaacactttaaaatctgcctggctcaaaattccccctcaacatttcattatgtgctcgttaacagtctgcataggataatcaccaatagtgcacttgactggtggcccaaaatcgacgctgtatactgtcactccgtggagttgaggaatatgttcggtgagacactgcacaaagcggtacagggctgcggcgcacaccccgcaattcggatggctccctcccttacattcaaggagaaggtgacatcactgaagtttaaagagaaacccaccgatctggagaccaggagctacaaatacctcctgctgtcgatggtcaagttgatccatgcggaccccaaactcctcctgtgcaaccctaggaagcaaggaccagaaacacagggaagcaccgccgaactgattacaggtctggtgcagctggtcccccagagtcatatgcccgaaatagctcaagaggctatggaggccctgttggtgctgcaccaactggatagcatcgacctctggaatcccgatgccccagtggaaacattttgggaaatctcatcgcagatgctgttctatatttgtaagaaactaacatcccaccaaatgctctcctcaaccgagattttgaagtggctacgggagattctgatatgtaggaataaattcttgctgaagaataagcaagccgaccggtcaagctgtcattttctcctgttttacggagttggttgcgatatccccagttcggggaatacctcccaaatgtcaatggatcacgaggagctgctgcgtacccccggagccagtctacgcaaagggaagggaaacagttcaatggattccgcagccggttgctccggtacacctcccatttgtcgccaggcccagaccaagttggaggttgccttatacatgtttctatggaaccccgatacggaggccgtcctggtggcaatgtcatgtttccggcacctttgcgaagaagcagatatcagatgcggtgtagacgaagtaagtgtgcataatctcttgcccaactataacactttcatggagtttgcctccgtcagcaatatgatgagcaccggccgtgccgctctccagaagcgggtgatggccctgctaaggcgcatagagcacccaactgccggaaataccgaagcttgggaagacacccatgccaagtgggaacaggcaacaaagctcattctgaattaccccaaagccaagatggaggatggccaggccgctgagtccctgcacaagaccattgtcaaacgacggatgagccatgtatctggaggaggctcaattgacctctcagacactgattctcttcaggagtggatcaacatgactgggttcctgtgcgcattagggggtgtgtgcctgcaacagaggagcaactctggtctggctacctatagtccccctatgggcccagtgagtgagcgcaaaggttcaatgatctcggttatgtcttccgagggcaacgccgatacccccgttagtaaattcatggataggctgctgtcgttgatggtgtgtaaccacgagaaggtaggcctgcagattaggactaatgtgaaggacctggtgggcctcgagcttagccctgctctctacccaatgctgtttaacaagctgaaaaacactatcagcaaatttttcgattcccaggggcaagtcctgctgactgacactaatacccagtttgtggagcagacaatcgccatcatgaaaaacctcctggacaaccacaccgaaggttcttctgaacatctcggccaggcaagtattgaaaccatgatgctcaatctggtgaggtacgtgcgtgtactgggcaacatggtgcatgctattcagatcaagactaaactctgtcagctggtggaggtcatgatggctcgacgggacgacctctctttctgtcaggaaatgaaattccgcaacaagatggttgagtatttgactgactgggtgatgggcacttctaatcaagccgctgatgacgacgtgaagtgtctcactcgcgacttggaccaggcatctatggaggccgtggtttccttgcttgcaggcctgcctcttcagccagaggaaggagacggcgtggagctgatggaggccaaatcccaactgtttctcaagtatttcacactgttcatgaacctgctgaacgactgtagtgaggtggaagacgagtccgcgcagacagggggtaggaaacggggtatgagtcgcaggcttgcctcactgaggcattgcactgtactagctatgtctaatttgctcaatgcaaatgtggacagtggcttgatgcactcaataggactcgggtatcacaaggacctgcagaccagggctactttcatggaagtcttgactaagatattgcagcagggaaccgaattcgatacactggcagaaaccgtgctggccgataggtttgagagattagtggaacttgtgacgatgatgggagatcagggggagctaccaatcgcaatggcgcttgctaacgtggtgccgtgttcacagtgggatgagctcgcgcgtgttttagttaccctgttcgattcacggcacctgctgtaccagcttctctggaatatgtttagtaaagaggtggaactagccgacagtatgcagactctttttcggggaaactccttggcgtcaaagattatgacgttctgtttcaaagtgtatggtgccacttacctgcagaagctgctggacccactgctccgtatcgtgatcacatcatctgattggcaacacgtgtcgtttgaagtggaccccactaggctcgagcctagcgagagtctggaggagaaccagcgaaaccttcttcagatgactgaaaagttctttcacgcaataataagtagtagctctgaatttccaccccagcttcggagcgtgtgccactgtctgtatcaagtcgtctcacagcgttttcctcagaactcgataggtgccgtgggatctgcaatgttcctgcggtttatcaatccagcaattgtgagtccatatgaggcgggaatcctggacaagaaaccgcctccccgaatcgaaagaggcctgaaactgatgagcaaaatactgcaatccatcgccaaccatgtgctctttacgaaagaggagcacatgcggccatttaatgacttcgttaaaagtaatttcgatgcagcccgaaggttctttctggacatcgcatccgactgccctactagcgatgcggttaaccattcgctgtcgttcatctcagacggaaatgtgcttgcattacatcgcttgctgtggaacaatcaggagaagatcggtcagtatttgtcatccaaccgcgatcacaaggcggtgggccgtaggccctttgacaaaatggccaccctcctcgcgtatctgggacccccagagcacaaacccgtggcagacacccattggtctagtctgaacctaacgtcttccaagttcgaagaattcatgaccaggcatcaggtccatgaaaaggaggagtttaaagctctaaagacattgtctatcttttatcaggccggaacttctaaggcgggaaatccaatcttttattacgtcgcgaggcggtttaaaacaggacagataaacggagatctcctgatttatcatgtccttctgaccctcaagccgtactacgccaagccttatgagattgtcgtggatcttacacacactggtcccagcaataggttcaaaaccgattttttgagcaagtggttcgtagtgttccctggtttcgcgtatgacaatgtctccgctgtgtatatctacaactgtaacagctgggtccgggagtatacgaagtaccatgaaagactgcttaccggactgaagggctcaaaacgcttggtgtttattgattgcccaggaaagcttgccgagcatatcgaacacgaacagcaaaagctgcccgctgcaaccctagccctggaagaggatcttaaggtgttccataatgctctcaaactggcacataaggatacaaaagtctcaattaaagtggggtcgaccgcagtccaggtgactagcgctgagaggactaaagttcttgggcaaagcgtgttcttaaatgacatctactacgccagtgagattgaggagatttgtttagtggatgagaaccagttcaccctaaccattgctaatcagggcacaccactgacattcatgcaccaggaatgcgaggcgatcgtccaatctatcattcacattagaacgcgatgggagttaagtcagccggactccatccctcaacacacaaagatcagaccaaaggacgtgcctgggaccctccttaatattgccctcctcaatctggggtctagtgacccatctttaaggtccgccgcttacaatctgttgtgcgctctgacgtgtacattcaatctgaagatcgaaggacagcttctcgaaactagcggactctgtatcccagccaataatacgttattcattgtgagcatttctaaaacattggccgcaaacgagcctcacttgaccctggagtttctcgaggagtgtatttctgggttctccaaaagttccatagaactgaaacacctctgcttggagtacatgactccctggctgtccaaccttgtgcggttttgcaaacataatgatgacgccaagcggcaacgcgtgacagctatccttgacaagcttatcacaatgactatcaacgaaaagcagatgtaccctagcatccaggccaaaatctggggtagcctggggcaaatcaccgacttacttgatgtagtccttgatagctttattaagacgtctgctacggggggattgggctccatcaaagctgaggtcatggcagatactgcagtagcactggctagtggcaacgtgaaattggtctcttcaaaggtgatcggcagaatgtgcaaaatcattgacaagacctgcctgtcgccgactccaacactggagcaacaccttatgtgggatgatattgctatcttggccagatatatgctgatgctctctttcaataatagtctcgacgttgcggctcatttgccatacctttttcacgtagttactttccttgttgctaccgggccattgtcattgagggctagcacacacggtctagtgattaacattatccatagcctttgcacctgctcacagcttcacttcagcgaggaaacgaaacaggttttacgacttagcttgactgagttttccctgcccaaattttatctgctcttcggcatcagtaaagtgaaatcagccgcagttatcgccttccggtccagttatcgggaccggtcgttctctcccggatcatacgagagagagacctttgctctgacgtcacttgagacggtcactgaggctctgctcgagatcatggaggcttgtatgcgggatatccctacttgcaaatggcttgaccagtggacagagctggcccagcgctttgcctttcagtacaatcctagcctgcagcccagagccctggtcgtgttcggctgcatctcgaaaagagtgagtcacggccagattaagcagatcatccgcatactgagtaaggcactggaatcgtgccttaaaggccctgatacttacaattcccaagttttaatcgaggccaccgtcatcgccctgacaaagttgcagcccctcctgaataaggattctccactccacaaggccctcttttgggtcgccgtggccgtcttgcaactcgatgaggtcaacctttattcggccggtaccgccttgctggagcagaacctccacactctggattcactcaggatttttaacgataaatcaccagaggaggtgttcatggccataaggaaccccctcgaatggcactgtaaacagatggatcatttcgttggcttaaacttcaattcaaattttaattttgctctggtggggcacctccttaaagggtacagacacccaagccccgcaattgtcgcaaggaccgtcaggatcttacataccttgctcaccctggttaacaagcaccgcaactgtgacaagtttgaagtgaatacacagtctgtggcctatttggccgcactcctgaccgtgagcgaggaggtgagaagtagatgctctctaaagcacaggaaaagcttgctgttaaccgatatcagcatggagaatgtgcccatggatacatatccaattcatcacggtgaccctagctatagaacccttaaggagactcaaccttggtccagtcctaaaggaagcgagggatacctggccgcaacttatcccaccgttggccagacctcaccgcgagctcggaaaagcatgagtctggacatggggcaacccagtcaggccaacacaaagaagctgctgggaaccagaaagtcctttgaccatttaatatctgatactaaggcacccaaaaggcaggagatggagagtgggataactacaccccctaagatgaggcgcgtcgcagaaactgattacgaaatggagactcagaggatttcctcaagccagcagcacccccatctgaggaaagtgagcgtgagcgaaagcaatgtcctgcttgacgaggaagtgttgaccgatccgaagatacaggcactcctgctcacagtactcgcaacactggttaagtatacaactgacgagttcgaccaacgcattttgtacgagtatctggcagaggcgagcgtcgtctttccaaaggtattcccagtggtgcacaatcttctggactccaaaatcaacacgttactgtctctctgtcaggatcctaacctcctgaatccgatccacggtatcgtgcagagcgttgtttaccacgaagaaagtccacctcagtaccagacatcctacctgcagagtttcggatttaacggtctgtggcgcttcgccggacctttcagcaagcaaacccagatacctgattatgcagaactaattgtcaaatttctcgacgccctgatcgatacctacctgcccggaatcgacgaagagaccagtgaggagtccttgctcaccccgacctctccctacccacccgctttgcagtcacagctgtccattactgcgaatttgaatttgtcaaacagcatgaccagcctcgcaactagccagcacagtccagggatagacaaagaaaatgttgagctcagccccacaacaggtcattgtaatagcggcaggaccagacacggatctgcttcacaggtccaaaagcagcgaagcgccggttcttttaaacggaatagtattaagaaaatcgtcta

SEQ ID NO: 5868 - protein, 595 aa, Artificial Sequence
  derived and/or modified sequence
MAGAIASRMSFSSLKRKQPKTFTVRIVTMDAEMEFNCEMKWKGKDLFDLVCRTLGLRETWFFGLQYTIKDTVAWLKMDKKVLDHDVSKEEPVTFHFLAKFYPENAEEELVQEITQHLFFLQVKKQILDEKIYCPPEASVLLASYAVQAKYGDYDPSVHKRGFLAQEELLPKRVINLYQMTPEMWEERITAWYAEHRGRARDEAEMEYLKIAQDLEMYGVNYFAIRNKKGTELLLGVDALGLHIYDPENRLTPKISFPWNEIRNISYSDKEFTIKPLDKKIDVFKFNSSKLRVNKLILQLCIGNHDLFMRRRKADSLEVQQMKAQAREEKARKQMERQRLAREKQMREEAERTRDELERRLLQMKEEATMANEALMRSEETADLLAEKAQITEEEAKLLAQKAAEAEQEMQRIKATAIRTEEEKRLMEQKVLEAEVLALKMAEESERRAKEADQLKQDLQEAREAERRAKQKLLEIATKPTYPPMNPIPAPLPPDIPSFNLIGDSLSFDFKDTDMKRLSMEIEKEKVEYMEKSKHLQEQLNELKTEIEALKLKERETALDILHNENSDRGGSSKHNTIKKLTLQSAKSRVAFFEEL

SEQ ID NO: 5869 - protein, 601 aa, Artificial Sequence
  derived and/or modified sequence
MAGAIASRMSFSSLKRKQPKTFTVRIVTMDAEMEFNCEMKWKGKDLFDLVCRTLGLRETWFFGLQYTIKDTVAWLKMDKKVLDHDVSKEEPVTFHFLAKFYPENAEEELVQEITQHLFFLQVKKQILDEKIYCPPEASVLLASYAVQAKYGDYDPSVHKRGFLAQEELLPKRVINLYQMTPEMWEERITAWYAEHRGRARDEAEMEYLKIAQDLEMYGVNYFAIRNKKGTELLLGVDALGLHIYDPENRLTPKISFPWNEIRNISYSDKEFTIKPLDKKIDVFKFNSSKLRVNKLILQLCIGNHDLFMRRRKADSLEVQQMKAQAREEKARKQMERQRLAREKQMREEAERTRDELERRLLQMKEEATMANEALMRSEEAEQEMQRIKATAIRTEEEKRLMEQKVLEAEVLALKMAEESERRAKEADQLKQDLQEAREAERRAKQKLLEIATKPTYPPMNPIPAPLPPDIPSFNLIGDSLSFDFKDTDMKRLSMEIEKEKVEYMEKSKHLQEQLNELKTEIEALKLKERETALDILHNENSDRGGSSKHNTIKKGMFLFFFILFCWFSLKPKAEDLSAFEPSNSPCRAPSPEWPSLKSSSR

SEQ ID NO: 5870 - DNA, 1788 bp, Artificial Sequence
  derived and/or modified sequence
atggccggcgccatcgccagcagaatgagcttcagcagcctgaagagaaagcagcccaagaccttcaccgtgagaatcgtgaccatggacgccgagatggagttcaactgcgagatgaagtggaagggcaaggacctgttcgacctggtgtgcagaaccctgggcctgagagagacctggttcttcggcctgcagtacaccatcaaggacaccgtggcctggctgaagatggacaagaaggtgctggaccacgacgtgagcaaggaggagcccgtgaccttccacttcctggccaagttctaccccgagaacgccgaggaggagctggtgcaggagatcacccagcacctgttcttcctgcaggtgaagaagcagatcctggacgagaagatctactgcccccccgaggccagcgtgctgctggccagctacgccgtgcaggccaagtacggcgactacgaccccagcgtgcacaagagaggcttcctggcccaggaggagctgctgcccaagagagtgatcaacctgtaccagatgacccccgagatgtgggaggagagaatcaccgcctggtacgccgagcacagaggcagagccagagacgaggccgagatggagtacctgaagatcgcccaggacctggagatgtacggcgtgaactacttcgccatcagaaacaagaagggcaccgagctgctgctgggcgtggacgccctgggcctgcacatctacgaccccgagaacagactgacccccaagatcagcttcccctggaacgagatcagaaacatcagctacagcgacaaggagttcaccatcaagcccctggacaagaagatcgacgtgttcaagttcaacagcagcaagctgagagtgaacaagctgatcctgcagctgtgcatcggcaaccacgacctgttcatgagaagaagaaaggccgacagcctggaggtgcagcagatgaaggcccaggccagagaggagaaggccagaaagcagatggagagacagagactggccagagagaagcagatgagagaggaggccgagagaaccagagacgagctggagagaagactgctgcagatgaaggaggaggccaccatggccaacgaggccctgatgagaagcgaggagaccgccgacctgctggccgagaaggcccagatcaccgaggaggaggccaagctgctggcccagaaggccgccgaggccgagcaggagatgcagagaatcaaggccaccgccatcagaaccgaggaggagaagagactgatggagcagaaggtgctggaggccgaggtgctggccctgaagatggccgaggagagcgagagaagagccaaggaggccgaccagctgaagcaggacctgcaggaggccagagaggccgagagaagagccaagcagaagctgctggagatcgccaccaagcccacctacccccccatgaaccccatccccgcccccctgccccccgacatccccagcttcaacctgatcggcgacagcctgagcttcgacttcaaggacaccgacatgaagagactgagcatggagatcgagaaggagaaggtggagtacatggagaagagcaagcacctgcaggagcagctgaacgagctgaagaccgagatcgaggccctgaagctgaaggagagagagaccgccctggacatcctgcacaacgagaacagcgacagaggcggcagcagcaagcacaacaccatcaagaagctgaccctgcagagcgccaagagcagagtggccttcttcgaggagctgtag

SEQ ID NO: 5871 - DNA, 1788 bp, Artificial Sequence
  derived and/or modified sequence
atggccggcgcaattgcaagcaggatgtccttttcttccctcaagcggaagcagccaaaaacattcaccgtacgcattgtgacaatggatgctgaaatggaatttaactgcgagatgaaatggaaaggtaaggatctgttcgatctcgtgtgcaggacacttgggttgcgggagacatggttcttcggtctgcaatacactattaaggatactgtggcctggctcaaaatggacaagaaggtgttggaccacgatgtaagtaaggaggagcccgtcacatttcatttcctggcaaagttttatccggagaacgctgaggaagagcttgtgcaggagattacccagcatttatttttcctccaggttaagaagcagatcttagacgagaagatatactgtccccccgaagcctctgttctcctggcctcatacgcagtgcaagccaagtatggagactacgacccatctgtgcacaaaagaggcttccttgcacaggaggagcttctgcctaagagagtaatcaacctgtaccagatgactcctgagatgtgggaggaaagaattactgcctggtacgctgagcacagggggagagcccgagacgaggcggaaatggaatacctgaagattgctcaagatctggaaatgtatggggtgaattatttcgccatcaggaacaaaaaggggactgaacttttactaggagtggatgctctgggcctgcacatctacgaccctgagaatcgcctgacaccgaaaatctctttcccgtggaacgaaataagaaatatatcttacagtgataaggagttcacaatcaaaccattagataaaaagatcgatgtctttaaattcaactcttctaaactacgagttaacaaactgattttgcaactatgcattggcaatcatgacctcttcatgaggcggcgcaaagctgattcacttgaggttcagcaaatgaaagctcaagcacgagaagaaaaggctcggaaacagatggaacgccaaaggctagcaagggagaaacagatgcgagaagaggcggaaaggacacgagatgaacttgaacggcgcctccttcagatgaaagaggaggccaccatggcaaacgaggctcttatgagatcagaggagaccgcagatctgctggcagaaaaagcgcagataaccgaggaggaagcgaagttactggcacaaaaagcggcagaagccgaacaagagatgcagcggatcaaggccacagctatcagaaccgaggaggaaaagaggttaatggagcaaaaggttttagaagctgaggtattggccctgaagatggctgaggaatctgagcgacgcgccaaagaggcagaccaactgaagcaggatctgcaggaggcaagggaggccgaaagacgagcgaagcaaaaattacttgagatcgcaactaaaccaacttatccacctatgaacccaattccagccccgctgcctcccgatatcccctctttcaatttaatcggggactccctgtctttcgacttcaaggataccgacatgaagaggctgagtatggaaattgagaaagagaaggtcgagtatatggaaaagagcaaacaccttcaggagcagctgaacgagctgaaaacagaaatcgaggctctgaagttgaaagagagggaaaccgccctggacatccttcataatgagaattccgacagggggggctccagtaagcacaataccatcaagaaacttacactgcagtcagccaagagtagagtggcattcttcgaagagctgtag

SEQ ID NO: 5872 - DNA, 1788 bp, Artificial Sequence
  derived and/or modified sequence
atggccggggccatcgccagcaggatgtccttcagcagcctgaagaggaagcagcccaagaccttcaccgtgcgcatcgtgaccatggatgctgagatggagttcaactgtgagatgaagtggaagggcaaggacctgtttgacctggtgtgcaggaccctgggcctgcgggagacctggttcttcggcctgcagtacaccatcaaggacacagtggcctggctgaagatggacaagaaggtgctggaccatgatgtgtccaaggaggagcctgtgaccttccacttcctggccaagttctacccagaaaatgctgaggaggagctggtgcaggagatcacccagcacctgttcttcctgcaggtgaagaagcagatcctggatgagaagatctactgccccccagaggcctctgtgctgctggccagctatgctgtgcaggccaagtacggggactatgaccccagcgtgcacaagaggggcttcctggcccaggaggagctgctgcccaagagggtcatcaacctgtaccagatgaccccagagatgtgggaggagcgcatcacagcctggtatgcagagcaccggggccgggccagagatgaagctgagatggagtacctgaagatcgcccaggacctggagatgtatggagtgaactactttgccatccggaacaagaagggcacagagctgctgctgggcgtggatgccctgggcctgcacatctatgaccctgaaaatcggctgacccccaagatctccttcccctggaatgagatccggaacatctcctacagcgacaaggagttcaccatcaagcccctggacaagaagattgatgtgttcaagttcaacagcagcaagctgcgggtgaacaagctgatcctgcagctgtgcatcggcaaccacgacctcttcatgagaagaaggaaggctgacagcctggaggtgcagcagatgaaggcccaggcccgggaggagaaggccaggaagcagatggagcggcagaggctggcccgggagaagcagatgagggaggaggccgagaggaccagagatgagctggagcggcggctgctgcagatgaaggaggaggccaccatggccaatgaggccctgatgaggtctgaggagacagctgacctgctggccgagaaggcccagatcacagaggaggaggccaagctgctggcccagaaggctgctgaggccgagcaggagatgcagaggatcaaggccacagccatcagaacagaggaggagaagaggctgatggagcagaaggtgctggaggccgaggtgctggccctgaagatggccgaggagagcgagcggcgggccaaggaggccgaccagctgaagcaggacctgcaggaggcccgggaggccgagcggcgggccaagcagaagctgctggagatcgccaccaagcccacctacccacccatgaaccccatcccagcccccctgcccccagacatccccagcttcaacctgattggagacagcctgagctttgacttcaaggacacagacatgaagaggctgtccatggagattgagaaggagaaggtggagtacatggagaagagcaagcacctgcaggagcagctgaatgagctgaagacagaaattgaggccctgaagctgaaggagcgggagacagccctggacatcctgcacaatgaaaacagcgacagaggaggcagcagcaagcacaacaccatcaagaagctgaccctgcagagcgccaagagccgggtggccttctttgaggagctgtag

SEQ ID NO: 5873 - DNA, 1788 bp, Artificial Sequence
  derived and/or modified sequence
atggccggcgccatcgccagccggatgagcttcagcagcctgaagagaaagcagcccaagacatttactgtcagaatcgtgactatggatgcagagatggagttcaactgcgaaatgaagtggaaagggaaggacttgtttgaccttgtatgtagaaccctcggactgagggaaacctggttctttggcctgcagtacaccatcaaggataccgtcgcctggctaaaaatggacaagaaggtgctcgaccacgacgtgagcaaggaggagccggtcacgttccactttcttgctaaattttatcctgagaacgccgaagaagagctggtgcaggagatcactcagcacctgttcttcctgcaggtaaaaaaacaaatccttgatgagaagatttattgcccaccagaagccagtgttttattggcctcttacgcggttcaggcaaagtatggcgattatgatccatccgtccataagagaggcttcctcgcgcaagaggagctgttgcctaaacgcgttatcaatctgtaccagatgaccccagaaatgtgggaggagcgaattacagcctggtacgccgaacacagaggaagggctagggatgaagcggagatggagtatctgaagattgcccaggacctggagatgtacggggtgaattattttgccatccgtaacaaaaagggcacggaattgttattaggcgtggacgctctcggccttcatatctatgatcccgagaaccggctcactcctaaaatttcgttcccctggaacgagattcggaatatatcctactctgataaagaattcacgattaagccccttgataaaaaaattgacgttttcaaattcaacagttccaaactgcgggtgaacaaactgattttgcagttgtgcatcggaaaccacgatctatttatgaggaggagaaaggccgattctctagaggtgcaacagatgaaggcgcaggcccgcgaggagaaggctcgcaaacagatggagcggcaaagattggcccgagaaaaacagatgagagaggaagctgaacggacccgggatgaactggaacgcagactgctgcagatgaaggaagaggccacaatggccaatgaagccttgatgagatccgaagaaaccgccgatctgcttgcggaaaaggcccagattaccgaggaggaggctaagctcttggcgcaaaaggctgccgaagctgagcaggagatgcaaagaatcaaagcaactgctattcgcacagaagaagagaaacgcctgatggagcaaaaagtgttagaggctgaagtgctggctttaaagatggcggaggagtctgaacggagggccaaagaagccgaccagctcaagcaggacctgcaagaggctagagaagctgaacggagggcaaagcagaaactcctggaaatcgctaccaagcctacctacccgcccatgaacccaattccagcccctttgcctcctgatattccttcctttaacctgattggcgatagcctcagcttcgatttcaaagacactgacatgaagcgcctcagtatggagatcgaaaaagaaaaagtagaatatatggaaaaaagcaagcacctacaggaacagttgaatgagctgaaaactgagatcgaggcactgaaattgaaggagcgtgagacggctctggatatcctccataatgagaactctgaccgtgggggatcctccaagcataacactatcaagaaactgaccttacaatccgccaagtctagggtggcttttttcgaagaactctag

SEQ ID NO: 5874 - DNA, 6025 bp, Artificial Sequence
  derived and/or modified sequence
cgcttcccgcgggcgcgcggagtgaggacggtgacagccacgcgcgcgcgtacgcgcccgatgcagcgcggccccgtgaccctagtcggccgctgagaggcgcgcggagtctgggccgctgccgtctaggggtcccgtcccgaggcgtccccggcatctccggcccgaatcccggagtgccgggtcgcgcctgcaccgaaggtcccggctcctgtgccctccctgcagccgtcagggcccgtcccccaactcccctttccgctcaggcagggtcctcgcggcccatgctggccgctggggacccgcgcagcccagaccgttcccgggccgggcagccggccaccatggtggccctgaggcctgtgcagcaactccaggggggctaaagggctcagagtgcaggccgtggggcgcgagggtcccgggcctgagccccgcgccatggccggggccatcgcttcccgcatgagcttcagctctctcaagaggaagcaacccaagacgttcaccgtgaggatcgtcaccatggacgccgagatggagttcaattgcgagatgaagtggaaagggaaggacctctttgatttggtgtgccggactctggggctccgagaaacctggttctttggactgcagtacacaatcaaggacacagtggcctggctcaaaatggacaagaaggtactggatcatgatgtttcaaaggaagaaccagtcacctttcacttcttggccaaattttatcctgagaatgctgaagaggagctggttcaggagatcacacaacatttattcttcttacaggtaaagaagcagattttagatgaaaagatctactgccctcctgaggcttctgtgctcctggcttcttacgccgtccaggccaagtatggtgactacgaccccagtgttcacaagcggggatttttggcccaagaggaattgcttccaaaaagggtaataaatctgtatcagatgactccggaaatgtgggaggagagaattactgcttggtacgcagagcaccgaggccgagccagggatgaagctgaaatggaatatctgaagatagctcaggacctggagatgtacggtgtgaactactttgcaatccggaataaaaagggcacagagctgctgcttggagtggatgccctggggcttcacatttatgaccctgagaacagactgacccccaagatctccttcccgtggaatgaaatccgaaacatctcgtacagtgacaaggagtttactattaaaccactggataagaaaattgatgtcttcaagtttaactcctcaaagcttcgtgttaataagctgattctccagctatgtatcgggaaccatgatctatttatgaggagaaggaaagccgattctttggaagttcagcagatgaaagcccaggccagggaggagaaggctagaaagcagatggagcggcagcgcctcgctcgagagaagcagatgagggaggaggctgaacgcacgagggatgagttggagaggaggctgctgcagatgaaagaagaagcaacaatggccaacgaagcactgatgcggtctgaggagacagctgacctgttggctgaaaaggcccagatcaccgaggaggaggcaaaacttctggcccagaaggccgcagaggctgagcaggaaatgcagcgcatcaaggccacagcgattcgcacggaggaggagaagcgcctgatggagcagaaggtgctggaagccgaggtgctggcactgaagatggctgaggagtcagagaggagggccaaagaggcagatcagctgaagcaggacctgcaggaagcacgcgaggcggagcgaagagccaagcagaagctcctggagattgccaccaagcccacgtacccgcccatgaacccaattccagcaccgttgcctcctgacataccaagcttcaacctcattggtgacagcctgtctttcgacttcaaagatactgacatgaagcggctttccatggagatagagaaagaaaaagtggaatacatggaaaagagcaagcatctgcaggagcagctcaatgaactcaagacagaaatcgaggccttgaaactgaaagagagggagacagctctggatattctgcacaatgagaactccgacaggggtggcagcagcaagcacaataccattaaaaagctcaccttgcagagcgccaagtcccgagtggccttctttgaagagctctagcaggtgacccagccaccccaggacctgccacttctcctgctaccgggaccgcgggatggaccagatatcaagagagccatccatagggagctggctgggggtttccgtgggagctccagaactttccccagctgagtgaagagcccagcccctcttatgtgcaattgccttgaactacgaccctgtagagatttctctcatggcgttctagttctctgacctgagtctttgttttaagaagtatttgtcttcctttgtctaatgtgggattcctgactcccttcgtccaaggcaccggtgtgtgtgtgtcttgcactccagagctgacctccaccgcccagcctgggaagtcattgtagggagtgagacactgaagccctgagaagccagtgccatcatccccaccccgcccagggttccggaacattcattcccccaccggtgaggacctggcatgcagcgaagcagcccagcccggcggatcccaggccagcacgcctgccggcttctcatcgtcagggagcccgcccagagctcgtgacgagcaagtgctgggtccccgccaggcaccccgaggcggcgctctggctggcagctggtggggaataggcagggcagctgtggctggggagagactttaggcagaagctgtgatgcaggctgactgccagccgaggggctgggtagtgccgtgcgggagctgatggtacagggcactcgctgtccccctccggccaccctagaccagggtccgagaggcaggcaggagccactcatgtcttccccattgcccgacgcccatagacgctccttcctgtgtggggctggggtactccctggtcgtactgcagtcagcacccgtaacccggctatgaccagggatctgtaagccctgtggctccacaggtgctgcttctcactggcccagactctgagctccaccggcccagtctgcacggcccatctgcttcaccttccctcccagccacgtgccagtggccacagcccacttcccaacccactgttgtacccaggcctcactttgctgttgcccttgtccctcttcgggccctgaattttctgttccctgggggccagccagggccctttgtgcccctcccagcacaggcctgatgcaggtgtccactcacaggtggcgctcacctaggctgtcacaggacccacctccatgccaggcaacagagggccacagaaccacccccacggctcactccttggtctggggccaccttcttgccctttctttttttttttttttttttttttccgagatggagtctctctctgtcacccaggtgggagtgtggtggcacaatctcggctcactgcaacctccacctcctgagttcaagcaattctcctgcctcagcctcccaagtagctgggactacaggcatgcaccaccacacttggccaatgttctgtatttttaatagggacggggttttgccatgttagctaggctggtctcaaactcacacctgggattacaggcatgagccactgcacccagccccttcttgccctttcttttctccatggctgatgctgctgtggccagccagggcccttgagatccttccagtttggctgttatgcaaagcaggtgatttgtcttaatcagataaaagatagaggctatgggggcctcaagatttttggagagcagaggtggtctctggcaattccatctggttttgagaaacttagcagctcacagagcacagagatcctgccttcttcctactatcaggctgacctaatggggttgggctgctcggcaactgcttgggtcaccttgccccaaggaaaccagccctgggtgccacccagccacttagggtctacagggtgggactccagacctagagcgtaagtatggatgttgtggccctgtgtcttcctagtgtgacccagccaggagcggaagcttcaggcgtttgtaaagtgaggtctggctctgcctcctccgttttttttttttttctgtttctgtttctgttttttttttgagatggagtctcgctctgtcgcccaggctggagtgcagtgtcacgatctcagctcactgcaacctccgcctcccaggtacaagagattctcctgcctcagcctcccgagtagctgggactacaggcgtgtgccaccatgcctggctaatttttgtatttttagtagagatggggtttcgccatgttagccagactggtctcgaactcctgacctcaggtgatcctcccaccccggcttcccaaagttctgggattataggcgtgagccaccatgcccggtctcttctcagtcttgaagcccatccctggatttccaccaggagttactttcctcctgacctgtaaatttgttctttaacaatggctgcaggtgggagcatatggtggtttataaaaacgctgtcgggctttgtttccttctttagctgccgtgtctacttctgaagtctgggaagtgccaagccacgcggcctcaagggagctggctggtgtttgagctgtggcagaagcacctggggctccagggagcaggctgggaactgcaggaccttgctcagccaggagcacttccccctccttgaggcaggaatactgaggtgcctccccacagatggagaaggtggagaggaggatgggcctcaggagcatctcaagccccagtagcaggagaaagaaagaaagagatgcctggttttcacagactggttcctgtggctgggatgactgcatccttttttttttttttttgagacggagtttttgcctttgtcgcccaggctggagtgcaatggcgtgatctcggctcaccgcaacctccgcctcccggattcaagcaattctcctgcctcagcctcccgagtagctgggattacaggcacgcacctccacgtccggctaattttgtatttttagtggagacggggtttctccatgtcggtcaggctggtctcgaactcccgacctcaggtgatctgcccacctcggcctcccaaagtgctgggattacaggcatgagccaccgcgcttggccagactgcgtcctttttaagcgaacattttagggcctgggagtttgtcaagtaaggaagtctcaagcccaaagagcagcgtcctgaccatggtggtttcattacgagcccttctgctggctctcaggcagaagccccacagcaccgggaccattcatgaggtcactgcccagctcatgatgtccgtgaggctgtccttttggccagtagccgtgtgcagctgtgtggcacagatggcttcgttcatcctgatcaaggccccacctcagccacagcagtccccccaacctgtgttgtccaccctattattcatgtacctgccaggccctgctagatagcaccccgtggcattacataacacttcatgagtggctgtgtcttgtaattttggggacaggtttctctctttccctctcttttttttgtcaaaagcccagagactgacaaccagctgcagtgtctaagtgttcctcactgacagggtggggcctcaccacccctggagggagcagcgttggcagggagacagcctggcccagtgaccctgggcccaagccagcccctccagggctttcagggaagcgccatccattttcaaagatgtcaaacgtcacttcttcctgtagggcccgagtcctgcctcctatcagggccagatcatagaaggctattttctattctggggaacgattataacttaaatgattgttttaataaaaattctaagctggaaaa

SEQ ID NO: 5875 - DNA, 1788 bp, Artificial Sequence
  derived and/or modified sequence
atggccggagccattgcttcacgaatgtctttctcatctctgaagagaaagcagccaaaaacattcactgtcaggatcgttacaatggacgccgagatggaatttaactgcgagatgaagtggaagggcaaggacctgtttgatctggtgtgtcgcactctaggcttgcgcgaaacctggttcttcggtctccaatacaccatcaaagacacagtggcttggttaaagatggacaagaaagtactggatcacgacgtttcaaaagaggaacctgttacatttcacttcctggcaaagttctacccagaaaacgcagaagaagagctcgtccaagaaataacacagcatttgttttttttgcaagtgaaaaagcaaatcctagatgaaaagatctactgccccccagaggcgtcggtactcctggcttcatacgctgtccaggctaaatacggagactatgacccatctgtccataagcgagggttcctcgctcaggaagaactgttacctaagcgggttatcaacctatatcagatgacacccgaaatgtgggaagaacgaatcaccgcttggtatgccgaacaccgtgggagagcaagagacgaagctgagatggagtatctgaagattgcccaagacctggaaatgtacggagtgaactattttgccattcgtaacaagaaggggaccgagctgctactgggagtagatgcactgggcctccacatctacgatcccgagaaccgccttacgcctaagattagttttccttggaatgagataaggaacatttcttactccgacaaggaattcaccattaagcctttggataagaaaatcgatgtgttcaaattcaatagctccaaacttcgcgtgaacaaactgatcctccagctgtgtatcggcaatcacgatctgtttatgcggcgaaggaaagctgattcactggaggtgcagcaaatgaaggctcaggctcgggaagaaaaggccaggaaacagatggagcgccagcggcttgcgagagagaaacagatgcgcgaagaggcggagagaacccgtgatgaattggaacgcagactgctccagatgaaggaagaggccaccatggccaacgaagctctcatgaggtctgaagaaacggcggatttactggctgagaaagctcagatcacagaggaggaagctaagctgctggcgcaaaaagccgcagaagccgaacaggagatgcagcggattaaagcaaccgccataagaacagaagaagagaagcgccttatggagcagaaggtgcttgaagccgaggtgttggcactgaagatggccgaggagtccgagcgtcgggcaaaagaagcagaccagctgaaacaggatttacaggaagcaagagaggcagaaagacgggcaaaacaaaagctgttagagatagcaactaagccgacttaccccccaatgaaccctatcccagcacccctgccacccgacattccttcattcaaccttattggcgattccctttccttcgacttcaaagatacagacatgaagcgcctgagcatggaaatcgaaaaggaaaaggtcgagtacatggaaaaatccaagcatcttcaggaacagcttaatgagctaaaaacagaaattgaagcccttaagttgaaggagcgcgagactgctttagatatcctgcacaacgagaatagtgaccggggagggtccagtaaacacaacactataaagaaactgaccctccaaagcgcaaaatccagagtggccttttttgaagagctgtag

SEQ ID NO: 5876 - DNA, 459 bp, Artificial Sequence
  derived and/or modified sequence
atggccaactgcgagagaaccttcatcgccatcaagcccgacggcgtgcagagaggcctggtgggcgagatcatcaagagattcgagcagaagggcttcagactggtgggcctgaagttcatgcaggccagcgaggacctgctgaaggagcactacgtggacctgaaggacagacccttcttcgccggcctggtgaagtacatgcacagcggccccgtggtggccatggtgtgggagggcctgaacgtggtgaagaccggcagagtgatgctgggcgagaccaaccccgccgacagcaagcccggcaccatcagaggcgacttctgcatccaggtgggcagaaacatcatccacggcagcgacagcgtggagagcgccgagaaggagatcggcctgtggttccaccccgaggagctggtggactacaccagctgcgcccagaactggatctacgagtag

SEQ ID NO: 5877 - DNA, 459 bp, Artificial Sequence
  derived and/or modified sequence
atggccaactgcgagcgcacttttatagctatcaagcctgacggcgtgcagcggggcctggttggagagataatcaaacggtttgaacagaagggcttcagactggttggccttaagttcatgcaggcctccgaggacttactgaaagagcactacgtagacctaaaagacaggcctttcttcgcgggcctagtgaagtacatgcactcaggacccgttgttgcaatggtttgggagggtctgaatgtggtcaagaccggcagagtgatgctgggggagactaatcccgccgatagtaagccagggacaattagaggcgatttctgcattcaggtgggccgcaatattatccatggcagtgacagtgttgagtctgcagaaaaagaaattgggctctggtttcaccctgaagaattggtggattacacctcttgcgcccagaattggatttacgagtag

SEQ ID NO: 5878 - DNA, 459 bp, Artificial Sequence
  derived and/or modified sequence
atggccaactgtgagaggaccttcatcgccatcaagccagatggagtgcagaggggcctggtgggggagatcatcaagagatttgagcagaagggcttccggctggtgggcctgaagttcatgcaggccagcgaggacctgctgaaggagcactacgtggacctgaaggaccggcccttctttgctggcctggtgaagtacatgcacagcggccctgtggtggccatggtgtgggagggcctgaatgtggtgaagacaggccgggtgatgctgggggagaccaacccagctgacagcaagccaggcaccatccggggggacttctgcatccaggtgggcaggaacatcatccacggcagtgacagcgtggagagcgctgagaaggagatcggcctgtggttccaccctgaggagctggtggactacaccagctgtgcccagaactggatctatgaatag

SEQ ID NO: 5879 - DNA, 459 bp, Artificial Sequence
  derived and/or modified sequence
atggccaactgcgagcggaccttcatcgccatcaagcccgacggcgtgcaacgcgggctagtgggggagattatcaagcgctttgagcaaaaaggcttcagattagtgggtttgaagttcatgcaggctagcgaagatctactcaaggaacattacgtggatctgaaagataggccattttttgctggtctcgtgaaatatatgcattctggacccgtcgtcgccatggtatgggaaggcttgaacgtggtcaagaccgggagggttatgctaggcgaaacaaaccctgctgatagcaaaccagggacaatacgtggtgatttctgcattcaggtcgggcgcaatatcatccatggtagcgactctgtggaaagcgcagaaaaggagatcggactctggtttcaccctgaggagctggtggactatacgagctgtgcacagaactggatctacgagtag

SEQ ID NO: 5880 - DNA, 459 bp, Artificial Sequence
  derived and/or modified sequence
atggcaaactgtgaaaggacttttatagcgatcaagccagatggagtgcagcggggactggtaggagagattattaaaagatttgaacagaaaggttttcgactggttgggctgaagttcatgcaggcctctgaagatctgctgaaggagcattatgttgacctgaaagatcgtccgtttttcgccggtttggtgaaatacatgcacagtggccctgtcgtggctatggtctgggagggtctcaacgtggttaagacggggagagtgatgctgggagagactaatccggctgattccaagcccggaacgatcagaggagacttctgtattcaggttgggagaaacatcatccatggttctgacagtgtagagagtgcggaaaaagaaattggtctctggtttcaccctgaagagctggttgactacacgtcgtgcgctcagaactggatctatgaatag

SEQ ID NO: 5881 - protein, 289 aa, Artificial Sequence
  derived and/or modified sequence
MENGYTYEDYKNTAEWLLSHTKHRPQVAIICGSGLGGLTDKLTQAQIFDYGEIPNFPRSTVPGHAGRLVFGFLNGRACVMMQGRFHMYEGYPLWKVTFPVRVFHLLGVDTLVVTNAAGGLNPKFEVGDIMLIRDHINLPGFSGQNPLRGPNDERFGDRFPAMSDAYDRTMRQRALSTWKQMGEQRELQEGTYVMVAGPSFETVAECRVLQKLGADAVGMSTVPEVIVARHCGLRVFGFSLITNKVIMDYESLEKANHEEVLAAGKQAAQKLEQFVSILMASIPLPDKAS

SEQ ID NO: 5882 - protein, 93 aa, Artificial Sequence
  derived and/or modified sequence
MENGYTYEDYKNTAEWLLSHTKHRPQVAIICGSGLGGLTDKLTQAQIFDYGEIPNFPRSTVPGHAGRLVFGFLNGRACVMMQGRFHMYEGYPL

SEQ ID NO: 5883 - DNA, 870 bp, Artificial Sequence
  derived and/or modified sequence
atggagaatggctacacctatgaagactataaaaatacggctgagtggctactcagccacacgaagcaccgcccacaagttgccattatctgtggatctggcctggggggtttaaccgacaaactaacccaggcgcagatttttgattacggggagattcccaactttcctcggtctaccgtcccagggcacgctggacgcctggtgtttggctttcttaacggaagggcttgcgtgatgatgcaggggagattccacatgtacgagggatacccactgtggaaggtgacatttccagtgcgcgtatttcacctgctgggtgttgacacgttggtagtgactaatgccgccggagggctgaatcccaagttcgaagtgggcgatatcatgctcattcgggatcacatcaatcttcccgggtttagcggccaaaatcccctccgcggccctaacgacgagcgattcggagataggttcccagctatgtcagatgcttacgatcgcacgatgagacagcgggcgctgagtacctggaaacagatgggagagcaaagagagctgcaggaaggcacttatgtaatggtagctggcccttccttcgagaccgtggcagaatgtcgtgttttgcagaagctgggggctgacgccgtggggatgtctacagtgccagaggtgatcgtcgcccgccactgtggcctgagggtatttgggttcagtttgattacaaacaaggtgatcatggattacgagagcctggagaaagctaatcacgaagaggtactggcggctggcaaacaggccgcccaaaaactcgagcaatttgtctctattttaatggctagcatccctcttccggacaaagcgtcttag

SEQ ID NO: 5884 - DNA, 282 bp, Artificial Sequence
  derived and/or modified sequence
atggagaatggttatacttacgaagactataaaaatactgcggagtggctactctcacacaccaagcatcgcccacaagtggcaataatttgtgggagcggcttgggcggcttgacagataagcttacacaggcacagatatttgactacggagagattccaaactttccacgctccactgtcccgggtcatgcagggcgactcgtatttggctttctaaatggacgagcatgcgtgatgatgcaggggcgtttccatatgtacgagggctaccccttgtag

SEQ ID NO: 5885 - DNA, 870 bp, Artificial Sequence
  derived and/or modified sequence
atggagaatggctacacctatgaggactacaagaacacagctgagtggctgctgagccacaccaagcaccggccccaggtggccatcatctgtggcagcggcctgggcggcctgacagacaagctgacccaggcccagatctttgattatggagagatccccaacttccccaggagcacagtgcccggccatgctggccgcctggtgtttggcttcctgaatggccgggcctgtgtgatgatgcagggccgcttccacatgtatgagggctaccccctgtggaaggtgaccttccctgtgcgggtcttccacctgctgggcgtggacaccctggtggtgaccaatgctgctgggggcctgaaccccaagtttgaggtgggggacatcatgctgatccgggaccacatcaacctgcccggcttcagcggccagaaccccctgcggggccccaatgatgaaagatttggagaccgcttccctgccatgtctgatgcctatgacaggaccatgaggcagagggccctgagcacctggaagcagatgggagagcagcgggagctgcaggagggcacctacgtgatggtggccggccccagctttgagaccgtggctgaatgtcgggtgctgcagaagctgggcgcagatgctgtgggcatgagcacagtgcctgaggtgattgtggcccggcactgcggcctgcgggtgtttggcttcagcctcatcaccaacaaggtgatcatggactatgagagcctggagaaggccaaccacgaggaggtgctggccgccggcaagcaggccgcccagaagctggagcagtttgtgtccatcctgatggccagcatccccctgcctgacaaggccagctag

SEQ ID NO: 5886 - DNA, 282 bp, Artificial Sequence
  derived and/or modified sequence
atggagaatggctacacctatgaggactacaagaacacagctgagtggctgctgagccacaccaagcaccggccccaggtggccatcatctgtggcagcggcctgggcggcctgacagacaagctgacccaggcccagatctttgattatggagagatccccaacttccccaggagcacagtgcccggccatgctggccgcctggtgtttggcttcctgaatggccgggcctgtgtgatgatgcagggccgcttccacatgtatgagggctaccccctgtag

SEQ ID NO: 5887 - DNA, 870 bp, Artificial Sequence
  derived and/or modified sequence
atggagaacggctacacctacgaggactacaagaacaccgccgagtggctgctatctcacacgaagcacaggccacaggtggctattatatgtgggtctggactgggcgggcttacggataaactgacccaagcccagatattcgattatggcgaaatcccgaactttcccaggtccacagtcccaggccacgccggccgactcgtcttcggctttttgaatggaagagcatgtgtgatgatgcagggtcggttccatatgtacgaaggttacccgctgtggaaggtaacttttccggtgagagtgtttcatttgctaggagtggataccttagtagtgaccaacgcagcaggagggttgaatcctaagtttgaggttggcgatattatgttaatcagggaccacatcaatctgccagggttttcaggccagaacccactgaggggccccaacgacgagcgctttggtgataggttccccgccatgagcgatgcttacgatcggaccatgcgccagcgagcactgagcacctggaagcagatgggagaacagcgtgagcttcaggagggaacgtatgttatggtggctgggccttcatttgagaccgtcgccgagtgcagagtcttgcagaagttgggcgcagatgctgtcgggatgagtacagtcccagaagttatcgttgcccgccattgcggcctccgggtgttcggatttagcctcatcactaacaaagtgatcatggactatgaatccctggagaaagctaatcacgaagaagtactggccgctgggaaacaggcagctcagaaactcgagcaatttgtgtctattctgatggccagcattccattgcccgataaggcaagttag

SEQ ID NO: 5888 - DNA, 282 bp, Artificial Sequence
  derived and/or modified sequence
atggagaacggctacacctacgaggactacaagaacaccgccgagtggctgcttagccatacgaagcataggcctcaggtggccattatatgcggaagtggtttaggcggcttaacagataagcttacacaggcacagatctttgactatggcgaaatacctaattttcctagatcgactgttcctggacatgcaggaaggctggtatttggcttcttgaatggccgcgcttgtgtgatgatgcagggtcgcttccacatgtatgagggataccctctctag

SEQ ID NO: 5889 - DNA, 870 bp, Artificial Sequence
  derived and/or modified sequence
atggagaacggctacacgtacgaagactataagaacaccgccgagtggttgctgtcccataccaaacacagacctcaggtggcaatcatctgcggaagcggcctgggtggcctgaccgacaagctgacgcaggcacaaatatttgattacggggagatccctaattttccacgctctacagtcccaggccatgctggccgattagttttcggtttcctgaacggccgtgcctgtgtaatgatgcaggggcgttttcatatgtatgaaggatatcctctctggaaggtgaccttccctgtgcgggtctttcacctcctcggggtcgacacccttgtggtcaccaacgcagccggagggctgaatcctaaattcgaggtgggagatatcatgctgatacgtgatcacattaacctgccagggttttccgggcagaatcctttgaggggcccaaacgacgagcgatttggagacaggttccctgccatgagcgacgcttacgatcgcactatgagacagagggctttgtcaacgtggaagcagatgggagaacaacgagagctgcaagagggaacatatgttatggtggccggaccctccttcgagaccgtggccgaatgtagggtgctgcagaagctaggagcggatgccgtaggtatgtccacagttcccgaagtgatcgtcgccaggcattgcgggctcagagtctttggcttttccttaattaccaataaggtgattatggactatgaatcccttgagaaggcgaatcatgaggaagttctggccgcaggaaaacaagcagcacagaaattggagcagttcgtgtccatactaatggcctccattccactgcccgacaaggcaagctag

SEQ ID NO: 5890 - DNA, 282 bp, Artificial Sequence
  derived and/or modified sequence
atggaaaacggctacacctatgaagattataaaaatacagccgaatggctgctgtcccatacaaagcacagacctcaagtggcaatcatttgcgggtccggactgggaggacttacggacaagctgacccaggctcagattttcgattatggggagattcctaatttccctcggagcaccgtgcccggacatgcgggtcgcttagttttcgggttcctgaacggacgagcatgtgtaatgatgcagggcagattccacatgtacgaaggatatccactctag

SEQ ID NO: 5891 - DNA, 1509 bp, Artificial Sequence
  derived and/or modified sequence
ataagccagagcctagaccagtgagccaactgtgcgaaccagacccggcagccttgctcagttcagcatagcggagcggatccgatcggatcggagcggatcggagcacaccggagcaggctcatcgagaaggcgtctgcgagaccatggagaacggatacacctatgaagattataagaacactgcagaatggcttctgtctcacactaagcaccgacctcaagttgcaataatctgtggttctggattaggaggtctgactgataaattaactcaggcccagatctttgactacggtgaaatccccaactttccccgaagtacagtgccaggtcatgctggccgactggtgtttgggttcctgaatggcagggcctgtgtgatgatgcagggcaggttccacatgtatgaagggtacccactctggaaggtgacattcccagtgagggttttccaccttctgggtgtggacaccctggtagtcaccaatgcagcaggagggctgaaccccaagtttgaggttggagatatcatgctgatccgtgaccatatcaacctacctggtttcagtggtcagaaccctctcagagggcccaatgatgaaaggtttggagatcgtttccctgccatgtctgatgcctacgaccggactatgaggcagagggctctcagtacctggaaacaaatgggggagcaacgtgagctacaggaaggcacctatgtgatggtggcaggccccagctttgagactgtggcagaatgtcgtgtgctgcagaagctgggagcagacgctgttggcatgagtacagtaccagaagttatcgttgcacggcactgtggacttcgagtctttggcttctcactcatcactaacaaggtcatcatggattatgaaagcctggagaaggccaaccatgaagaagtcttagcagctggcaaacaagctgcacagaaattggaacagtttgtctccattcttatggccagcattccactccctgacaaagccagttgacctgccttggagtcgtctggcatctcccacacaagacccaagtagctgctaccttctttggccccttgctggagtcatgtgcctctgtccttaggttgtagcagaaaggaaaagattcctgtccttcacctttcccactttcttctaccagacccttctggtgccagatcctcttctcaaagctgggattacaggtgtgagcatagtgagaccttggcgctacaaaataaagctgttctcattcctgttctttcttacacaagagctggagcccgtgccctaccacacatctgtggagatgcccaggatttgactcgggccttagaactttgcatagcagctgctactagctctttgagataatacattccgaggggctcagttctgccttatctaaatcaccagagaccaaacaaggactaatccaatacctcttggattttatttaatgtcataatgttgtcagaataaagagaaagatgaaataatttca

SEQ ID NO: 5892 - DNA, 557 bp, Artificial Sequence
  derived and/or modified sequence
cgacccagcttcccttgtccagggagcaactcagacacagtctcgcttcatttttattctggggttgtacaatctaagggccggcccgcgtgctcgcttgccattggctggggactccagggcaagggatataagccagagcctagaccagtgagccaactgtgcgaaccagacccggcagccttgctcagttcagcatagcggagcggatccgatcggatcggagcggatcggagcacaccggagcaggctcatcgagaaggcgtctgcgagaccatggagaacggatacacctatgaagattataagaacactgcagaatggcttctgtctcacactaagcaccgacctcaagttgcaataatctgtggttctggattaggaggtctgactgataaattaactcaggcccagatctttgactacggtgaaatccccaactttccccgaagtacagtgccaggtcatgctggccgactggtgtttgggttcctgaatggcagggcctgtgtgatgatgcagggcaggttccacatgtatgaagggtacccactctg

SEQ ID NO: 5893 - DNA, 870 bp, Artificial Sequence
  derived and/or modified sequence
atggagaacggctacacctacgaggactacaagaacaccgccgagtggctgctgagccacaccaagcacagaccccaggtggccatcatctgcggcagcggcctgggcggcctgaccgacaagctgacccaggcccagatcttcgactacggcgagatccccaacttccccagaagcaccgtgcccggccacgccggcagactggtgttcggcttcctgaacggcagagcctgcgtgatgatgcagggcagattccacatgtacgagggctaccccctgtggaaggtgaccttccccgtgagagtgttccacctgctgggcgtggacaccctggtggtgaccaacgccgccggcggcctgaaccccaagttcgaggtgggcgacatcatgctgatcagagaccacatcaacctgcccggcttcagcggccagaaccccctgagaggccccaacgacgagagattcggcgacagattccccgccatgagcgacgcctacgacagaaccatgagacagagagccctgagcacctggaagcagatgggcgagcagagagagctgcaggagggcacctacgtgatggtggccggccccagcttcgagaccgtggccgagtgcagagtgctgcagaagctgggcgccgacgccgtgggcatgagcaccgtgcccgaggtgatcgtggccagacactgcggcctgagagtgttcggcttcagcctgatcaccaacaaggtgatcatggactacgagagcctggagaaggccaaccacgaggaggtgctggccgccggcaagcaggccgcccagaagctggagcagttcgtgagcatcctgatggccagcatccccctgcccgacaaggccagctag

SEQ ID NO: 5894 - DNA, 282 bp, Artificial Sequence
  derived and/or modified sequence
atggagaacggctacacctacgaggactacaagaacaccgccgagtggctgctgagccacaccaagcacagaccccaggtggccatcatctgcggcagcggcctgggcggcctgaccgacaagctgacccaggcccagatcttcgactacggcgagatccccaacttccccagaagcaccgtgcccggccacgccggcagactggtgttcggcttcctgaacggcagagcctgcgtgatgatgcagggcagattccacatgtacgagggctaccccctgtag

SEQ ID NO: 5895 - protein, 1278 aa, Artificial Sequence
  derived and/or modified sequence
MTARGLALGLLLLLLCPAQVFSQSCVWYGECGIAYGDKRYNCEYSGPPKPLPKDGYDLVQELCPGFFFGNVSLCCDVRQLQTLKDNLQLPLQFLSRCPSCFYNLLNLFCELTCSPRQSQFLNVTATEDYVDPVTNQTKTNVKELQYYVGQSFANAMYNACRDVEAPSSNDKALGLLCGKDADACNATNWIEYMFNKDNGQAPFTITPVFSDFPVHGMEPMNNATKGCDESVDEVTAPCSCQDCSIVCGPKPQPPPPPAPWTILGLDAMYVIMWITYMAFLLVFFGAFFAVWCYRKRYFVSEYTPIDSNIAFSVNASDKGEASCCDPVSAAFEGCLRRLFTRWGSFCVRNPGCVIFFSLVFITACSSGLVFVRVTTNPVDLWSAPSSQARLEKEYFDQHFGPFFRTEQLIIRAPLTDKHIYQPYPSGADVPFGPPLDIQILHQVLDLQIAIENITASYDNETVTLQDICLAPLSPYNTNCTILSVLNYFQNSHSVLDHKKGDDFFVYADYHTHFLYCVRAPASLNDTSLLHDPCLGTFGGPVFPWLVLGGYDDQNYNNATALVITFPVNNYYNDTEKLQRAQAWEKEFINFVKNYKNPNLTISFTAERSIEDELNRESDSDVFTVVISYAIMFLYISLALGHMKSCRRLLVDSKVSLGIAGILIVLSSVACSLGVFSYIGLPLTLIVIEVIPFLVLAVGVDNIFILVQAYQRDERLQGETLDQQLGRVLGEVAPSMFLSSFSETVAFFLGALSVMPAVHTFSLFAGLAVFIDFLLQITCFVSLLGLDIKRQEKNRLDIFCCVRGAEDGTSVQASESCLFRFFKNSYSPLLLKDWMRPIVIAIFVGVLSFSIAVLNKVDIGLDQSLSMPDDSYMVDYFKSISQYLHAGPPVYFVLEEGHDYTSSKGQNMVCGGMGCNNDSLVQQIFNAAQLDNYTRIGFAPSSWIDDYFDWVKPQSSCCRVDNITDQFCNASVVDPACVRCRPLTPEGKQRPQGGDFMRFLPMFLSDNPNPKCGKGGHAAYSSAVNILLGHGTRVGATYFMTYHTVLQTSADFIDALKKARLIASNVTETMGINGSAYRVFPYSVFYVFYEQYLTIIDDTIFNLGVSLGAIFLVTMVLLGCELWSAVIMCATIAMVLVNMFGVMWLWGISLNAVSLVNLVMSCGISVEFCSHITRAFTVSMKGSRVERAEEALAHMGSSVFSGITLTKFGGIVVLAFAKSQIFQIFYFRMYLAMVLLGATHGLIFLPVLLSYIGPSVNKAKSCATEERYKGTERERLLNF

SEQ ID NO: 5896 - protein, 776 aa, Artificial Sequence
  derived and/or modified sequence
MYNACRDVEAPSSNDKALGLLCGKDADACNATNWIEYMFNKDNGQAPFTITPVFSDFPVHGMEPMNNATKGCDESVDEVTAPCSCQDCSIVCGPKPQPPPPPAPWTILGLDAMYVIMWITYMAFLLVFFGAFFAVWCYRKRYFVSEYTPIDSNIAFSVNASDKGEASCCDPVSAAFEGCLRRLFTRWGSFCVRNPGCVIFFSLVFITACSSGLVFVRVTTNPVDLWSAPSSQARLEKEYFDQHFGPFFRTEQLIIRAPLTDKHIYQPYPSGADVPFGPPLDIQILHQVLDLQIAIENITASYDNETVTLQDICLAPLSPYNTNCTILSVLNYFQNSHSVLDHKKGDDFFVYADYHTHFLYCVRAPASLNDTSLLHDPCLGTFGGPVFPWLVLGGYDDQNYNNATALVITFPVNNYYNDTEKLQRAQAWEKEFINFVKNYKNPNLTISFTAERSIEDELNRESDSDVFTVVISYAIMFLYISLALGHMKSCRRLLVDSKVSLGIAGILIVLSSVACSLGVFSYIGLPLTLIVIEVIPFLVLAVGVDNIFILVQAYQRDERLQGETLDQQLGRVLGEVAPSMFLSSFSETVAFFLGALSVMPAVHTFSLFAGLAVFIDFLLQITCFVSLLGLDIKRQEKNRLDIFCCVRGAEDGTSVQASESCLFRFFKNSYSPLLLKDWMRPIVIAIFVGVLSFSIAVLNKVDIGLDQSLSMPDDSYMVDYFKSISQYLHAGPPVYFVLEEGHDYTSSKGQNMVCGGMGCNNDSLVQQIFNAAQLDN

SEQ ID NO: 5897 - DNA, 4827 bp, Artificial Sequence
  derived and/or modified sequence
gaagggcaacacggggaccttgaagcggggtcgcggcggcgccccagcccgggccagggagtcccggcagcggcacctcccagaaagggcggagccgacgacgccttcttccttcctgaccggcgcgcgcagcctgctgccgcggtcagcgcctgctcctgctcctccgctcctcctgcgcggggtgctgaaacagcccggggaagtagagccgcctccggggagcccaaccagccgaacgccgccggcgtcagcagccttgcgcggccacagcatgaccgctcgcggcctggcccttggcctcctcctgctgctactgtgtccagcgcaggtgttttcacagtcctgtgtttggtatggagagtgtggaattgcatatggggacaagaggtacaattgcgaatattctggcccaccaaaaccattgccaaaggatggatatgacttagtgcaggaactctgtccaggattcttctttggcaatgtcagtctctgttgtgatgttcggcagcttcagacactaaaagacaacctgcagctgcctctacagtttctgtccagatgtccatcctgtttttataacctactgaacctgttttgtgagctgacatgtagccctcgacagagtcagtttttgaatgttacagctactgaagattatgttgatcctgttacaaaccagacgaaaacaaatgtgaaagagttacaatactacgtcggacagagttttgccaatgcaatgtacaatgcctgccgggatgtggaggccccctcaagtaatgacaaggccctgggactcctgtgtgggaaggacgctgacgcctgtaatgccaccaactggattgaatacatgttcaataaggacaatggacaggcaccttttaccatcactcctgtgttttcagattttccagtccatgggatggagcccatgaacaatgccaccaaaggctgtgacgagtctgtggatgaggtcacagcaccatgtagctgccaagactgctctattgtctgtggccccaagccccagcccccacctcctcctgctccctggacgatccttggcttggacgccatgtatgtcatcatgtggatcacctacatggcgtttttgcttgtgttttttggagcattttttgcagtgtggtgctacagaaaacggtattttgtctccgagtacactcccatcgatagcaatatagctttttctgttaatgcaagtgacaaaggagaggcgtcctgctgtgaccctgtcagcgcagcatttgagggctgcttgaggcggctgttcacacgctgggggtctttctgcgtccgaaaccctggctgtgtcattttcttctcgctggtcttcattactgcgtgttcgtcaggcctggtgtttgtccgggtcacaaccaatccagttgacctctggtcagcccccagcagccaggctcgcctggaaaaagagtactttgaccagcactttgggcctttcttccggacggagcagctcatcatccgggcccctctcactgacaaacacatttaccagccatacccttcgggagctgatgtaccctttggacctccgcttgacatacagatactgcaccaggttcttgacttacaaatagccatcgaaaacattactgcctcttatgacaatgagactgtgacacttcaagacatctgcttggcccctctttcaccgtataacacgaactgcaccattttgagtgtgttaaattacttccagaacagccattccgtgctggaccacaagaaaggggacgacttctttgtgtatgccgattaccacacgcactttctgtactgcgtacgggctcctgcctctctgaatgatacaagtttgctccatgacccttgtctgggtacgtttggtggaccagtgttcccgtggcttgtgttgggaggctatgatgatcaaaactacaataacgccactgcccttgtgattaccttccctgtcaataattactataatgatacagagaagctccagagggcccaggcctgggaaaaagagtttattaattttgtgaaaaactacaagaatcccaatctgaccatttccttcactgctgaacgaagtattgaagatgaactaaatcgtgaaagtgacagtgatgtcttcaccgttgtaattagctatgccatcatgtttctatatatttccctagccttggggcacatgaaaagctgtcgcaggcttctggtggattcgaaggtctcactaggcatcgcgggcatcttgatcgtgctgagctcggtggcttgctccttgggtgtcttcagctacattgggttgcccttgaccctcattgtgattgaagtcatcccgttcctggtgctggctgttggagtggacaacatcttcattctggtgcaggcctaccagagagatgaacgtcttcaaggggaaaccctggatcagcagctgggcagggtcctaggagaagtggctcccagtatgttcctgtcatccttttctgagactgtagcatttttcttaggagcattgtccgtgatgccagccgtgcacaccttctctctctttgcgggattggcagtcttcattgactttcttctgcagattacctgtttcgtgagtctcttggggttagacattaaacgtcaagagaaaaatcggctagacatcttttgctgtgtcagaggtgctgaagatggaacaagcgtccaggcctcagagagctgtttgtttcgcttcttcaaaaactcctattctccacttctgctaaaggactggatgagaccaattgtgatagcaatatttgtgggtgttctgtcattcagcatcgcagtcctgaacaaagtagatattggattggatcagtctctttcgatgccagatgactcctacatggtggattatttcaaatccatcagtcagtacctgcatgcgggtccgcctgtgtactttgtcctggaggaagggcacgactacacttcttccaaggggcagaacatggtgtgcggcggcatgggctgcaacaatgattccctggtgcagcagatatttaacgcggcgcagctggacaactatacccgaataggcttcgccccctcgtcctggatcgacgattatttcgactgggtgaagccacagtcgtcttgctgtcgagtggacaatatcactgaccagttctgcaatgcttcagtggttgaccctgcctgcgttcgctgcaggcctctgactccggaaggcaaacagaggcctcaggggggagacttcatgagattcctgcccatgttcctttcggataaccctaaccccaagtgtggcaaagggggacatgctgcctatagttctgcagttaacatcctccttggccatggcaccagggtcggagccacgtacttcatgacctaccacaccgtgctgcagacctctgctgactttattgacgctctgaagaaagcccgacttatagccagtaatgtcaccgaaaccatgggcattaacggcagtgcctaccgagtatttccttacagtgtgttttatgtcttctacgaacagtacctgaccatcattgacgacactatcttcaacctcggtgtgtccctgggcgcgatatttctggtgaccatggtcctcctgggctgtgagctctggtctgcagtcatcatgtgtgccaccatcgccatggtcttggtcaacatgtttggagttatgtggctctggggcatcagtctgaacgctgtatccttggtcaacctggtgatgagctgtggcatctccgtggagttctgcagccacataaccagagcgttcacggtgagcatgaaaggcagccgcgtggagcgcgcggaagaggcacttgcccacatgggcagctccgtgttcagtggaatcacacttacaaaatttggagggattgtggtgttggcttttgccaaatctcaaattttccagatattctacttcaggatgtatttggccatggtcttactgggagccactcacggattaatatttctccctgtcttactcagttacatagggccatcagtaaataaagccaaaagttgtgccactgaagagcgatacaaaggaacagagcgcgaacggcttctaaatttctagccctctcgcagggcatcctgactgaactgtgtctaagggtcggtcggtttaccactggacgggtgctgcatcggcaaggccaagttgaacaccggatggtgccaaccatcggttgtttggcagcagctttgaacgtagcgcctgtgaactcaggaatgcacagttgacttgggaagcagtattactagatctggaggcaaccacaggacactaaacttctcccagcctcttcaggaaagaaacctcattctttggcaagcaggaggtgacactagatggctgtgaatgtgatccgctcactgacactctgtaaaggccaatcaatgcactgtctgtctctccttttaggagtaagccatcccacaagttctataccatatttttagtgacagttgaggttgtagatacactttataacattttatagtttaaagagctttattaatgcaataaattaactttgtacacatttttatataaaaaaacagcaagtgatttcagaatgttgtaggcctcattagagcttggtctccaaaaatctgtttgaaaaaagcaacatgttcttcacagtgttcccctagaaaggaagagatttaattgccagttagatgtggcatgaaatgagggacaaagaaagcatctcgtaggtgtgtctactgggttttaacttatttttctttaataaaatacattgttttcctaaaaaaaaaaaaaaa

SEQ ID NO: 5898 - DNA, 3837 bp, Artificial Sequence
  derived and/or modified sequence
atgaccgctcgaggacttgctcttggtcttcttctgttgctattgtgtccggcccaggtgtttagtcagtcgtgcgtgtggtatggagagtgcggcatcgcttatggagataagcgatacaattgcgagtatagcggtcctccaaaacccttgcccaaagacggctatgatcttgtgcaggagctctgcccaggtttcttcttcgggaacgtgtcactgtgctgcgatgtgagacaattgcagactctgaaagacaacctgcaacttccccttcaattcctgagcaggtgtccttcatgcttttataatctgttaaatctcttttgcgaactcacatgcagccctcgccaatcacagttcctgaacgtcacggcaactgaggactacgtggacccagtgacaaaccaaactaagaccaacgtcaaagagctgcagtactatgtcggtcaaagctttgctaatgcaatgtacaacgcatgccgcgatgtggaggcacccagttccaatgacaaggcactcggtctactatgcgggaaagacgccgatgcttgtaatgccaccaactggatcgaatatatgttcaataaagataatggacaggccccgttcaccattacgcccgtgttttctgacttcccagtgcacggcatggagcctatgaacaacgctacaaaagggtgtgatgagtcggttgacgaagtaactgcgccatgttcttgtcaggattgcagcattgtgtgtggtcccaagccacagcctcctccgccccctgcgccatggacgatccttggcctggatgccatgtacgtaataatgtggattacatacatggccttcctgctcgtattcttcggggcctttttcgccgtgtggtgttacaggaagcggtattttgtgtctgagtacacacccatcgacagcaatatcgccttctctgtaaatgctagtgacaagggcgaggcgtcgtgctgtgatcccgtgtctgccgcctttgagggctgtttacgacgcctgtttacacgatggggatctttctgcgtgcgaaatcccggatgtgtgattttctttagcctggtgttcatcaccgcatgttccagtgggctcgtttttgtgcgcgtcacaacaaacccagtagatctgtggtccgctccctcaagccaggccaggctggaaaaggaatactttgatcagcacttcggcccattcttccggacggaacagctcattattagggctccactcaccgacaagcacatctatcagccctacccctcaggggcagatgtcccttttggtccccccctggacatacagatacttcaccaggttcttgatcttcaaatcgctatcgagaatatcactgcatcgtatgacaacgagaccgtgaccttacaggacatatgcctcgcccccctctcaccatataataccaattgtaccatactctccgtgctgaattactttcagaattctcacagcgtgctcgaccataagaagggggacgacttcttcgtgtacgcggattaccacactcatttcctctactgcgtgcgagcccctgcttctcttaacgacacatcccttctgcacgacccttgtttggggacattcgggggcccagtcttcccttggctagtgttgggaggctacgacgatcagaattacaacaacgccaccgcattggttatcacttttccggttaacaactactacaatgacactgaaaagcttcagcgcgcccaggcgtgggaaaaagagtttatcaacttcgttaaaaactacaagaatcccaacctgaccatcagttttaccgctgaacgatcaatcgaggacgaattgaaccgggagtcggacagcgacgtgtttactgtagtgatttcatatgccatcatgttcctctacatcagcctggcgcttgggcacatgaaatcttgccgcagactactcgttgacagcaaggtgagcctgggtatcgctggaattctgatcgtcctgtcatccgtggcatgcagcctgggcgtcttttcctatattggactcccccttacgttgattgtcatagaggtgataccttttcttgttctcgcagtcggcgttgataatatcttcattctggtgcaggcctaccagcgcgacgaacgacttcaaggggaaaccctggatcaacagttggggcgagtgctaggagaagtcgccccctccatgtttctgtcatcttttagcgaaaccgtagccttctttctcggggcactgtccgtcatgccagcagtccacacgttttccctctttgctgggctagccgtctttatagactttctcctgcaaattacctgtttcgtcagtcttctgggactggatattaaaaggcaggaaaaaaaccgcctggacattttttgctgcgtgcgcggtgcagaggacggtacatcagttcaggctagtgagtcctgcttgttcaggttctttaaaaactcttactcacctttactccttaaggattggatgcgtcctatcgtgattgccatcttcgtcggtgtgctatcattttcgatcgcagtgcttaacaaggtggacatcggactcgaccagtcattgtcgatgcccgacgattcttacatggtcgattattttaagagcattagtcagtatcttcacgccggtccccccgtgtacttcgtgcttgaggaaggacacgactataccagttccaaggggcagaacatggtttgcggagggatgggctgcaataacgacagcctcgtgcaacaaatcttcaatgccgcccagctagataattatacacgaattggtttcgccccctcttcttggatagacgattatttcgattgggtgaagccccagtcatcgtgttgcagagtcgacaatattaccgatcaattctgcaatgcaagcgtcgtggatccagcatgtgtgaggtgccggcccttgaccccagagggcaaacaaagaccgcagggtggtgattttatgcgctttctgcctatgttcctctccgacaaccctaaccccaagtgtggcaagggtggccatgccgcgtacagttccgcagtaaacatactgcttggccatgggacacgggtgggagccacatattttatgacctatcataccgtgctccagacttcagcagattttatcgacgcactgaaaaaagctaggctcatcgcatctaacgtgaccgaaacaatgggtatcaacgggtcggcataccgggtgttcccctacagtgtgttctacgtgttctacgagcagtacttaaccatcatcgatgatacgatattcaacctgggcgtctccttgggcgcaatatttcttgtgacaatggtgcttcttggctgcgagctgtggtccgccgttattatgtgcgctactatcgcaatggtcctggtaaacatgtttggcgttatgtggctgtggggaatttccttgaacgcggtatctctggtgaatttagtgatgtcatgcggcatttcagtcgaattttgctcacacataacacgagcattcactgtgtctatgaaaggcagccgtgtcgaaagggctgaagaggcactggcacacatggggtctagcgtgttctctggcatcacgctgaccaaattcggcggaattgtggtgttagcgtttgccaagagccagatctttcagatattttactttcgcatgtacctggcaatggttctcctgggcgccacccacggactgattttcctccccgtccttcttagttatatcgggcccagcgtgaataaggccaaaagctgcgccacagaagagagatataaaggcaccgaaagggagagattgctgaatttctag

SEQ ID NO: 5899 - DNA, 2883 bp, Artificial Sequence
  derived and/or modified sequence
atgtacgtgataatgtggattacatacatggcattcttactggtcttctttggcgcattttttgcagtctggtgttatcggaaaaggtactttgttagtgagtacaccccgatcgattccaatattgcattttccgttaatgcttccgataaaggaacagcctggctactgacaagtaccttcccctctagccccgtattgccaggggaggcaagttgctgtgaccctgtcagtgctgcattcgagggctgtctgcgccgcttgtttacgagatggggttccttctgtgtacgaaacccaggctgtgtgatatttttctctctagtcttcattaccgcttgtagctctgggctcgtgttcgtgagagtgaccactaatcccgtggacctatggagtgccccatcttctcaggctaggctagaaaaagagtacttcgatcagcattttggcccatttttccgcacggaacagcttattattagagccccactgaccgataaacatatctatcaaccttatccatccggagccgacgtgcctttcggccccccccttgatattcagattctgcaccaggttttggatttgcagatcgctatcgaaaacatcaccgcatcctatgataatgagacagtcacattacaggacatctgtctcgcccccctctctccatacaacaccaactgcacgatcctaagtgttcttaattacttccagaactcacactcagtgttggaccacaagaagggtgatgatttctttgtttacgccgattatcatacgcactttctctattgtgtgcgattcatcaactttgttaagaactacaaaaatcctaacctgacaatctccttcaccgctgagcgaagcatcgaagacgaattgaaccgagaatcagactctgacgtgttcaccgtggtcatctcctacgctataatgttcctgtatatttcactagccctcggccatatgaagagttgtcgccgtcttttagtggacagcaaggtaagtcttggcatcgcaggtattcttatcgtcctttccagtgttgcttgctccttgggggttttctcgtacatcgggctgccactgacgcttattgttatcgaagtaataccctttttggtcctggccgtaggcgtcgacaatatctttatcttagtgcaggcttaccagagagacgagagactccaaggagagaccctggatcagcagctcggccgagtgttgggagaagtggcaccatctatgtttcttagcagctttagcgagaccgtggcgttcttcctgggtgccctgtcagtcatgcctgctgtgcataccttttctctgttcgccggcctggctgtattcattgacttcctgctgcaaatcacttgttttgtgtcgctgctaggtctcgatattaaacggcaggaaaagaaccggctcgatatattctgctgtgtcagaggagctgaggacggaacaagtgtgcaagcctctgaatcatgcctgtttcgattctttaaaaactcatacagtccattgctcctgaaggattggatgcgtcccatcgtgattgcgattttcgtcggcgtgcttagcttttcaattgcggtcctgaacaaggtggatataggtctcgaccagtcattgtcaatgccggacgatagctatatggtggactacttcaaatccattagtcagtatctgcacgccggccccccagtctactttgtgctagaggagggccacgactacacatccagcaaaggtcagaacatggtgtgtggcggcatgggctgtaacaatgatagcctggtccagcaaatctttaacgcagcgcagttggataactacacgcgaatcggcttcgcgccgagttcttggatcgacgactattttgactgggtgaagcctcagagctcctgctgtcgtgtagataacatcaccgatcaattttgcaatgcatcagtagtcgatcccgcctgcgttcgctgccgcccattgacacctgaaggaaaacagcgcccccagggcggagatttcatgcggttcttaccgatgttcctaagtgacaaccccaaccctaagtgtggaaaaggcggacacgccgcctactctagcgccgtaaatatcctgctgggtcacggcacgagagtgggggccacatacttcatgacgtaccatacagtattgcaaacatctgcagattttatcgacgcccttaaaaaggcacgcctgattgcgtctaacgtaaccgaaactatgggcatcaatggaagtgcctatcgggtcttcccatacagcgtgttttatgtgttttacgagcagtatttgacgataattgacgacacaatcttcaacttgggcgtgagcctgggagcgatctttctcgtaaccatggtgctgctgggctgtgagctgtggagtgctgtcatcatgtgcgctactatcgccatggttttggttaacatgttcggggtcatgtggctttggggcatatctcttaacgcagtgagtctagtaaacctcgtaatgagctgtggcatttccgtggaattttgcagtcatatcacccgggcttttaccgtgagcatgaaggggagcagagtggaaagggctgaggaagccctggcccacatgggttcttctgtcttctcggggattaccttgacaaagtttggagggattgtagtgcttgccttcgccaagtcacaaattttccagatcttttactttcgaatgtacttagcaatggtcctgctcggagccacccacggcctgatttttttacccgtccttctctcatatattgggccttccgttaacaaagccaaatcttgcgctaccgaagagagatataaaggtacggagcgcgagcggctgctgaacttctag

SEQ ID NO: 5900 - DNA, 2331 bp, Artificial Sequence
  derived and/or modified sequence
atgtataacgcatgtcgggatgttgaggcaccatctagcaacgacaaggctttgggcctgctgtgcggaaaagatgcagacgcatgtaatgccacaaactggattgaatatatgttcaacaaggataacggccaggcgccgtttaccattacaccagtgttttccgatttcccagtacacgggatggaacccatgaataatgcaacaaagggatgcgacgaatctgtagacgaggtgacggcgccctgtagctgccaggactgtagcatagtctgcggccctaagcctcagcctccgccaccgccagcgccgtggactatcctcggacttgacgccatgtacgtaataatgtggattacatacatggcattcctgctagtgtttttcggtgcattttttgccgtgtggtgctatcgcaagcgctacttcgtctcagaatacacccctattgatagtaatatcgcttttagtgttaacgcgtctgataaaggcgaagctagctgttgtgacccagtgtctgcagcctttgagggttgtctgcgaagactgttcacacggtggggaagcttttgcgtgcggaatcccggatgcgttatcttctttagcctagtctttatcaccgcttgtagttccggacttgtgtttgtgcgcgtgaccacaaatcctgtcgatctgtggagcgctcccagttcccaggccaggctggaaaaagaatatttcgaccagcatttcggtccattctttcgcacagagcagcttattattcgcgcccccctgaccgataaacacatctatcaaccttatccttctggcgcagacgtccccttcgggccgccattagatattcagatcttgcaccaggtcttggatctacagattgctattgaaaacattacagcctcttacgacaacgagactgtcacgcttcaagatatttgcctcgcaccgttgtcgccatataacaccaactgcacaattcttagcgttctaaactatttccagaatagtcattccgtgttagatcacaaaaagggggatgatttcttcgtttatgccgattatcacactcacttcctgtactgtgtgcgcgcaccagctagcctgaacgacaccagcctgctgcacgacccctgtctgggcacattcggtgggcccgtattcccttggcttgtcctgggcggatatgatgatcaaaattataataacgcaactgccctcgtgattactttccccgtgaacaattactacaatgataccgagaaactgcaacgcgctcaggcctgggaaaaggaattcattaacttcgtcaaaaattacaaaaatcccaatctgacaatttccttcaccgctgagagatctattgaagatgaactgaatcgagagagtgactcagatgtgtttaccgtggtaatatcttatgccataatgttcctgtacattagtctcgctcttggccatatgaagtcctgcagacgactgttggtcgacagtaaagtctccctgggtatcgctggcattttgattgtcttaagttcggtcgcctgcagcctcggagtatttagctacatcggattgccgcttactttgatcgtgatcgaagtgatacccttccttgtgcttgcagtcggtgtggacaacatttttattctcgtgcaagcctaccaacgggacgagaggttacagggcgaaactctggaccagcaactggggcgggtgctgggcgaagtggccccttccatgtttctgagctctttctcagaaacagtggctttcttcttaggggctctctcggtgatgccagcagttcacaccttttctctattcgccggcctcgctgtctttattgactttttgctgcagatcacatgctttgtgtcccttttggggcttgacataaaaagacaggagaagaacaggctggatatattctgctgtgtgcgtggggccgaggacggaacaagcgtacaagctagcgagagctgcttattccgttttttcaaaaacagttatagtcccctgctgctgaaggactggatgcgcccaatagtgattgccatttttgtgggagtcctgtcatttagcatcgccgtcctgaataaagttgacataggtttggaccaatccctgtctatgccagacgacagctatatggtggattatttcaagtcgatcagccagtacctgcacgccgggcctcccgtgtactttgtcctggaagaggggcacgactatacatctagtaagggccaaaacatggtgtgcggaggcatggggtgtaataacgactccctggtgcagcagatctttaatgcggcccagcttgacaactag

SEQ ID NO: 5901 - DNA, 3837 bp, Artificial Sequence
  derived and/or modified sequence
atgacagcccggggcctggccctgggcctgctgctgctgctgctgtgcccagcccaggtgttcagccagagctgtgtgtggtacggggagtgtggcatcgcctatggagacaagcgctacaactgtgagtacagcggcccccccaagcccctgcccaaggatggctatgacctggtgcaggagctgtgccccggcttcttctttggaaatgtgtccctgtgctgtgatgtgcggcagctgcagaccctgaaggacaacctgcagctgcccctgcagttcctgagccgctgccccagctgcttctacaacctgctgaacctcttctgtgagctgacctgcagcccccggcagagccagttcctgaatgtgacagccacagaagattatgtggaccctgtgaccaaccagaccaagaccaacgtgaaggagctgcagtactacgtgggccagagctttgccaatgccatgtacaatgcctgcagagatgtggaggcccccagcagcaatgacaaggccctgggcctgctgtgtgggaaggatgctgatgcctgcaatgccaccaactggattgagtacatgttcaacaaggacaatggccaggcccccttcaccatcacccctgtgttcagtgacttccctgtgcacggcatggagcccatgaacaatgccaccaagggctgtgatgagagcgtggatgaggtgacagccccctgcagctgccaggactgcagcatcgtgtgtggccccaagccccagcccccacctcctccagccccctggaccatcctgggcctggatgccatgtatgtgatcatgtggatcacctacatggccttcctgctggtgttcttcggggccttctttgctgtgtggtgctacaggaagcgctactttgtgtctgagtacacccccatcgacagcaacatcgccttctctgtgaatgccagtgacaagggggaggccagctgctgtgaccctgtgtctgctgcctttgagggctgcctgcggcggctcttcacccgctggggcagcttctgtgtgaggaaccctggctgcgtcatcttcttcagcctggtgttcatcacagcctgcagcagcggcctggtgtttgtgcgggtgaccaccaaccctgtggacctgtggagcgcccccagcagccaggcccggctggagaaggagtactttgaccagcacttcggccccttcttcagaacagagcagctgatcatccgggcccccctgacagacaagcacatctaccagccctaccccagcggggctgatgtgccctttggaccacccctggacatccagatcctgcaccaggtgctggacctgcagatcgccatcgagaacatcacagccagctatgacaatgaaacagtgaccctgcaggacatctgcctggcccccctgagcccctacaacaccaactgcaccatcctgtctgtgctgaactacttccagaacagccacagcgtgctggaccacaagaagggagatgacttctttgtgtatgctgactaccacacccacttcctgtactgtgtgcgggccccagccagcctgaatgacaccagcctgctgcatgacccctgcctgggcacctttggaggccctgtgttcccctggctggtgctgggcggctatgatgaccagaactacaacaatgccacagccctggtgatcaccttccctgtgaacaactactacaatgacacagagaagctgcagagggcccaggcctgggagaaggagttcatcaactttgtgaagaactacaagaaccccaacctgaccatctccttcaccgctgagaggagcattgaagatgagctgaaccgggagagtgacagtgatgtgttcaccgtggtgatctcctatgccatcatgttcctgtacatcagcctggccctgggccacatgaagagctgccggcggctgctggtggacagcaaggtgtccctgggcattgctggcatcctgattgtgctgagctctgtggcctgcagcctgggcgtcttctcctacatcggcctgcccctgaccctgattgtgattgaagtcatccccttcctggtgctggccgtgggcgtggacaacatcttcatcctggtgcaggcctaccagagagatgagcggctgcagggcgagaccctggaccagcagctgggccgggtgctgggggaggtggcccccagcatgttcctgagcagcttcagcgagaccgtggccttcttcctgggcgccctgtctgtgatgcctgctgtgcacaccttcagcctgtttgctggcctggccgtgttcatcgacttcctgctgcagatcacctgctttgtgtccctgctgggcctggacatcaagaggcaggagaagaaccggctggacatcttctgctgcgtgagaggagcagaagatggcacctctgtgcaggccagcgagagctgcctcttccgcttcttcaagaacagctacagccccctgctgctgaaggactggatgaggcccatcgtgattgccatctttgtgggcgtgctgtccttcagcattgctgtgctgaacaaggtggacatcggcctggaccagagcctgtccatgccagatgacagctacatggtggactacttcaagagcatcagccagtacctgcatgctggcccccctgtgtactttgtgctggaggagggccatgactacaccagcagcaagggccagaacatggtgtgtggcggcatgggctgcaacaatgacagcctggtgcagcagatcttcaatgctgcccagctggacaactacaccagaattggatttgcccccagctcctggattgatgactactttgactgggtgaagccccagagcagctgctgccgggtggacaacatcacagaccagttctgcaatgcctctgtggtggaccctgcctgtgtgcgctgccggcccctgaccccagagggcaagcagaggccccagggcggggacttcatgaggttcctgcccatgttcctgagtgacaaccccaaccccaagtgtgggaaaggaggccatgctgcctacagcagcgctgtgaacatcctgctgggccacggcaccagggtgggcgccacctacttcatgacctaccacacagtgctgcagaccagcgctgacttcattgatgccctgaagaaggcccggctgattgccagcaatgtgacagagaccatgggcatcaatggcagcgcctacagagtcttcccctacagcgtcttctacgtgttctatgagcagtacctgaccatcattgatgacaccatcttcaacctgggcgtgtccctgggcgccatcttcctggtgaccatggtgctgctgggctgtgagctgtggagcgctgtgatcatgtgtgccaccatcgccatggtgctggtgaacatgtttggagtgatgtggctgtggggcatcagcctgaatgctgtgtccctggtgaacctggtgatgagctgtggcatctctgtggagttctgcagccacatcacccgggccttcaccgtgtccatgaagggcagccgggtggagagagctgaggaggccctggcccacatgggcagctctgtgttcagcggcatcaccctgaccaagtttggaggcatcgtggtgctggcctttgccaagagccagatcttccagatcttctacttcaggatgtacctggccatggtgctgctgggcgccacccacggcctcatcttcctgcctgtgctgctgagctacatcggccccagcgtgaacaaggccaagagctgtgccacagaggagcgctacaagggcacagagcgggagcggctgctgaacttctag

SEQ ID NO: 5902 - DNA, 2883 bp, Artificial Sequence
  derived and/or modified sequence
atgtatgtgatcatgtggatcacctacatggccttcctgctggtgttctttggagccttctttgctgtgtggtgctacaggaagcgctactttgtgtctgagtacacccccatcgacagcaacatcgccttctctgtgaatgccagtgacaagggcacagcctggctgctgaccagcaccttccccagcagccctgtgctgcccggggaggccagctgctgtgaccctgtgtctgctgcctttgagggctgcctgcggcggctcttcacccgctggggcagcttctgtgtgaggaaccctggctgcgtcatcttcttcagcctggtgttcatcacagcctgcagcagcggcctggtgtttgtgcgggtgaccaccaaccctgtggacctgtggagcgcccccagcagccaggcccggctggagaaggagtactttgaccagcacttcggccccttcttcagaacagagcagctgatcatccgggcccccctgacagacaagcacatctaccagccctaccccagcggggctgatgtgccctttggaccacccctggacatccagatcctgcaccaggtgctggacctgcagatcgccatcgagaacatcacagccagctatgacaatgaaacagtgaccctgcaggacatctgcctggcccccctgagcccctacaacaccaactgcaccatcctgtctgtgctgaactacttccagaacagccacagcgtgctggaccacaagaagggagatgacttctttgtgtatgctgactaccacacccacttcctgtactgtgtgcgcttcatcaactttgtgaagaactacaagaaccccaacctgaccatctccttcaccgctgagaggagcattgaagatgagctgaaccgggagagtgacagtgatgtgttcaccgtggtgatctcctatgccatcatgttcctgtacatcagcctggccctgggccacatgaagagctgccggcggctgctggtggacagcaaggtgtccctgggcattgctggcatcctgattgtgctgagctctgtggcctgcagcctgggcgtcttctcctacatcggcctgcccctgaccctgattgtgattgaagtcatccccttcctggtgctggccgtgggcgtggacaacatcttcatcctggtgcaggcctaccagagagatgagcggctgcagggcgagaccctggaccagcagctgggccgggtgctgggggaggtggcccccagcatgttcctgagcagcttcagcgagaccgtggccttcttcctgggcgccctgtctgtgatgcctgctgtgcacaccttcagcctgtttgctggcctggccgtgttcatcgacttcctgctgcagatcacctgctttgtgtccctgctgggcctggacatcaagaggcaggagaagaaccggctggacatcttctgctgcgtgagaggagcagaagatggcacctctgtgcaggccagcgagagctgcctcttccgcttcttcaagaacagctacagccccctgctgctgaaggactggatgaggcccatcgtgattgccatctttgtgggcgtgctgtccttcagcattgctgtgctgaacaaggtggacatcggcctggaccagagcctgtccatgccagatgacagctacatggtggactacttcaagagcatcagccagtacctgcatgctggcccccctgtgtactttgtgctggaggagggccatgactacaccagcagcaagggccagaacatggtgtgtggcggcatgggctgcaacaatgacagcctggtgcagcagatcttcaatgctgcccagctggacaactacaccagaattggatttgcccccagctcctggattgatgactactttgactgggtgaagccccagagcagctgctgccgggtggacaacatcacagaccagttctgcaatgcctctgtggtggaccctgcctgtgtgcgctgccggcccctgaccccagagggcaagcagaggccccagggcggggacttcatgaggttcctgcccatgttcctgagtgacaaccccaaccccaagtgtgggaaaggaggccatgctgcctacagcagcgctgtgaacatcctgctgggccacggcaccagggtgggcgccacctacttcatgacctaccacacagtgctgcagaccagcgctgacttcattgatgccctgaagaaggcccggctgattgccagcaatgtgacagagaccatgggcatcaatggcagcgcctacagagtcttcccctacagcgtcttctacgtgttctatgagcagtacctgaccatcattgatgacaccatcttcaacctgggcgtgtccctgggcgccatcttcctggtgaccatggtgctgctgggctgtgagctgtggagcgctgtgatcatgtgtgccaccatcgccatggtgctggtgaacatgtttggagtgatgtggctgtggggcatcagcctgaatgctgtgtccctggtgaacctggtgatgagctgtggcatctctgtggagttctgcagccacatcacccgggccttcaccgtgtccatgaagggcagccgggtggagagagctgaggaggccctggcccacatgggcagctctgtgttcagcggcatcaccctgaccaagtttggaggcatcgtggtgctggcctttgccaagagccagatcttccagatcttctacttcaggatgtacctggccatggtgctgctgggcgccacccacggcctcatcttcctgcctgtgctgctgagctacatcggccccagcgtgaacaaggccaagagctgtgccacagaggagcgctacaagggcacagagcgggagcggctgctgaacttctag

SEQ ID NO: 5903 - DNA, 2331 bp, Artificial Sequence
  derived and/or modified sequence
atgtacaatgcctgcagagatgtggaggcccccagcagcaatgacaaggccctgggcctgctgtgtgggaaggatgctgatgcctgcaatgccaccaactggattgagtacatgttcaacaaggacaatggccaggcccccttcaccatcacccctgtgttcagtgacttccctgtgcacggcatggagcccatgaacaatgccaccaagggctgtgatgaatctgtggatgaggtgacagccccctgcagctgccaggactgcagcatcgtgtgtggccccaagccccagcccccacctcctccagccccctggaccatcctgggcctggatgccatgtatgtgatcatgtggatcacctacatggccttcctgctggtgttctttggagccttctttgctgtgtggtgctacaggaagcgctactttgtgtctgagtacacccccatcgacagcaacatcgccttctctgtgaatgccagtgacaagggggaggccagctgctgtgaccctgtgtctgctgcctttgagggctgcctgcggcggctcttcacccgctggggcagcttctgtgtgagaaatcctggctgtgtgatcttcttcagcctggtgttcatcacagcctgcagcagcggcctggtgtttgtgcgggtgaccaccaaccctgtggacctgtggagcgcccccagcagccaggcccggctggagaaggagtactttgaccagcacttcggccccttcttcagaacagagcagctgatcatccgggcccccctgacagacaagcacatctaccagccctaccccagcggggctgatgtgcccttcggcccccccctggacatccagatcctgcaccaggtgctggacctgcagatcgccatcgagaacatcacagccagctatgacaatgagaccgtgaccctgcaggacatctgcctggcccccctgagcccctacaacaccaactgcaccatcctgtctgtgctgaactacttccagaacagccacagcgtgctggaccacaagaagggagatgacttctttgtgtatgctgactaccacacccacttcctgtactgtgtgcgggccccagccagcctgaatgacaccagcctgctgcatgacccctgcctgggcaccttcggcggccctgtgttcccctggctggtgctgggcggctatgatgaccagaactacaacaatgccacagccctggtgatcaccttccctgtgaacaactactacaatgacacagagaagctgcagagggcccaggcctgggagaaggagttcatcaactttgtgaagaactacaagaaccccaacctgaccatctccttcaccgctgagaggagcattgaagatgagctgaaccgggagagtgacagtgatgtgttcaccgtggtgatctcctatgccatcatgttcctgtacatcagcctggccctgggccacatgaagagctgccggcggctgctggtggacagcaaggtgtccctgggcattgctggcatcctgattgtgctgagctctgtggcctgcagcctgggcgtcttctcctacatcggcctgcccctgaccctcatcgtcatcgaggtgatccccttcctggtgctggccgtgggcgtggacaacatcttcatcctggtgcaggcctaccagagagatgagcggctgcagggcgagaccctggaccagcagctgggccgggtgctgggggaggtggcccccagcatgttcctgagcagcttcagcgagaccgtggccttcttcctgggcgccctgtctgtgatgcctgctgtgcacaccttcagcctgtttgctggcctggccgtgttcatcgacttcctgctgcagatcacctgctttgtgtccctgctgggcctggacatcaagaggcaggagaagaaccggctggacatcttctgctgcgtgagaggagcagaagatggcacctctgtgcaggccagcgagagctgcctcttccgcttcttcaagaacagctacagccccctgctgctgaaggactggatgaggcccatcgtcatcgccatctttgtgggcgtgctgtccttcagcattgctgtgctgaacaaggtggacatcggcctggaccagagcctgtccatgccagatgacagctacatggtggactacttcaagagcatcagccagtacctgcacgccggcccccctgtgtactttgtgctggaggagggccatgactacaccagcagcaagggccagaacatggtgtgtggcggcatgggctgcaacaatgacagcctggtgcagcagatcttcaatgctgcccagctggacaactag

SEQ ID NO: 5904 - DNA, 3837 bp, Artificial Sequence
  derived and/or modified sequence
atgaccgcccggggcctggccctgggcctgctgctgctgctgctgtgtccagcacaagttttctctcagagttgcgtttggtatggagaatgcggtatagcctacggtgacaaacgttataattgcgagtatagtggccctcctaaacccctcccgaaagacggatatgatctcgtgcaggagttgtgccccggttttttttttggaaatgtgtctttgtgttgcgatgtgaggcagcttcaaactctcaaggacaatctccaactgccattgcaattcctcagccgctgcccatcatgcttctataatctcctcaacctgttctgcgaacttacgtgcagccctcggcagagtcagttcctgaatgtcacggccaccgaagactacgtagatccagtgacgaatcagacaaagacaaatgtcaaagagctgcaatactacgtggggcagtctttcgccaacgcaatgtataatgcctgtagagacgtggaagccccctcaagtaacgataaggctctgggattactgtgtggtaaagatgccgacgcgtgtaacgcaaccaactggattgaatacatgtttaataaggacaacggccaggcgccgttcaccatcacacctgtgttcagcgactttcctgtccatgggatggaaccaatgaataatgcaacaaaagggtgcgacgagtccgttgatgaggtaactgctccttgtagctgtcaggattgctctatcgtatgcgggccaaagccacagccccctccgcccccagccccgtggacaattctagggcttgacgcgatgtacgtcattatgtggattacttatatggctttcttgctggtgttctttggagcgttttttgcagtatggtgttacagaaagcggtacttcgtttccgagtacaccccaatcgactccaatatagcattcagcgtgaatgctagcgataaaggtgaagccagctgttgcgatccagtcagtgccgctttcgaagggtgcctccgaaggctgttcactaggtggggaagcttctgtgtgaggaaccctggttgcgtgattttcttctcgttggtatttatcactgcatgttcctcgggacttgtatttgtgcgcgtcaccactaaccccgtagacctgtggtcagctccttccagccaagcccgactagagaaagagtacttcgaccaacactttggaccgttctttcgcactgagcagctaataatcagagcacccttaactgataaacatatttatcagccttacccaagcggagcagacgtccccttcggcccacctctggatatccaaatccttcatcaggtgttagatttgcaaatagccatcgaaaacatcaccgcctcctatgacaacgagactgttactctgcaagatatctgcctggccccactgtctccctacaatacaaactgtaccatcttatccgtgcttaactattttcagaacagtcattccgtgctagaccataaaaagggagacgatttctttgtgtatgcggactaccatacccacttcctttattgtgttagggcaccagcatctctcaatgataccagcctgctccacgatccttgcctggggacattcggcgggcccgtgttcccctggctggtgctaggaggctacgacgatcagaactataataatgctactgcactcgttatcacatttccagtaaataactactataatgatacagagaaactgcaacgcgctcaagcatgggagaaggaattcattaattttgtgaaaaactataaaaatccaaaccttacaatttctttcactgccgaacgcagtatcgaggatgagctgaatagagaatcagacagcgatgttttcaccgtagtgatcagctacgccatcatgtttctgtacattagcttggcactgggccacatgaagtcatgcaggcgcctcctcgtagattccaaggtgagccttgggatcgctggtatactcatagtgctcagttcggtggcatgcagcctgggagtgttctcgtacataggacttcccctcaccttgatcgtcattgaggtgatcccatttctcgtattagctgtcggggttgataatattttcatattggtccaggcataccagcgagacgagaggcttcagggcgagacattggatcagcaactggggagggtcctgggagaggtggccccctcaatgtttctgagctcattcagcgaaaccgttgcattcttcttaggcgccctctcagtcatgcctgccgtccacactttttctctgtttgccggcctggcggttttcatcgactttttactgcagattacgtgtttcgtctcgctgttggggcttgacatcaagaggcaagagaaaaatagactcgacatcttctgctgtgtccgaggcgcagaagacgggacttccgtacaggccagtgaatcctgcctctttcgatttttcaagaactcttacagtcccctgctgttgaaagactggatgcgccctatcgtgatcgccatattcgtgggagtgttgtcattctccatcgccgtgctcaacaaagtggacatcggtttggatcagtctctgtccatgcccgacgatagctacatggtggattatttcaagagcatatcccagtatctccacgcagggccacccgtctatttcgtgctcgaggagggccacgattatacttccagtaaggggcagaacatggtttgcggaggaatgggatgcaataatgatagtctggtgcagcaaatctttaatgctgctcagctagacaactacacccgcatcggctttgccccatccagttggatcgacgactatttcgactgggttaaacctcagagctcttgttgcagggtagataacatcacagatcagttttgcaatgcctcagtcgttgaccccgcatgcgtgagatgccgaccattaacccccgaaggaaagcagaggccccaggggggcgactttatgaggttcttgccaatgtttcttagtgacaaccccaaccctaagtgcgggaagggtggccatgcagcttattctagtgccgtcaacatacttctagggcacggaacaagagtaggggcaacatattttatgacttaccacaccgtgctacagacctcagccgattttatcgacgctctgaagaaagccagattgattgcatccaacgtgaccgagacgatgggaatcaacggttcagcataccgtgtattcccatattctgttttctacgtcttctatgaacagtacctcactatcattgacgacaccatctttaacttgggtgtgtctctcggagccatttttctggttaccatggtcctcctgggctgtgagctttggtctgccgtcatcatgtgtgctactattgccatggtcctggtgaacatgttcggcgtgatgtggctgtggggaatcagcctgaatgcggtcagtctggtaaatcttgttatgtcgtgtggcataagcgtggagttctgttctcatataacacgcgctttcacggtgagcatgaaaggttctcgcgtcgagcgggccgaagaggcactggcgcacatggggagctctgtgttttccggcataactctcactaagtttgggggtatcgtggtgctggcttttgcaaagtctcaaatctttcaaattttttatttccgcatgtatttagccatggtgctgctgggcgcaacacacgggctgatcttcttgccagtactgctctcatacattggccctagcgtcaataaggccaaatcgtgtgctacagaggaaaggtataaaggtaccgagcgtgagcgcttgctgaatttctag

SEQ ID NO: 5905 - DNA, 2883 bp, Artificial Sequence
  derived and/or modified sequence
atgtacgtgatcatgtggatcacctacatggccttcctgctggtgttttttggcgcattttttgccgtgtggtgctacaggaaacgctacttcgtatcagaatacacaccaatcgattccaacattgccttctccgtgaatgcttccgacaagggtactgcctggttgcttacctccacatttccatcaagtcccgtgctgcctggtgaggcctcctgttgcgaccccgtgtctgccgcctttgagggctgccttcggaggctgtttactcgttggggatccttctgcgtgcgaaaccccggctgtgtcatctttttctccttggtttttattacagcttgttcatctggcttggtctttgtacgagttaccaccaatccagtcgatctttggtctgcccccagtagtcaggctcggttggaaaaggagtactttgaccagcatttcggccccttttttaggaccgagcagctgatcataagagccccactcacagataagcatatctatcagccatatcccagtggtgccgatgttccgttcggaccgccgctagatatacagattctgcatcaggtcttggacctgcagatcgcaatcgaaaatattactgcatcttatgacaatgagaccgttacgctgcaggacatctgcctagcccccctcagcccctacaacacaaattgtacgattctcagcgtcctgaactactttcagaactcacattccgtgctggatcacaaaaagggggatgacttcttcgtgtatgccgactaccatactcatttcctctattgcgtgcgctttatcaattttgttaagaactacaaaaaccctaacctgaccatcagcttcacggctgagcgaagcatagaggatgaactgaatcgggagtcagattccgacgtgttcacggtagtgatatcatacgccatcatgttcctgtacattagcctggcacttggccacatgaagtcgtgtcgccggctgctggtcgactcaaaggtgagcctggggatagcaggcattctcattgtgttgtccagcgtggcttgcagccttggggtattttcgtacataggtctgccccttaccctgatcgtgatcgaggttatcccctttctggtccttgccgtgggggtggacaatattttcatactagtccaggcatatcaaagagacgaaagactgcagggagagaccttggatcagcagttgggcagggtcttgggcgaagtggcgcctagcatgttcctctcaagtttcagtgaaaccgtggccttctttctaggagcactaagtgtgatgccagcggtccacacctttagtctgttcgctggattagccgtgtttattgactttctgttacaaattacctgcttcgtctccctgctagggctggatatcaaacgccaggagaagaaccgccttgatatcttttgctgtgtccgaggcgccgaagacggcacttcagtccaagcctccgaaagttgcctgttccggtttttcaaaaacagctatagccccctgcttctcaaggattggatgaggccaattgttatcgccatctttgttggggttctgtcgttctcaatcgccgtcctcaacaaggttgacatcgggcttgatcagtcactctctatgcctgatgactcttatatggtagactattttaagtctatttcccaataccttcacgcgggaccccccgtgtactttgttttagaggagggtcacgattatacgtcaagcaaggggcagaacatggtgtgcggagggatggggtgtaacaatgactccttagtgcagcaaatctttaacgccgctcagctggataactatacccgtatcggatttgccccttcttcgtggattgatgattactttgactgggtgaaaccccagagctcttgttgtcgggtggacaacattacggatcagttctgcaatgccagcgttgttgatcctgcatgtgttaggtgccgaccactgacaccagaggggaagcagcggccacaggggggggactttatgaggtttctgcccatgttcctctcggataatcctaatccaaaatgcgggaagggcggtcatgccgcctactcatcagccgtcaatatcctcctgggccacggcacccgggtgggtgccacatacttcatgacttatcacacggtgctccagaccagtgcagatttcattgacgctttaaagaaggcccggcttattgccagcaacgtgaccgaaaccatggggattaacggatcagcttaccgggtcttcccttactctgtattctacgtcttttacgaacagtacttaaccatcatagatgacactatcttcaatctgggggtctcccttggcgcaatttttcttgtgactatggttctgttgggctgcgagctctggtcagctgttatcatgtgcgcgacgattgctatggtactggtcaatatgtttggggtcatgtggttgtggggaatatcgctcaacgccgtatcactcgtaaatctggtaatgtcctgcggaatctctgtcgaattctgctctcacatcacacgcgccttcacagtttctatgaaaggcagcagagtggaaagggccgaggaggccctcgcacacatgggctcaagcgtgttctcaggcatcactctcacaaaatttgggggcattgtggtcctagccttcgctaagagtcagattttccagatcttctatttccgcatgtacctggccatggtgcttctcggggctacacatggtctcatctttctcccggtgctcctgagttacatagggccgtcagtgaacaaggccaagagctgcgctacagaagagcgctataaaggcacagagcgtgaacgcctgctgaatttctag

SEQ ID NO: 5906 - DNA, 2331 bp, Artificial Sequence
  derived and/or modified sequence
atgtacaacgcctgccgggacgtggaggcccccagcagcaacgacaaggctctggggttgctatgtgggaaggacgctgacgcctgtaatgccactaattggattgagtatatgttcaacaaagacaatggtcaagccccctttaccatcacgccagtattttcagactttccagtacacggaatggagccaatgaacaatgctacgaaggggtgtgatgagagcgttgacgaggtgactgcgccatgttcttgtcaggattgctccatcgtgtgcggccctaaaccacagccacctccaccgccggcaccctggacaatccttgggctcgacgccatgtatgtgattatgtggattacctacatggcattcctcttagtgttttttggggccttcttcgctgtctggtgttaccgcaagcggtacttcgttagcgaatacactcctattgattccaatattgccttctccgtcaatgcctctgataagggcgaggcttcttgctgtgatcccgtgtcagcagcttttgaaggctgcctgcgcagactgtttacccgctggggctctttttgcgttaggaaccccggatgcgtgattttcttcagtttggttttcatcactgcctgctccagcggactggtgtttgtgagggtcaccacaaacccagtggacctgtggagtgcaccttcctctcaggcccggctcgaaaaggagtatttcgatcaacacttcggccctttttttcggaccgagcaactgattatccgcgcgcccctgactgacaagcatatctaccaaccatatccttctggcgctgacgtacccttcggaccccctttggacatccagattctccatcaggtcctggacttacaaattgccattgagaatattacagcctcatacgataatgaaacggtgacgttgcaggacatctgcctggccccactctctccatacaataccaactgtactatcctgtccgtgttaaactacttccagaactctcactctgttttagaccacaaaaaaggcgacgacttctttgtttatgcagattaccatacacactttctgtattgtgttagagcccccgccagtctcaatgataccagtcttctacatgacccatgtctcggcaccttcggaggtccggtgttcccgtggctagtgcttgggggctacgatgaccagaattataacaatgccaccgcattggtaattacctttcccgtcaataactactacaatgacacggaaaaattgcagagagctcaggcatgggaaaaggagttcattaatttcgtgaaaaattacaaaaaccctaacttgactatcagcttcacggcagaacggtccatcgaggatgagttgaaccgcgagtctgattccgatgtgttcacggtggtgatctcttacgcaattatgttcctgtatatctcccttgctctaggccacatgaagtcgtgccgaaggctgctcgtggactccaaggtgagcttgggaattgcgggaatattaatcgtgctctcatcagtggcgtgttcattgggagtcttctcctacattggtctgccattaacactgatcgtcattgaggtcattccttttcttgtcctcgccgtcggcgttgacaatatcttcattctcgtgcaggcttatcagcgtgacgagcggctgcagggtgaaaccctagaccagcagttaggtcgagttctcggcgaagtcgcccctagtatgtttctctcatcattttccgaaaccgttgctttctttctgggcgccttatccgtcatgcctgccgtgcataccttttccttgttcgccggcctggctgtctttatcgactttctgctgcagatcacatgctttgtgagcttgcttggcttggacatcaagcgacaagaaaaaaaccgactcgacattttctgttgcgtgcgaggagctgaagatggcactagtgtacaagcatccgaatcatgtctgtttaggttcttcaagaattcctactcacccctcctcctgaaggactggatgcgccctatcgtcatagcgatttttgtaggggttttgtcattctcgatcgccgtgttgaacaaagttgatatcggcctcgatcagtcattatcaatgccagacgatagctacatggtggactattttaaaagtatcagtcagtaccttcatgccggccctccagtttacttcgtcctcgaggaaggccatgactacacctcctcaaaaggccaaaatatggtgtgtgggggaatgggttgcaacaatgacagcctggtgcaacagatttttaacgcggcccaactcgacaattag

SEQ ID NO: 5907 - DNA, 4741 bp, Artificial Sequence
  derived and/or modified sequence
gctgccgcggtcagcgcctgctcctgctcctccgctcctcctgcgcggggtgctgaaacagcccggggaagtagagccgcctccggggagcccaaccagccgaacgccgccggcgtcagcagccttgcgcggccacagcatgaccgctcgcggcctggcccttggcctcctcctgctgctactgtgtccagcgcaggtgttttcacagtcctgtgtttggtatggagagtgtggaattgcatatggggacaagaggtacaattgcgaatattctggcccaccaaaaccattgccaaaggatggatatgacttagtgcaggaactctgtccaggattcttctttggcaatgtcagtctctgttgtgatgttcggcagcttcagacactaaaagacaacctgcagctgcctctacagtttctgtccagatgtccatcctgtttttataacctactgaacctgttttgtgagctgacatgtagccctcgacagagtcagtttttgaatgttacagctactgaagattatgttgatcctgttacaaaccagacgaaaacaaatgtgaaagagttacaatactacgtcggacagagttttgccaatgcaatgtacaatgcctgccgggatgtggaggccccctcaagtaatgacaaggccctgggactcctgtgtgggaaggacgctgacgcctgtaatgccaccaactggattgaatacatgttcaataaggacaatggacaggcaccttttaccatcactcctgtgttttcagattttccagtccatgggatggagcccatgaacaatgccaccaaaggctgtgacgagtctgtggatgaggtcacagcaccatgtagctgccaagactgctctattgtctgtggccccaagccccagcccccacctcctcctgctccctggacgatccttggcttggacgccatgtatgtcatcatgtggatcacctacatggcgtttttgcttgtgttttttggagcattttttgcagtgtggtgctacagaaaacggtattttgtctccgagtacactcccatcgatagcaatatagctttttctgttaatgcaagtgacaaaggagaggcgtcctgctgtgaccctgtcagcgcagcatttgagggctgcttgaggcggctgttcacacgctgggggtctttctgcgtccgaaaccctggctgtgtcattttcttctcgctggtcttcattactgcgtgttcgtcaggcctggtgtttgtccgggtcacaaccaatccagttgacctctggtcagcccccagcagccaggctcgcctggaaaaagagtactttgaccagcactttgggcctttcttccggacggagcagctcatcatccgggcccctctcactgacaaacacatttaccagccatacccttcgggagctgatgtaccctttggacctccgcttgacatacagatactgcaccaggttcttgacttacaaatagccatcgaaaacattactgcctcttatgacaatgagactgtgacacttcaagacatctgcttggcccctctttcaccgtataacacgaactgcaccattttgagtgtgttaaattacttccagaacagccattccgtgctggaccacaagaaaggggacgacttctttgtgtatgccgattaccacacgcactttctgtactgcgtacgggctcctgcctctctgaatgatacaagtttgctccatgacccttgtctgggtacgtttggtggaccagtgttcccgtggcttgtgttgggaggctatgatgatcaaaactacaataacgccactgcccttgtgattaccttccctgtcaataattactataatgatacagagaagctccagagggcccaggcctgggaaaaagagtttattaattttgtgaaaaactacaagaatcccaatctgaccatttccttcactgctgaacgaagtattgaagatgaactaaatcgtgaaagtgacagtgatgtcttcaccgttgtaattagctatgccatcatgtttctatatatttccctagccttggggcacatgaaaagctgtcgcaggcttctggtggattcgaaggtctcactaggcatcgcgggcatcttgatcgtgctgagctcggtggcttgctccttgggtgtcttcagctacattgggttgcccttgaccctcattgtgattgaagtcatcccgttcctggtgctggctgttggagtggacaacatcttcattctggtgcaggcctaccagagagatgaacgtcttcaaggggaaaccctggatcagcagctgggcagggtcctaggagaagtggctcccagtatgttcctgtcatccttttctgagactgtagcatttttcttaggagcattgtccgtgatgccagccgtgcacaccttctctctctttgcgggattggcagtcttcattgactttcttctgcagattacctgtttcgtgagtctcttggggttagacattaaacgtcaagagaaaaatcggctagacatcttttgctgtgtcagaggtgctgaagatggaacaagcgtccaggcctcagagagctgtttgtttcgcttcttcaaaaactcctattctccacttctgctaaaggactggatgagaccaattgtgatagcaatatttgtgggtgttctgtcattcagcatcgcagtcctgaacaaagtagatattggattggatcagtctctttcgatgccagatgactcctacatggtggattatttcaaatccatcagtcagtacctgcatgcgggtccgcctgtgtactttgtcctggaggaagggcacgactacacttcttccaaggggcagaacatggtgtgcggcggcatgggctgcaacaatgattccctggtgcagcagatatttaacgcggcgcagctggacaactatacccgaataggcttcgccccctcgtcctggatcgacgattatttcgactgggtgaagccacagtcgtcttgctgtcgagtggacaatatcactgaccagttctgcaatgcttcagtggttgaccctgcctgcgttcgctgcaggcctctgactccggaaggcaaacagaggcctcaggggggagacttcatgagattcctgcccatgttcctttcggataaccctaaccccaagtgtggcaaagggggacatgctgcctatagttctgcagttaacatcctccttggccatggcaccagggtcggagccacgtacttcatgacctaccacaccgtgctgcagacctctgctgactttattgacgctctgaagaaagcccgacttatagccagtaatgtcaccgaaaccatgggcattaacggcagtgcctaccgagtatttccttacagtgtgttttatgtcttctacgaacagtacctgaccatcattgacgacactatcttcaacctcggtgtgtccctgggcgcgatatttctggtgaccatggtcctcctgggctgtgagctctggtctgcagtcatcatgtgtgccaccatcgccatggtcttggtcaacatgtttggagttatgtggctctggggcatcagtctgaacgctgtatccttggtcaacctggtgatgagctgtggcatctccgtggagttctgcagccacataaccagagcgttcacggtgagcatgaaaggcagccgcgtggagcgcgcggaagaggcacttgcccacatgggcagctccgtgttcagtggaatcacacttacaaaatttggagggattgtggtgttggcttttgccaaatctcaaattttccagatattctacttcaggatgtatttggccatggtcttactgggagccactcacggattaatatttctccctgtcttactcagttacatagggccatcagtaaataaagccaaaagttgtgccactgaagagcgatacaaaggaacagagcgcgaacggcttctaaatttctagccctctcgcagggcatcctgactgaactgtgtctaagggtcggtcggtttaccactggacgggtgctgcatcggcaaggccaagttgaacaccggatggtgccaaccatcggttgtttggcagcagctttgaacgtagcgcctgtgaactcaggaatgcacagttgacttgggaagcagtattactagatctggaggcaaccacaggacactaaacttctcccagcctcttcaggaaagaaacctcattctttggcaagcaggaggtgacactagatggctgtgaatgtgatccgctcactgacactctgtaaaggccaatcaatgcactgtctgtctctccttttaggagtaagccatcccacaagttctataccatatttttagtgacagttgaggttgtagatacactttataacattttatagtttaaagagctttattaatgcaataaattaactttgtacacatttttatataaaaaaacagcaagtgatttcagaatgttgtaggcctcattagagcttggtctccaaaaatctgtttgaaaaaagcaacatgttcttcacagtgttcccctagaaaggaagagatttaattgccagttagatgtggcatgaaatgagggacaaagaaagcatctcgtaggtgtgtctactgggttttaacttatttttctttaataaaatacattgttttcctaagttttggggttaccctatctgctttgagagacaaatacaaaagctaaatggaagagattcta

SEQ ID NO: 5908 - DNA, 3171 bp, Artificial Sequence
  derived and/or modified sequence
ctgctccctggacgatccttggcttggacgccatgtatgtcatcatgtggatcacctacatggcgtttttgcttgtgttttttggagcattttttgcagtgtggtgctacagaaaacggtattttgtctccgagtacactcccatcgatagcaatatagctttttctgttaatgcaagtgacaaaggaacggcttggctcttaacctccaccttcccttcctctcccgttcttccaggagaggcgtcctgctgtgaccctgtcagcgcagcatttgagggctgcttgaggcggctgttcacacgctgggggtctttctgcgtccgaaaccctggctgtgtcattttcttctcgctggtcttcattactgcgtgttcgtcaggcctggtgtttgtccgggtcacaaccaatccagttgacctctggtcagcccccagcagccaggctcgcctggaaaaagagtactttgaccagcactttgggcctttcttccggacggagcagctcatcatccgggcccctctcactgacaaacacatttaccagccatacccttcgggagctgatgtaccctttggacctccgcttgacatacagatactgcaccaggttcttgacttacaaatagccatcgaaaacattactgcctcttatgacaatgagactgtgacacttcaagacatctgcttggcccctctttcaccgtataacacgaactgcaccattttgagtgtgttaaattacttccagaacagccattccgtgctggaccacaagaaaggggacgacttctttgtgtatgccgattaccacacgcactttctgtactgcgtacggtttattaattttgtgaaaaactacaagaatcccaatctgaccatttccttcactgctgaacgaagtattgaagatgaactaaatcgtgaaagtgacagtgatgtcttcaccgttgtaattagctatgccatcatgtttctatatatttccctagccttggggcacatgaaaagctgtcgcaggcttctggtggattcgaaggtctcactaggcatcgcgggcatcttgatcgtgctgagctcggtggcttgctccttgggtgtcttcagctacattgggttgcccttgaccctcattgtgattgaagtcatcccgttcctggtgctggctgttggagtggacaacatcttcattctggtgcaggcctaccagagagatgaacgtcttcaaggggaaaccctggatcagcagctgggcagggtcctaggagaagtggctcccagtatgttcctgtcatccttttctgagactgtagcatttttcttaggagcattgtccgtgatgccagccgtgcacaccttctctctctttgcgggattggcagtcttcattgactttcttctgcagattacctgtttcgtgagtctcttggggttagacattaaacgtcaagagaaaaatcggctagacatcttttgctgtgtcagaggtgctgaagatggaacaagcgtccaggcctcagagagctgtttgtttcgcttcttcaaaaactcctattctccacttctgctaaaggactggatgagaccaattgtgatagcaatatttgtgggtgttctgtcattcagcatcgcagtcctgaacaaagtagatattggattggatcagtctctttcgatgccagatgactcctacatggtggattatttcaaatccatcagtcagtacctgcatgcgggtccgcctgtgtactttgtcctggaggaagggcacgactacacttcttccaaggggcagaacatggtgtgcggcggcatgggctgcaacaatgattccctggtgcagcagatatttaacgcggcgcagctggacaactatacccgaataggcttcgccccctcgtcctggatcgacgattatttcgactgggtgaagccacagtcgtcttgctgtcgagtggacaatatcactgaccagttctgcaatgcttcagtggttgaccctgcctgcgttcgctgcaggcctctgactccggaaggcaaacagaggcctcaggggggagacttcatgagattcctgcccatgttcctttcggataaccctaaccccaagtgtggcaaagggggacatgctgcctatagttctgcagttaacatcctccttggccatggcaccagggtcggagccacgtacttcatgacctaccacaccgtgctgcagacctctgctgactttattgacgctctgaagaaagcccgacttatagccagtaatgtcaccgaaaccatgggcattaacggcagtgcctaccgagtatttccttacagtgtgttttatgtcttctacgaacagtacctgaccatcattgacgacactatcttcaacctcggtgtgtccctgggcgcgatatttctggtgaccatggtcctcctgggctgtgagctctggtctgcagtcatcatgtgtgccaccatcgccatggtcttggtcaacatgtttggagttatgtggctctggggcatcagtctgaacgctgtatccttggtcaacctggtgatgagctgtggcatctccgtggagttctgcagccacataaccagagcgttcacggtgagcatgaaaggcagccgcgtggagcgcgcggaagaggcacttgcccacatgggcagctccgtgttcagtggaatcacacttacaaaatttggagggattgtggtgttggcttttgccaaatctcaaattttccagatattctacttcaggatgtatttggccatggtcttactgggagccactcacggattaatatttctccctgtcttactcagttacatagggccatcagtaaataaagccaaaagttgtgccactgaagagcgatacaaaggaacagagcgcgaacggcttctaaatttctagccctctcgcagggcatcctgactgaactgtgtctaagggtcggtcggtttaccactggacgggtgctgcatcggcaaggccaagttgaacaccggatggtgccaaccatcggttgtttggcagcagctttgaacgtagcgcctgtgaactcaggaatgcacagttgacttgggaagcagtattactagatctggaggcaaccacaggacactaaacttctcccagcctcttcaggaaagaaacctcattctttggc

SEQ ID NO: 5909 - DNA, 2790 bp, Artificial Sequence
  derived and/or modified sequence
agcctgctgccgcggtcagcgcctgctcctgctcctccgctcctcctgcgcggggtgctgaaacagcccggggaagtagagccgcctccggggagcccaaccagccgaacgccgccggcgtcagcagccttgcgcggccacagcatgaccgctcgcggcctggcccttggcctcctcctgctgctactgtgtccagcgcagatgtccatcctgtttttataacctactgaacctgttttgtgagctgacatgtagccctcgacagagtcagtttttgaatgttacagctactgaagattatgttgatcctgttacaaaccagacgaaaacaaatgtgaaagagttacaatactacgtcggacagagttttgccaatgcaatgtacaatgcctgccgggatgtggaggccccctcaagtaatgacaaggccctgggactcctgtgtgggaaggacgctgacgcctgtaatgccaccaactggattgaatacatgttcaataaggacaatggacaggcaccttttaccatcactcctgtgttttcagattttccagtccatgggatggagcccatgaacaatgccaccaaaggctgtgacgagtctgtggatgaggtcacagcaccatgtagctgccaagactgctctattgtctgtggccccaagccccagcccccacctcctcctgctccctggacgatccttggcttggacgccatgtatgtcatcatgtggatcacctacatggcgtttttgcttgtgttttttggagcattttttgcagtgtggtgctacagaaaacggtattttgtctccgagtacactcccatcgatagcaatatagctttttctgttaatgcaagtgacaaaggagaggcgtcctgctgtgaccctgtcagcgcagcatttgagggctgcttgaggcggctgttcacacgctgggggtctttctgcgtccgaaaccctggctgtgtcattttcttctcgctggtcttcattactgcgtgttcgtcaggcctggtgtttgtccgggtcacaaccaatccagttgacctctggtcagcccccagcagccaggctcgcctggaaaaagagtactttgaccagcactttgggcctttcttccggacggagcagctcatcatccgggcccctctcactgacaaacacatttaccagccatacccttcgggagctgatgtaccctttggacctccgcttgacatacagatactgcaccaggttcttgacttacaaatagccatcgaaaacattactgcctcttatgacaatgagactgtgacacttcaagacatctgcttggcccctctttcaccgtataacacgaactgcaccattttgagtgtgttaaattacttccagaacagccattccgtgctggaccacaagaaaggggacgacttctttgtgtatgccgattaccacacgcactttctgtactgcgtacgggctcctgcctctctgaatgatacaagtttgctccatgacccttgtctgggtacgtttggtggaccagtgttcccgtggcttgtgttgggaggctatgatgatcaaaactacaataacgccactgcccttgtgattaccttccctgtcaataattactataatgatacagagaagctccagagggcccaggcctgggaaaaagagtttattaattttgtgaaaaactacaagaatcccaatctgaccatttccttcactgctgaacgaagtattgaagatgaactaaatcgtgaaagtgacagtgatgtcttcaccgttgtaattagctatgccatcatgtttctatatatttccctagccttggggcacatgaaaagctgtcgcaggcttctggtggattcgaaggtctcactaggcatcgcgggcatcttgatcgtgctgagctcggtggcttgctccttgggtgtcttcagctacattgggttgcccttgaccctcattgtgattgaagtcatcccgttcctggtgctggctgttggagtggacaacatcttcattctggtgcaggcctaccagagagatgaacgtcttcaaggggaaaccctggatcagcagctgggcagggtcctaggagaagtggctcccagtatgttcctgtcatccttttctgagactgtagcatttttcttaggagcattgtccgtgatgccagccgtgcacaccttctctctctttgcgggattggcagtcttcattgactttcttctgcagattacctgtttcgtgagtctcttggggttagacattaaacgtcaagagaaaaatcggctagacatcttttgctgtgtcagaggtgctgaagatggaacaagcgtccaggcctcagagagctgtttgtttcgcttcttcaaaaactcctattctccacttctgctaaaggactggatgagaccaattgtgatagcaatatttgtgggtgttctgtcattcagcatcgcagtcctgaacaaagtagatattggattggatcagtctctttcgatgccagatgactcctacatggtggattatttcaaatccatcagtcagtacctgcatgcgggtccgcctgtgtactttgtcctggaggaagggcacgactacacttcttccaaggggcagaacatggtgtgcggcggcatgggctgcaacaatgattccctggtgcagcagatatttaacgcggcgcagctggacaactagtcagtaccaccttgtcttgtacttcagaagcagcggaggaggctctcagccaggcagtcagctcaggcctgaaatgtctc

SEQ ID NO: 5910 - DNA, 3837 bp, Artificial Sequence
  derived and/or modified sequence
atgaccgcccgtggcctagcgctgggtctattgcttctgctcctatgccctgctcaagtgttctctcagagctgcgtctggtacggtgagtgtgggatcgcctacggcgacaaaaggtacaactgcgagtattccggtcccccaaagcccttacctaaggatggttatgatctcgtgcaggaactttgcccagggtttttttttggaaacgtcagcctgtgttgtgatgtgagacagcttcaaactctgaaggacaatttacagctcccactccagttcctcagccgctgcccaagctgcttctacaatctcctgaacctgttttgcgagctgacgtgtagcccgcgacagagccaatttctgaatgttaccgctacagaggattacgtggatccagttacaaaccagacaaagacaaacgtgaaagaactgcagtattacgtgggtcagtccttcgcgaatgccatgtacaatgcatgcagggatgttgaggccccaagttctaacgacaaagctttaggattactgtgtgggaaggatgctgacgcatgcaacgctaccaactggatagagtatatgttcaataaggataatgggcaggcccctttcacaatcactccggtatttagcgatttccctgtacatgggatggaacccatgaacaatgccaccaaagggtgcgatgaatctgtcgacgaagtgaccgccccatgcagttgtcaagattgtagcattgtctgcggacccaaaccccagcctccccctccgcctgcaccttggaccattttaggtctggatgcgatgtatgtgatcatgtggattacctacatggccttcttgctcgtctttttcggcgcttttttcgctgtctggtgttatagaaaacggtacttcgtatctgagtatacacccatcgatagcaatattgctttctctgttaacgcaagcgataaaggcgaagctagctgttgcgacccagtgtccgcggcattcgagggctgcctgaggagattattcacaagatggggcagcttttgtgtgcgcaaccctggatgcgtgatctttttctcccttgttttcatcaccgcctgcagcagcgggctggtctttgtgcgcgtcacaactaaccccgttgatctttggtcagcgccatcatcgcaggcaagactggaaaaggagtactttgaccagcactttgggcctttcttcaggaccgagcagctgatcatccgggctccgcttactgacaaacatatttaccaaccttacccatctggtgcagatgtgccgtttgggccacctctggacatccagatcctccatcaggttcttgatctccagatcgccatcgagaatattacagcctcctacgataacgaaacagtgaccctgcaggatatttgccttgccccactgtctccctacaacacaaattgtactatcctgagcgtgttgaactatttccagaattcacactctgtgctggaccacaagaaaggtgacgatttttttgtgtacgctgattaccatacgcattttctgtattgcgtgcgggctcccgcttctctgaatgacacctcactgcttcacgatccttgcctgggaacgttcggagggccagtttttccttggctcgttcttgggggatatgatgaccagaattacaataacgctaccgctctggttatcaccttccccgtgaacaattactataacgacaccgaaaaactgcaacgtgcgcaggcgtgggagaaagaattcataaacttcgttaagaactacaaaaaccccaatctgacaatctcattcactgccgaaagaagcattgaagatgaattaaacagagagtctgactctgatgtgttcactgtggtcatttcatatgcaatcatgtttctgtatataagcttagcactgggacacatgaaatcctgtcgaaggttgcttgttgactctaaggtgtcactgggcatcgcaggaatcttgattgtgctctcttcagtggcttgttctttaggcgtgttctcatatatcgggcttccactgacattaatcgtgatcgaagtgatcccgttcctcgtgctggccgtgggcgtcgacaatatattcattctcgtgcaggcctaccagagggatgagcgcctgcaaggagagacactagaccagcaattgggtagggtcctgggcgaagtagcaccttccatgttcctgagttcattttctgagacagtagcctttttcctgggggctcttagtgtgatgcccgctgtgcatacatttagtctctttgctggactggccgtctttatagactttctgctgcaaataacctgttttgtgtccctgctgggcctcgatataaagcggcaggaaaagaataggttagatatcttttgctgcgtgcgcggtgccgaggacggtacctccgtccaggccagtgagtcatgcctgttccggttctttaagaattcgtattctcctctgcttttgaaggactggatgcgccctattgtgattgcgatcttcgtcggcgtgctaagcttttccattgccgtgttgaataaagtggatattgggctggatcaatctctgagcatgccggatgacagctacatggtggattattttaaatccatcagccaatatcttcatgccggtccaccagtgtacttcgtcctggaagaaggccacgactacacctcatctaagggccagaacatggtttgtggagggatgggctgtaataatgactctttagtccagcaaattttcaacgcagcccagcttgataactacaccagaattgggtttgctccttcatcttggatcgacgactacttcgactgggtgaaacctcagtcttcttgctgccgcgtggataacatcacagaccaattctgtaatgcctcggttgtggacccagcgtgtgtgcgttgtcgccctctgacacccgaggggaagcaaagacctcaaggcggagatttcatgcggttcctaccaatgttccttagcgacaaccctaacccaaagtgcggtaagggagggcacgcggcatacagtagcgccgttaacatcctcctgggtcacgggactagggttggcgctacatatttcatgacctaccacaccgtgcttcagacaagcgccgacttcatcgatgctttgaaaaaagctaggctcatagcctcaaatgttacagaaaccatgggcatcaacgggtctgcataccgcgtctttccctactctgttttttacgtattctatgagcaatacctgactattatagacgatactatattcaatcttggcgtgtctcttggggctatctttctcgtcaccatggtgctgctcggttgtgaactgtggagcgcagtcatcatgtgcgcgacgattgcaatggttttggtgaatatgttcggagtgatgtggttgtggggcatcagtcttaacgcagtgtcgttagttaatctggtgatgtcttgcggaatctccgtcgagttctgttcacatataacaagagccttcacggttagtatgaaggggtcccgcgtcgagagggctgaggaagccctggcacatatgggcagctccgttttcagtggtattactttgactaagttcggaggcattgtcgtattagcttttgccaaaagtcaaatttttcagatcttctacttcaggatgtatctcgcgatggtcttgctgggggcaacccatggcctgattttcctgccagtccttttgagttatatcggtccttccgttaataaggccaaatcctgcgcgacggaagagagatataagggaaccgagagagaacgcttgttgaatttctag

SEQ ID NO: 5911 - DNA, 2883 bp, Artificial Sequence
  derived and/or modified sequence
atgtacgtgattatgtggattacatacatggccttcctgttggttttttttggggctttctttgcagtttggtgttatcggaaacggtatttcgtgagcgagtacacaccaattgattcaaatattgccttttctgtgaatgcttccgataaaggtacagcctggctcttaaccagcacattcccctctagtccagtcctcccgggagaggcttcttgctgcgatcccgtgtccgccgcttttgagggttgcctgagaagattgtttactagatgggggtccttctgtgtgcggaacccagggtgtgtcatcttctttagtttggtgttcatcacagcctgttcgtccgggctcgtcttcgtgcgcgtgaccaccaatccagtagacctgtggtcagcccctagctcccaagcacggctagagaaggagtatttcgaccagcactttggtccattctttagaacagaacaacttatcataagagcccctctgaccgataagcacatttaccaaccttatccatccggcgcagatgtgccgtttggccctcctcttgacatccagatcctacaccaagtgctcgacctccaaatagccatcgaaaacataaccgcatcatatgacaatgagaccgttaccttgcaggacatttgtctggcgccactttccccttacaacacgaactgcacaatcctttctgttttgaattacttccaaaactcgcatagcgttctcgaccacaaaaagggagacgacttcttcgtgtatgctgattaccatacccatttcctatactgtgtgagattcatcaattttgtcaaaaattacaaaaacccaaatctgacaatctcctttaccgcagagcgttctattgaagatgaactgaatagagagtcagacagcgatgtgtttactgtcgtgattagttatgcgattatgttcctgtatatcagtctggcgctcggacatatgaagtcttgccgacgactgctggtcgacagcaaagtttccttaggtattgcgggaatcttaatcgttctaagctcagtcgcatgtagtttgggagtcttttcctacattggcctacccctgacactgatcgtgattgaggtgattccctttctcgtgctggccgttggtgtggacaacatcttcatccttgttcaggcctatcagagagatgagagactgcagggcgagactctggaccagcagctcggtcgggtgctcggggaggtagccccttccatgttccttagctcattcagtgaaaccgtggcctttttcctcggggcactctcagttatgcctgcggtgcataccttcagcttatttgcaggactagctgtttttattgactttctgcttcagattacgtgttttgtctctctactgggtcttgatatcaagcggcaggaaaagaatcggctggatattttctgttgtgtgaggggagccgaggatggcacatccgtccaggcttcagagtcgtgcctgttccggttcttcaaaaatagctattctcctctattactaaaagattggatgcgccctatagtcatcgccatcttcgtgggcgtcctgtctttcagtatagcagtattgaacaaggttgacattgggctggatcagagcctgtcaatgccggacgattcctacatggtagactactttaaatccataagccagtatcttcacgctggaccaccggtgtactttgtcctggaagagggccacgactatacaagctcaaaaggccaaaacatggtgtgcgggggaatgggctgcaataacgactccctggttcagcagattttcaacgccgcacagttagacaattacactaggatcggattcgcccctagctcttggatagatgactactttgactgggttaagccccagtctagctgctgtcgggtagacaatatcacagatcaattttgcaatgccagcgtggtcgacccagcttgcgtgaggtgcaggcccctgaccccggagggaaaacaacgaccccaggggggagacttcatgcgctttctgcctatgttcttaagtgacaacccaaatcccaagtgcggcaaggggggtcatgccgcatactcctctgccgtaaacatcctcctggggcatggcacacgggtcggagcaacatactttatgacatatcacaccgtgttacagactagcgcagatttcatcgacgctttgaaaaaggccagacttattgccagtaatgtcaccgaaaccatggggattaacgggagcgcttaccgggttttcccatactctgtgttctacgtgttttatgaacaatatctgactattattgatgacaccattttcaacttgggagtctccctcggagcaattttcctcgtcacaatggtgcttctgggctgcgaactctggagtgccgtgattatgtgcgccactatagccatggtgcttgtcaatatgttcggtgttatgtggctgtggggaatttctcttaatgcagtatcattagtgaacctggttatgtcttgcggtataagtgtggaattttgctctcacataacgagagcatttactgtgagcatgaagggctctcgggtagagcgcgctgaagaagccttagcccatatgggatccagcgtgttcagtggaattactctgactaaatttggtgggattgtggtcctcgcattcgctaagtcccagatcttccagatcttctacttccgaatgtatctggcaatggtcctcctcggggcaacacatggtctgatcttcttacctgttctcctaagctatattgggccaagcgtcaataaggcaaaatcatgcgccaccgaggaacgctataagggcacagagcgcgaacgtctgttaaacttttag

SEQ ID NO: 5912 - DNA, 2331 bp, Artificial Sequence
  derived and/or modified sequence
atgtacaacgcgtgtcgagacgtagaagcacccagctccaatgataaggctcttggcctgctttgtggaaaggatgctgatgcatgcaacgccactaattggatcgaatacatgttcaacaaagataacggccaggcccctttcactatcactcccgtcttttccgactttccggtgcacggtatggaacccatgaacaacgctaccaagggatgcgacgagtccgttgatgaagttaccgcgccttgtagttgccaggactgctcaatcgtctgcggacccaaaccccaaccgcctcccccacctgccccatggaccattctgggacttgatgccatgtatgtcattatgtggatcacctatatggcgttcctgctagtcttcttcggagcctttttcgccgtatggtgttaccgtaagcgctactttgtcagtgaatatacccctatagacagcaacatcgcttttagcgttaatgcttctgataaaggcgaagcatcctgctgtgatccagtatctgctgcctttgagggctgcttacgacgactttttaccaggtgggggtctttctgtgtgcgcaatcccggttgcgttatcttcttctcgctggtgtttatcaccgcatgcagtagtgggctggtcttcgtgagagtgacaactaacccggtggatctgtggtcagcaccctcgtctcaggctcgattggaaaaagagtattttgatcaacattttggaccctttttcagaacagaacagctgatcattagagctcccctcacagacaagcatatctaccaaccatatccttcaggagccgatgtgccattcgggccaccactggatatccagatcctgcaccaggttctggatttgcagatcgcgattgagaatatcactgcctcctacgataacgaaacagtcactctgcaagacatttgcttagcacctttgtccccttacaatactaactgtaccattctgagcgtgttgaactactttcagaacagtcacagcgtgctcgaccataaaaagggcgatgacttctttgtgtacgctgactaccacacccatttcctgtattgcgtcagagcacctgccagcctcaatgacacctcactcctccatgacccctgcctgggtacctttgggggtcctgtattcccatggctcgtactgggcggttacgatgatcagaactacaataacgctaccgccctggtgataaccttcccggtaaacaattactacaacgacaccgaaaagttgcagagggctcaagcttgggagaaagaattcattaacttcgtcaaaaattataaaaatcccaatcttacaatatcattcacagccgaacgatcaatagaggacgagctcaatagagaatccgactcggacgtgttcactgtcgtcatctcttatgccatcatgtttttgtatattagcttggccctggggcacatgaagagttgtagacggcttctggtggattccaaagtctccctaggtatagccggaattctgattgtgctctcaagtgtagcctgtagtctgggagtgtttagctatatcggactgcccctgaccctcatcgttattgaggtgattccttttctcgtgcttgccgtgggcgttgataacatctttattctggtgcaggcataccagcgtgacgagcgcttgcagggcgagacgctcgaccaacagctgggtcgggtcctgggagaggtcgcaccctccatgttcttgtcgtcctttagtgaaacggtagctttctttttgggtgcattgagtgtaatgcccgcagtgcatacattttccctctttgctggactggctgtctttattgattttcttctccagatcacttgcttcgtctcattgctggggctggatataaagagacaggaaaagaaccggctggatatcttctgctgcgttcgtggagctgaagatgggacgtcggtgcaggcttccgaatcctgcttgtttcggttttttaaaaacagctatagcccactcctgctcaaagattggatgcgcccaattgtgattgctatttttgttggcgttctcagcttctcgatcgcggtactgaacaaggtggacattggactggaccaatcactaagtatgccagatgactcttatatggtcgattactttaaatccatctctcagtaccttcacgccggtccacctgtctacttcgtgctggaagaaggacacgactacacaagctccaaaggccagaacatggtctgcggcggtatgggatgtaataatgactctctggtccaacagatattcaacgctgcacagctcgacaactag

SEQ ID NO: 5913 - DNA, 3837 bp, Artificial Sequence
  derived and/or modified sequence
atgaccgccagaggcctggccctgggcctgctgctgctgctgctgtgccccgcccaggtgttcagccagagctgcgtgtggtacggcgagtgcggcatcgcctacggcgacaagagatacaactgcgagtacagcggcccccccaagcccctgcccaaggacggctacgacctggtgcaggagctgtgccccggcttcttcttcggcaacgtgagcctgtgctgcgacgtgagacagctgcagaccctgaaggacaacctgcagctgcccctgcagttcctgagcagatgccccagctgcttctacaacctgctgaacctgttctgcgagctgacctgcagccccagacagagccagttcctgaacgtgaccgccaccgaggactacgtggaccccgtgaccaaccagaccaagaccaacgtgaaggagctgcagtactacgtgggccagagcttcgccaacgccatgtacaacgcctgcagagacgtggaggcccccagcagcaacgacaaggccctgggcctgctgtgcggcaaggacgccgacgcctgcaacgccaccaactggatcgagtacatgttcaacaaggacaacggccaggcccccttcaccatcacccccgtgttcagcgacttccccgtgcacggcatggagcccatgaacaacgccaccaagggctgcgacgagagcgtggacgaggtgaccgccccctgcagctgccaggactgcagcatcgtgtgcggccccaagccccagcccccccccccccccgccccctggaccatcctgggcctggacgccatgtacgtgatcatgtggatcacctacatggccttcctgctggtgttcttcggcgccttcttcgccgtgtggtgctacagaaagagatacttcgtgagcgagtacacccccatcgacagcaacatcgccttcagcgtgaacgccagcgacaagggcgaggccagctgctgcgaccccgtgagcgccgccttcgagggctgcctgagaagactgttcaccagatggggcagcttctgcgtgagaaaccccggctgcgtgatcttcttcagcctggtgttcatcaccgcctgcagcagcggcctggtgttcgtgagagtgaccaccaaccccgtggacctgtggagcgcccccagcagccaggccagactggagaaggagtacttcgaccagcacttcggccccttcttcagaaccgagcagctgatcatcagagcccccctgaccgacaagcacatctaccagccctaccccagcggcgccgacgtgcccttcggcccccccctggacatccagatcctgcaccaggtgctggacctgcagatcgccatcgagaacatcaccgccagctacgacaacgagaccgtgaccctgcaggacatctgcctggcccccctgagcccctacaacaccaactgcaccatcctgagcgtgctgaactacttccagaacagccacagcgtgctggaccacaagaagggcgacgacttcttcgtgtacgccgactaccacacccacttcctgtactgcgtgagagcccccgccagcctgaacgacaccagcctgctgcacgacccctgcctgggcaccttcggcggccccgtgttcccctggctggtgctgggcggctacgacgaccagaactacaacaacgccaccgccctggtgatcaccttccccgtgaacaactactacaacgacaccgagaagctgcagagagcccaggcctgggagaaggagttcatcaacttcgtgaagaactacaagaaccccaacctgaccatcagcttcaccgccgagagaagcatcgaggacgagctgaacagagagagcgacagcgacgtgttcaccgtggtgatcagctacgccatcatgttcctgtacatcagcctggccctgggccacatgaagagctgcagaagactgctggtggacagcaaggtgagcctgggcatcgccggcatcctgatcgtgctgagcagcgtggcctgcagcctgggcgtgttcagctacatcggcctgcccctgaccctgatcgtgatcgaggtgatccccttcctggtgctggccgtgggcgtggacaacatcttcatcctggtgcaggcctaccagagagacgagagactgcagggcgagaccctggaccagcagctgggcagagtgctgggcgaggtggcccccagcatgttcctgagcagcttcagcgagaccgtggccttcttcctgggcgccctgagcgtgatgcccgccgtgcacaccttcagcctgttcgccggcctggccgtgttcatcgacttcctgctgcagatcacctgcttcgtgagcctgctgggcctggacatcaagagacaggagaagaacagactggacatcttctgctgcgtgagaggcgccgaggacggcaccagcgtgcaggccagcgagagctgcctgttcagattcttcaagaacagctacagccccctgctgctgaaggactggatgagacccatcgtgatcgccatcttcgtgggcgtgctgagcttcagcatcgccgtgctgaacaaggtggacatcggcctggaccagagcctgagcatgcccgacgacagctacatggtggactacttcaagagcatcagccagtacctgcacgccggcccccccgtgtacttcgtgctggaggagggccacgactacaccagcagcaagggccagaacatggtgtgcggcggcatgggctgcaacaacgacagcctggtgcagcagatcttcaacgccgcccagctggacaactacaccagaatcggcttcgcccccagcagctggatcgacgactacttcgactgggtgaagccccagagcagctgctgcagagtggacaacatcaccgaccagttctgcaacgccagcgtggtggaccccgcctgcgtgagatgcagacccctgacccccgagggcaagcagagaccccagggcggcgacttcatgagattcctgcccatgttcctgagcgacaaccccaaccccaagtgcggcaagggcggccacgccgcctacagcagcgccgtgaacatcctgctgggccacggcaccagagtgggcgccacctacttcatgacctaccacaccgtgctgcagaccagcgccgacttcatcgacgccctgaagaaggccagactgatcgccagcaacgtgaccgagaccatgggcatcaacggcagcgcctacagagtgttcccctacagcgtgttctacgtgttctacgagcagtacctgaccatcatcgacgacaccatcttcaacctgggcgtgagcctgggcgccatcttcctggtgaccatggtgctgctgggctgcgagctgtggagcgccgtgatcatgtgcgccaccatcgccatggtgctggtgaacatgttcggcgtgatgtggctgtggggcatcagcctgaacgccgtgagcctggtgaacctggtgatgagctgcggcatcagcgtggagttctgcagccacatcaccagagccttcaccgtgagcatgaagggcagcagagtggagagagccgaggaggccctggcccacatgggcagcagcgtgttcagcggcatcaccctgaccaagttcggcggcatcgtggtgctggccttcgccaagagccagatcttccagatcttctacttcagaatgtacctggccatggtgctgctgggcgccacccacggcctgatcttcctgcccgtgctgctgagctacatcggccccagcgtgaacaaggccaagagctgcgccaccgaggagagatacaagggcaccgagagagagagactgctgaacttctag

SEQ ID NO: 5914 - DNA, 2883 bp, Artificial Sequence
  derived and/or modified sequence
atgtacgtgatcatgtggatcacctacatggccttcctgctggtgttcttcggcgccttcttcgccgtgtggtgctacagaaagagatacttcgtgagcgagtacacccccatcgacagcaacatcgccttcagcgtgaacgccagcgacaagggcaccgcctggctgctgaccagcaccttccccagcagccccgtgctgcccggcgaggccagctgctgcgaccccgtgagcgccgccttcgagggctgcctgagaagactgttcaccagatggggcagcttctgcgtgagaaaccccggctgcgtgatcttcttcagcctggtgttcatcaccgcctgcagcagcggcctggtgttcgtgagagtgaccaccaaccccgtggacctgtggagcgcccccagcagccaggccagactggagaaggagtacttcgaccagcacttcggccccttcttcagaaccgagcagctgatcatcagagcccccctgaccgacaagcacatctaccagccctaccccagcggcgccgacgtgcccttcggcccccccctggacatccagatcctgcaccaggtgctggacctgcagatcgccatcgagaacatcaccgccagctacgacaacgagaccgtgaccctgcaggacatctgcctggcccccctgagcccctacaacaccaactgcaccatcctgagcgtgctgaactacttccagaacagccacagcgtgctggaccacaagaagggcgacgacttcttcgtgtacgccgactaccacacccacttcctgtactgcgtgagattcatcaacttcgtgaagaactacaagaaccccaacctgaccatcagcttcaccgccgagagaagcatcgaggacgagctgaacagagagagcgacagcgacgtgttcaccgtggtgatcagctacgccatcatgttcctgtacatcagcctggccctgggccacatgaagagctgcagaagactgctggtggacagcaaggtgagcctgggcatcgccggcatcctgatcgtgctgagcagcgtggcctgcagcctgggcgtgttcagctacatcggcctgcccctgaccctgatcgtgatcgaggtgatccccttcctggtgctggccgtgggcgtggacaacatcttcatcctggtgcaggcctaccagagagacgagagactgcagggcgagaccctggaccagcagctgggcagagtgctgggcgaggtggcccccagcatgttcctgagcagcttcagcgagaccgtggccttcttcctgggcgccctgagcgtgatgcccgccgtgcacaccttcagcctgttcgccggcctggccgtgttcatcgacttcctgctgcagatcacctgcttcgtgagcctgctgggcctggacatcaagagacaggagaagaacagactggacatcttctgctgcgtgagaggcgccgaggacggcaccagcgtgcaggccagcgagagctgcctgttcagattcttcaagaacagctacagccccctgctgctgaaggactggatgagacccatcgtgatcgccatcttcgtgggcgtgctgagcttcagcatcgccgtgctgaacaaggtggacatcggcctggaccagagcctgagcatgcccgacgacagctacatggtggactacttcaagagcatcagccagtacctgcacgccggcccccccgtgtacttcgtgctggaggagggccacgactacaccagcagcaagggccagaacatggtgtgcggcggcatgggctgcaacaacgacagcctggtgcagcagatcttcaacgccgcccagctggacaactacaccagaatcggcttcgcccccagcagctggatcgacgactacttcgactgggtgaagccccagagcagctgctgcagagtggacaacatcaccgaccagttctgcaacgccagcgtggtggaccccgcctgcgtgagatgcagacccctgacccccgagggcaagcagagaccccagggcggcgacttcatgagattcctgcccatgttcctgagcgacaaccccaaccccaagtgcggcaagggcggccacgccgcctacagcagcgccgtgaacatcctgctgggccacggcaccagagtgggcgccacctacttcatgacctaccacaccgtgctgcagaccagcgccgacttcatcgacgccctgaagaaggccagactgatcgccagcaacgtgaccgagaccatgggcatcaacggcagcgcctacagagtgttcccctacagcgtgttctacgtgttctacgagcagtacctgaccatcatcgacgacaccatcttcaacctgggcgtgagcctgggcgccatcttcctggtgaccatggtgctgctgggctgcgagctgtggagcgccgtgatcatgtgcgccaccatcgccatggtgctggtgaacatgttcggcgtgatgtggctgtggggcatcagcctgaacgccgtgagcctggtgaacctggtgatgagctgcggcatcagcgtggagttctgcagccacatcaccagagccttcaccgtgagcatgaagggcagcagagtggagagagccgaggaggccctggcccacatgggcagcagcgtgttcagcggcatcaccctgaccaagttcggcggcatcgtggtgctggccttcgccaagagccagatcttccagatcttctacttcagaatgtacctggccatggtgctgctgggcgccacccacggcctgatcttcctgcccgtgctgctgagctacatcggccccagcgtgaacaaggccaagagctgcgccaccgaggagagatacaagggcaccgagagagagagactgctgaacttctag

SEQ ID NO: 5915 - DNA, 2331 bp, Artificial Sequence
  derived and/or modified sequence
atgtacaacgcctgcagagacgtggaggcccccagcagcaacgacaaggccctgggcctgctgtgcggcaaggacgccgacgcctgcaacgccaccaactggatcgagtacatgttcaacaaggacaacggccaggcccccttcaccatcacccccgtgttcagcgacttccccgtgcacggcatggagcccatgaacaacgccaccaagggctgcgacgagagcgtggacgaggtgaccgccccctgcagctgccaggactgcagcatcgtgtgcggccccaagccccagcccccccccccccccgccccctggaccatcctgggcctggacgccatgtacgtgatcatgtggatcacctacatggccttcctgctggtgttcttcggcgccttcttcgccgtgtggtgctacagaaagagatacttcgtgagcgagtacacccccatcgacagcaacatcgccttcagcgtgaacgccagcgacaagggcgaggccagctgctgcgaccccgtgagcgccgccttcgagggctgcctgagaagactgttcaccagatggggcagcttctgcgtgagaaaccccggctgcgtgatcttcttcagcctggtgttcatcaccgcctgcagcagcggcctggtgttcgtgagagtgaccaccaaccccgtggacctgtggagcgcccccagcagccaggccagactggagaaggagtacttcgaccagcacttcggccccttcttcagaaccgagcagctgatcatcagagcccccctgaccgacaagcacatctaccagccctaccccagcggcgccgacgtgcccttcggcccccccctggacatccagatcctgcaccaggtgctggacctgcagatcgccatcgagaacatcaccgccagctacgacaacgagaccgtgaccctgcaggacatctgcctggcccccctgagcccctacaacaccaactgcaccatcctgagcgtgctgaactacttccagaacagccacagcgtgctggaccacaagaagggcgacgacttcttcgtgtacgccgactaccacacccacttcctgtactgcgtgagagcccccgccagcctgaacgacaccagcctgctgcacgacccctgcctgggcaccttcggcggccccgtgttcccctggctggtgctgggcggctacgacgaccagaactacaacaacgccaccgccctggtgatcaccttccccgtgaacaactactacaacgacaccgagaagctgcagagagcccaggcctgggagaaggagttcatcaacttcgtgaagaactacaagaaccccaacctgaccatcagcttcaccgccgagagaagcatcgaggacgagctgaacagagagagcgacagcgacgtgttcaccgtggtgatcagctacgccatcatgttcctgtacatcagcctggccctgggccacatgaagagctgcagaagactgctggtggacagcaaggtgagcctgggcatcgccggcatcctgatcgtgctgagcagcgtggcctgcagcctgggcgtgttcagctacatcggcctgcccctgaccctgatcgtgatcgaggtgatccccttcctggtgctggccgtgggcgtggacaacatcttcatcctggtgcaggcctaccagagagacgagagactgcagggcgagaccctggaccagcagctgggcagagtgctgggcgaggtggcccccagcatgttcctgagcagcttcagcgagaccgtggccttcttcctgggcgccctgagcgtgatgcccgccgtgcacaccttcagcctgttcgccggcctggccgtgttcatcgacttcctgctgcagatcacctgcttcgtgagcctgctgggcctggacatcaagagacaggagaagaacagactggacatcttctgctgcgtgagaggcgccgaggacggcaccagcgtgcaggccagcgagagctgcctgttcagattcttcaagaacagctacagccccctgctgctgaaggactggatgagacccatcgtgatcgccatcttcgtgggcgtgctgagcttcagcatcgccgtgctgaacaaggtggacatcggcctggaccagagcctgagcatgcccgacgacagctacatggtggactacttcaagagcatcagccagtacctgcacgccggcccccccgtgtacttcgtgctggaggagggccacgactacaccagcagcaagggccagaacatggtgtgcggcggcatgggctgcaacaacgacagcctggtgcagcagatcttcaacgccgcccagctggacaactag

SEQ ID NO: 5916 - protein, 733 aa, Artificial Sequence
  derived and/or modified sequence
MLARRQRDPLQALRRRNQELKQQVDSLLSESQLKEALEPNKRQHIYQRCIQLKQAIDENKNALQKLSKADESAPVANYNQRKEEEHTLLDKLTQQLQGLAVTISRENITEVGAPTEEEEESESEDSEDSGGEEEDAEEEEEEKEENESHKWSTGEEYIAVGDFTAQQVGDLTFKKGEILLVIEKKPDGWWIAKDAKGNEGLVPRTYLEPYSEEEEGQESSEEGSEEDVEAVDETADGAEVKQRTDPHWSAVQKAISEAGIFCLVNHVSFCYLIVLMRNRMETVEDTNGSETGFRAWNVQSRGRIFLVSKPVLQQINTVDVLTTMGAIPAGFRPSTLSQLLEEGNQFRANYFLQPELMPSQLAFRDLMWDATEGTIRSRPSRISLILTLWSCKMIPLPGMSIQVLSRHVRLCLFDGNKVLSNIHTVRATWQPKKPKTWTFSPQVTRILPCLLDGDCFIRSNSASPDLGILFELGISYIRNSTGERGELSCGWVFLKLFDASGVPIPAKTYELFLNGGTPYEKGIEVDPSISRRAHGSVFYQIMTMRRQPQLLVKLRSLNRRSRNVLSLLPETLIGNMCSIHLLIFYRQILGDVLLKDRMSLQSTDLISHPMLATFPMLLEQPDVMDALRSSWAGKESTLKRSEKRDKEFLKSTFLLVYHDCVLPLLHSTRLPPFRWAEEETETARWKVITDFLKQNQENQGALQALLSPDGVHEPFDLSEQTYDFLGEMRKNAV

SEQ ID NO: 5917 - DNA, 2202 bp, Artificial Sequence
  derived and/or modified sequence
atgcttgccagacgccagagagaccccctccaggcactcagaagacgaaaccaggagctgaagcagcaggtggatagcctgctgagcgagtcccaattgaaggaggctctagaaccaaataagagacagcatatttaccagcggtgcatccagctgaagcaagcaatagacgaaaataaaaatgcccttcagaaactgagtaaagcggacgaatcggcgcctgttgcaaactataaccaaagaaaggaggaagaacatacactgctggataaactcacccaacagctccagggccttgctgtgacaatatcaagggagaatatcactgaggttggagctcccacagaagaagaggaagaatcagagagtgaagattctgaggatagcgggggagaagaggaggatgctgaggaggaagaagaagagaaggaggaaaatgaaagtcataagtggtctaccggggaggagtacatagctgttggggacttcactgcccagcaggtgggtgacctgacttttaagaaaggggagatcctgctcgtgatagaaaaaaaaccggacgggtggtggatagctaaagacgctaaagggaatgaagggctggtgccaagaacttatctggagccctacagtgaggaagaagagggccaagaatccagtgaagagggctctgaggaggacgtcgaggctgtggacgagactgcagacggggcggaggtcaaacagcgcaccgatccacattggtctgctgtgcaaaaagcaatcagcgaagctggtatattttgtctggtgaaccacgtcagtttctgttatctgatcgtgctgatgcgcaacagaatggagaccgtggaagacaccaatggctctgaaaccgggttccgcgcttggaatgtccaaagccgcggaagaattttccttgtgtccaaacccgtactacaacagatcaacacagtcgatgtactgaccactatgggtgccattcctgcgggttttcgcccaagcactttgtcacagctgctggaagaggggaatcagtttcgggcgaattattttctgcagccagaactgatgccaagtcagctcgcctttcgggacctgatgtgggacgcaaccgaaggaaccattagatcccgcccctctcgtatctctctaattttaactttgtggagttgcaagatgattccactccccggaatgtccatccaggtcctgtcccgacacgttcgcctgtgcctttttgatggcaacaaagtcctctccaatattcacactgtgcgagccacatggcaaccgaagaagcccaaaacttggactttttctccccaggtgacccgtattctgccctgtctgttggacggcgattgctttatccggtccaattccgcaagccctgacctcgggatattattcgagctcggaatttcatatataaggaactcaaccggcgaacggggagagctgtcctgcggctgggtgttcttgaagctatttgacgcaagtggtgtgccaattcccgccaagacttatgagttattcttaaacgggggaaccccttacgaaaaagggattgaggtagatcccagcatctcaagaagggcgcacggcagcgtcttttatcagatcatgactatgcgcaggcaaccacagttactagtaaaactgagatccctcaacaggcggtccagaaatgtgctgtcacttcttccagagaccctcatcggaaacatgtgtagcatccacttacttatcttttacagacagatcctaggagacgtccttctgaaggacagaatgagcctccagagcactgacctgattagccatcccatgctcgcaaccttccccatgcttctggaacagccagacgtcatggacgccttgcggtcctcatgggccgggaaagagagcacgctgaagagatcagagaaacgggacaaggagttcttgaaaagcactttcctcttggtttatcacgactgtgtgctgcccctcctacactctacgagactgccaccattcaggtgggccgaggaagaaaccgaaactgcgcggtggaaagtcattacagatttcttgaagcaaaaccaggagaaccaaggcgccctccaggccctgctgtctcccgatggcgtccatgagccttttgacctcagtgagcagacgtacgatttcctaggcgagatgcggaagaacgccgtctag

SEQ ID NO: 5918 - DNA, 2202 bp, Artificial Sequence
  derived and/or modified sequence
atgctggcccggcggcagagggaccccctgcaggccctgcggcggaggaaccaggagctgaagcagcaggtggacagcctgctgtctgagagccagctgaaggaggccctggagcccaacaagaggcagcacatctaccagcgctgcatccagctgaagcaggccattgatgagaacaagaatgccctgcagaagctgagcaaggcagatgagagcgcccctgtggccaactacaaccagaggaaggaggaggagcacaccctgctggacaagctgacccagcagctgcagggcctggccgtgaccatcagccgggagaacatcacagaggtgggcgcccccacagaggaggaggaggagagcgagagcgaggacagtgaagattctggaggagaggaggaggatgctgaggaggaggaggaggagaaggaggagaatgaaagccacaagtggagcactggagaggagtacatcgctgtgggggacttcaccgcccagcaggtgggggacctgaccttcaagaagggggagatcctgctggtgattgagaagaagccagatggctggtggatcgccaaggatgccaagggaaatgaaggcctggtgcccaggacctacctggagccctacagcgaggaggaggagggccaggagagcagcgaggagggcagcgaggaggatgtggaggccgtggatgaaacagcagatggagctgaggtgaagcagaggacagacccccactggagcgctgtgcagaaggccatcagcgaggccggcatcttctgcctggtgaaccacgtgtccttctgctacctgattgtgctgatgaggaacaggatggagaccgtggaggacaccaatggaagtgaaacaggcttccgggcctggaatgtgcagagccggggccgcatcttcctggtgtccaagcctgtgctgcagcagatcaacacagtggatgtgctgaccaccatgggcgccatcccagctggcttccggcccagcaccctgagccagctgctggaggagggcaaccagttccgggccaactacttcctgcagcctgagctgatgcccagccagctggccttccgggacctgatgtgggatgccacagagggcaccatccgcagccggcccagccgcatcagcctcatcctgaccctgtggagctgcaagatgatccccctgcccggcatgagcatccaggtgctgagcagacatgtgcggctgtgcctgtttgatggcaacaaggtgctgagcaacatccacacagtgcgggccacctggcagcccaagaagcccaagacctggaccttcagcccccaggtgacccgcatcctgccctgcctgctggatggagactgcttcatccgcagcaacagcgccagcccagacctgggcatcctgtttgagctgggcatctcctacatccggaacagcactggagagcggggggagctgagctgtggctgggtgttcctgaagctgtttgatgccagcggcgtgcccatcccagccaagacctatgagctgttcctgaatggaggcaccccctatgaaaaaggaattgaggtggaccccagcatcagcagaagagcccacggcagcgtcttctaccagatcatgaccatgaggcggcagccccagctgctggtgaagctgcggagcctgaacagaagaagcagaaatgtgctgagcctgctgcctgagaccctgattggcaacatgtgcagcatccacctgctgatcttctaccggcagatcctgggagatgtgctgctgaaggacaggatgagcctgcagagcacagacctgatcagccaccccatgctggccaccttccccatgctgctggagcagccagatgtgatggatgccctgcggagctcctgggccggcaaggagagcaccctgaagaggtctgagaagagggacaaggagttcctgaagagcaccttcctgctggtgtaccatgactgtgtgctgcccctgctgcacagcacccggctgccccccttccgctgggccgaggaggagacagaaacagcccgctggaaggtgatcacagacttcctgaagcagaaccaggagaaccagggcgccctgcaggccctgctgagcccagatggagtgcatgagccctttgacctgtctgagcagacctatgacttcctgggggagatgaggaagaatgctgtgtag

SEQ ID NO: 5919 - DNA, 2202 bp, Artificial Sequence
  derived and/or modified sequence
atgctggcccggcggcagcgggaccccctgcaggccctgcggcggagaaaccaagagctgaagcagcaggtggactccctgctgagcgagtctcagctgaaagaagcactggagccgaataaaaggcagcacatctatcaaaggtgtatacagctgaaacaagctatcgacgagaacaagaatgccctgcagaagctgagtaaagccgacgaatccgcacccgtcgcaaactataatcagcggaaggaagaggagcacaccctcctagacaagcttacacagcagctccagggcctcgccgtgacgatctcccgagagaacatcaccgaagttggggcccccacagaggaggaagaggaatccgaatcagaagatagcgaggatagtggtggggaagaagaggacgctgaggaagaagaggaagaaaaggaggagaatgagtctcataagtggtcaactggtgaagagtatattgctgtgggtgacttcacagctcagcaggtgggggatctgaccttcaagaagggagaaatcctgctggttatcgaaaagaaacccgatggctggtggatcgccaaggatgccaaaggcaatgagggtctggtgccacgcacttatctcgagccgtatagcgaagaggaagaaggccaggaaagctccgaagagggcagtgaggaggacgtagaagcagtggatgaaaccgctgacggtgctgaagtaaagcaacgaacagacccacattggtccgccgtacaaaaggctatttctgaggccgggatattctgtctggtcaatcacgttagcttctgctatctaattgtgctgatgcggaataggatggaaactgttgaggatacaaacggtagtgaaactggattccgagcatggaacgtccagagcagaggcaggattttcctcgtatctaaacccgttttgcagcaaattaatactgttgatgttctgaccacaatgggagctattccggcaggcttccgccctagcaccctgtcccaactgctggaggagggaaatcagtttagggctaattattttctgcaacccgagttaatgccttcccagttggccttccgcgacctgatgtgggacgccaccgagggcacaattcgctcgcggccctcccggatatcccttattctgacgctctggtcatgtaagatgattcctctgccggggatgtcaattcaggtactgtcacggcatgtgcggctgtgcctttttgacggcaacaaagtgttgagcaatattcacacagtgagagctacctggcagccgaaaaaacctaagacctggaccttcagccctcaagtgacacgaattctgccctgcctgttggatggggactgctttatccggtctaactcggcaagtccagacctggggatcttgtttgagttggggatcagctacattaggaatagcaccggtgaaagaggcgaactctcatgcggatgggtgtttctcaaattattcgacgcctctggggttcccatccctgccaagacttacgaactcttcctcaatggggggacaccctatgaaaagggcatcgaagtggatccttccattagcaggcgggctcacggcagtgtcttctaccagattatgaccatgcgtaggcagccacagcttttagtgaaattacggtctctgaacagacggtctcgcaacgttctgtctttacttccggaaacattgattggaaacatgtgctcgattcatctgctgattttctatcggcagatcctgggtgatgtgctgctgaaggacagaatgtccttgcagtcgaccgacctgatttcgcaccccatgttagcaacctttcctatgctgctggagcagccggatgtgatggacgccctgcgatcctcatgggctggcaaagagtctactctgaagcggagtgaaaaacgggacaaggagtttctcaaatcgacattcctcctggtgtaccacgattgcgtcctcccgctgctacattctaccagactgcctccctttagatgggctgaggaagagactgagacagcgcgatggaaggtcatcaccgattttctcaaacagaaccaggagaatcagggagctcttcaggcactgctgagcccagacggggtacacgaacctttcgatctctccgagcagacatatgattttctgggagaaatgcggaaaaatgccgtctag

SEQ ID NO: 5920 - DNA, 3756 bp, Artificial Sequence
  derived and/or modified sequence
gatggcgtcaccttctggcgccgccggttggtttccctggcaactggagcaatcagagcaccgcagccagggagatgctggcgagacgacagcgagatcctctccaggccctgcggcgccgcaatcaggagctgaagcaacaggttgatagtttgctttctgagagccaactgaaagaagctctagaacccaataaaagacaacatatttatcaaagatgtatccagttaaagcaggcaatagatgaaaataaaaatgctcttcaaaaattaagcaaagctgatgaatctgcacctgttgcaaactataatcagagaaaagaagaggagcatactcttttggacaagcttacccaacaactgcagggccttgctgtgacaataagcagagaaaatataactgaagttggggcacctactgaagaagaggaagaaagtgaaagtgaagatagtgaagacagtggtggggaggaagaagatgcagaggaggaagaggaagagaaagaggaaaatgaatctcacaaatggtcaaccggtgaagaatacatcgctgttggagattttactgctcagcaagttggagatcttacatttaagaaaggggaaattctccttgtaattgaaaaaaaacctgatggttggtggatagctaaggatgccaaaggaaatgaaggtcttgttcccagaacctacctagagccttatagtgaagaagaagaaggccaagagtcaagtgaagagggcagtgaagaagatgtagaggcggtggatgaaacagcagatggagcagaagttaagcaaagaactgatccccactggagtgctgttcagaaagcgatttcagaggcgggcatcttctgtcttgttaatcatgtctcgttttgctacctaatagttctgatgcgaaataggatggagactgtggaagacaccaatggatctgaaacagggttcagggcatggaatgtacagagcagaggacgtatatttctggtttctaagcctgtgctccaacagataaacactgttgatgtgttaactacgatgggagctattcctgcagggttcaggccttccacgctctcacagcttctggaggaagggaatcaatttcgagcaaattacttcttacaaccagagctcatgccttcacaactggccttcagagatctgatgtgggatgctacagaaggcactattaggtcgagaccaagtcgtatttcattgattctgacattatggagctgtaaaatgattcctcttccaggaatgagcatacaggttctcagcagacatgtacgcctctgtctatttgatggtaataaggttctgagcaacattcatacagtcagagccacatggcaacctaaaaagcccaaaacatggaccttttctccccaggttactcgcatcttaccatgtttgcttgatggtgattgctttatcaggtctaattctgcatctccagatcttggaatattatttgaacttggaatttcttatattcgcaattcaactggtgaaagaggagagttaagctgtggctgggtgtttcttaaactttttgatgccagtggagttcctattccagcaaaaacttatgagcttttcttgaatggtggtactccttatgaaaaaggtattgaagtggacccttcaatatccagaagagcacacggcagtgttttctaccagattatgacaatgagaaggcagcctcaacttctagtgaaactgagatccttgaacagaagatcaagaaatgtactaagtctactgccagaaacattaattggaaatatgtgttctattcacttgttgatattttatcgacaaattcttggagatgtgctcctgaaagacaggatgagcttgcaaagtactgatttaattagccatcccatgctggccaccttccccatgctcttggagcagcctgatgtgatggatgctctcaggagttcgtgggctggaaaagaaagcacattaaaaagatcagagaagagagacaaagagttcctgaagtccacgtttctcctggtttaccatgactgcgtgctcccacttctccactccacacgcctacccccattcaggtgggcagaagaagagactgagactgcacggtggaaagttatcactgacttccttaagcaaaaccaagaaaaccagggcgccctccaagctctgctgtcaccagacggagttcatgaaccttttgacctttcagagcagacctatgacttcttgggtgaaatgagaaagaatgcagtgtgacagtggcagcctctagccctcagcttcccacggaatcagatggatcctccacgattacgtgaataaaatgatggaaccaaaaatcactgtcactttacaacttaggttttactcttttctttctacagaccatatttttaaagaaatgtttatacaataatttaaatattttttaaaaccataaaataaatttttataaggaatactgttatatctaaatttaaacagtatttattttttcaaaaacagctacttaagttaatggtatagatttctataaaagcaagattttgtcaaaaactaaatttatgattattcaagaaagtgaaaaaaacaacctacagaatgggaaaacatatttgcaaatcatctaactgataaaggtctagtatccaaaatatttaaatttatgagtgttaataaaatttatcttgttcaatgaagaggaagttaaagtgatccatttgagaaagttgtatcacttaattcagtctgatacttgaatgtgatttacccctaattaagtacaaaaacagagtcgcttttgccttttcaaatcaagaaaataagtgctctgtcaaaagcacaaaaagaaactttcaggcactggagagtggagtcgactcaccctttcaggccttgttgcatctcagataaacctgtgactgctggtaaaataatgtcccaagcctttccttttagtgataaacagtagcagcctgcgttaattgagcacctactgtgtgtctgagcatttctcattagcccagttaatcctcacacctactgtaggagataggtactgttgttttttattaccgccgaagaaacaggccagataagtgaagtaatttgcctaaggtcacagctaataagtggcacagctaatattcccagtaaagataccatgtataattttctacaacctaagatgttctgccttatcggggcgaaccttttaggattccatgtgaaaataaaatatgaggaaaagtttaacctaaataattagaatcccattagaggtacttttttttgatggcatgctgccttaaaagagccatttatttttagagatctgtcatattatgaaagttctgggctatcttagctaacttatcctaaacccttaacctaaatttaacttgagccccagtctcagaaattaacatggtatgaaggtgtttccaggccaggcgcggtggctcacgcctgtaatcccaacactttgggaggccgaggtgggtggatcacctgaggtcaggagtttgagaccagcctggccaacactatctgtactaaaaacacaaaattagctgggcgtggtagtgcgtgcctgtaatcccagctacttgggaggctgaggtagaagaattgtttgaacctgggaggtggaggttgcagtgagccaagatcgtgccattgcactccagcctaggcaacaagagtgaaactccatctcaaaaaaaaaaaaaaaaaa

SEQ ID NO: 5921 - DNA, 2202 bp, Artificial Sequence
  derived and/or modified sequence
atgcttgccaggcgtcaaagggaccccttacaggcgctgcgcaggcgcaatcaggaactgaagcagcaggtcgactctctcctcagtgagtcacagttaaaagaggcacttgagcctaacaagagacagcacatatatcagagatgcatccagctcaaacaggctatcgacgaaaataaaaacgcactgcaaaagcttagcaaggcagatgagagtgcccctgtggctaactacaaccagaggaaggaagaggagcacacactgctcgataagctcacacaacagctccagggtcttgccgtgactatatcaagggagaatatcaccgaggtgggagcacccactgaggaggaggaagaatccgaatctgaggatagtgaggactcgggaggcgaagaagaggacgctgaggaggaggaagaggagaaggaggaaaatgagagccacaagtggtccactggggaggagtacatagcagttggcgattttaccgcccaacaggttggggatctgactttcaaaaagggagaaattctgctagtgattgagaagaagccggatgggtggtggattgccaaagacgcaaagggtaacgaaggactcgtgcctcggacttacttggagccttattccgaggaagaagagggtcaagaatcaagcgaggagggtagcgaggaggacgtcgaggccgtggacgaaaccgctgatggagccgaggttaaacagagaactgatccacattggagcgcggtgcagaaagcgatatccgaggctggaatcttttgcctggtgaatcatgtctctttctgttacctcatcgtcctgatgcgtaaccggatggagacggtcgaggatactaacggatctgagactggtttcagagcctggaacgtgcaaagtaggggaaggatttttctggtgtcgaaaccagtactgcagcagatcaacactgtggacgtcctcacgacaatgggggctatacctgctggttttcgaccttccacactgtcccagcttttagaggaaggtaaccagttcagggcaaattatttcctgcagcctgaactcatgcccagccagctggcctttcgagacttaatgtgggacgctaccgaagggacaataagatcccggccaagccgcatctctctgatattaactctttggtcttgtaaaatgatccctttgccgggaatgtctatacaagtgctctcacgacacgtcagactgtgtctgtttgatggcaacaaggtactgtctaacattcacaccgtcagggccacatggcagcctaagaaacccaaaacttggaccttttccccacaagtgactagaattctcccctgcctgttggacggggactgctttatcagatctaatagtgccagcccagatcttggaatcctatttgagctggggatcagttacattagaaacagcactggagagcggggtgaactgtcttgcgggtgggtttttctcaaactgttcgacgcctccggtgtcccaattccagccaaaacctacgagttatttttgaacggtggcactccttatgaaaaaggcatcgaagtcgatccgagcattagccgcagagcccatgggtctgtgttttatcagattatgactatgcgcagacagcctcaactccttgtgaagctgaggtcactcaataggagaagccgcaacgtcctgtccctgcttcccgagacacttatagggaacatgtgtagtattcacctgctcatcttctaccgccaaattttgggagatgttctgctcaaggaccgcatgtctctccaaagcacagacctgatctcccaccccatgctggccacgtttcctatgttactagaacagccagacgtgatggatgccctcagatcttcctgggcgggaaaagaaagcaccctgaagagatcggaaaagagagataaagaattcttgaagtcaactttcctgctcgtctatcacgactgcgtcctgccccttctccactccacacgcctgccacccttccgatgggcggaggaagagaccgagacagcgagatggaaggtcatcactgatttcctgaagcagaaccaagagaaccagggcgcactgcaggcccttttatctcccgatggcgtccatgaaccttttgatttaagcgaacagacgtacgactttctcggggagatgcgcaaaaacgctgtttag

SEQ ID NO: 5922 - DNA, 2202 bp, Artificial Sequence
  derived and/or modified sequence
atgctggccagaagacagagagaccccctgcaggccctgagaagaagaaaccaggagctgaagcagcaggtggacagcctgctgagcgagagccagctgaaggaggccctggagcccaacaagagacagcacatctaccagagatgcatccagctgaagcaggccatcgacgagaacaagaacgccctgcagaagctgagcaaggccgacgagagcgcccccgtggccaactacaaccagagaaaggaggaggagcacaccctgctggacaagctgacccagcagctgcagggcctggccgtgaccatcagcagagagaacatcaccgaggtgggcgcccccaccgaggaggaggaggagagcgagagcgaggacagcgaggacagcggcggcgaggaggaggacgccgaggaggaggaggaggagaaggaggagaacgagagccacaagtggagcaccggcgaggagtacatcgccgtgggcgacttcaccgcccagcaggtgggcgacctgaccttcaagaagggcgagatcctgctggtgatcgagaagaagcccgacggctggtggatcgccaaggacgccaagggcaacgagggcctggtgcccagaacctacctggagccctacagcgaggaggaggagggccaggagagcagcgaggagggcagcgaggaggacgtggaggccgtggacgagaccgccgacggcgccgaggtgaagcagagaaccgacccccactggagcgccgtgcagaaggccatcagcgaggccggcatcttctgcctggtgaaccacgtgagcttctgctacctgatcgtgctgatgagaaacagaatggagaccgtggaggacaccaacggcagcgagaccggcttcagagcctggaacgtgcagagcagaggcagaatcttcctggtgagcaagcccgtgctgcagcagatcaacaccgtggacgtgctgaccaccatgggcgccatccccgccggcttcagacccagcaccctgagccagctgctggaggagggcaaccagttcagagccaactacttcctgcagcccgagctgatgcccagccagctggccttcagagacctgatgtgggacgccaccgagggcaccatcagaagcagacccagcagaatcagcctgatcctgaccctgtggagctgcaagatgatccccctgcccggcatgagcatccaggtgctgagcagacacgtgagactgtgcctgttcgacggcaacaaggtgctgagcaacatccacaccgtgagagccacctggcagcccaagaagcccaagacctggaccttcagcccccaggtgaccagaatcctgccctgcctgctggacggcgactgcttcatcagaagcaacagcgccagccccgacctgggcatcctgttcgagctgggcatcagctacatcagaaacagcaccggcgagagaggcgagctgagctgcggctgggtgttcctgaagctgttcgacgccagcggcgtgcccatccccgccaagacctacgagctgttcctgaacggcggcaccccctacgagaagggcatcgaggtggaccccagcatcagcagaagagcccacggcagcgtgttctaccagatcatgaccatgagaagacagccccagctgctggtgaagctgagaagcctgaacagaagaagcagaaacgtgctgagcctgctgcccgagaccctgatcggcaacatgtgcagcatccacctgctgatcttctacagacagatcctgggcgacgtgctgctgaaggacagaatgagcctgcagagcaccgacctgatcagccaccccatgctggccaccttccccatgctgctggagcagcccgacgtgatggacgccctgagaagcagctgggccggcaaggagagcaccctgaagagaagcgagaagagagacaaggagttcctgaagagcaccttcctgctggtgtaccacgactgcgtgctgcccctgctgcacagcaccagactgccccccttcagatgggccgaggaggagaccgagaccgccagatggaaggtgatcaccgacttcctgaagcagaaccaggagaaccagggcgccctgcaggccctgctgagccccgacggcgtgcacgagcccttcgacctgagcgagcagacctacgacttcctgggcgagatgagaaagaacgccgtgtag

SEQ ID NO: 5923 - protein, 404 aa, Artificial Sequence
  derived and/or modified sequence
MASPRLGTFCCPTRDAATQLVLSFQPRAFHALCLGSGGLRLALGLLQLLPGRRPAGPGSPATSPPASVRILRAAAACDLLGCLGMVIRSTVWLGFPNFVDSVSDMNHTEIWPAAFCVGSAMWIQLLYSACFWWLFCYAVDAYLVIRRSAGLSTILLYHIMAWGLATLLCVEGAAMLYYPSVSRCERGLDHAIPHYVTMYLPLLLVLVANPILFQKTVTAVASLLKGRQGIYTENERRMGAVIKIRFFKIMLVLIICWLSNIINESLLFYLEMQTDINGGSLKPVRTAAKTTWFIMGILNPAQGFLLSLAFYGWTGCSLGFQSPRKEIQWESLTTSAAEGAHPSPLMPHENPASGKVSQVGGQTSDEALSMLSEGSDASTIEIHTASESCNKNEGDPALPTHGDL

SEQ ID NO: 5924 - protein, 424 aa, Artificial Sequence
  derived and/or modified sequence
MTQAGRRGPGTPEPRPRTQPMASPRLGTFCCPTRDAATQLVLSFQPRAFHALCLGSGGLRLALGLLQLLPGRRPAGPGSPATSPPASVRILRAAAACDLLGCLGMVIRSTVWLGFPNFVDSVSDMNHTEIWPAAFCVGSAMWIQLLYSACFWWLFCYAVDAYLVIRRSAGLSTILLYHIMAWGLATLLCVEGAAMLYYPSVSRCERGLDHAIPHYVTMYLPLLLVLVANPILFQKTVTAVASLLKGRQGIYTENERRMGAVIKIRFFKIMLVLIICWLSNIINESLLFYLEMQTDINGGSLKPVRTAAKTTWFIMGILNPAQGFLLSLAFYGWTGCSLGFQSPRKEIQWESLTTSAAEGAHPSPLMPHENPASGKVSQVGGQTSDEALSMLSEGSDASTIEIHTASESCNKNEGDPALPTHGDL

SEQ ID NO: 5925 - protein, 171 aa, Artificial Sequence
  derived and/or modified sequence
MVIRSTVWLGFPNFVDSVSDMNHTEIWPAAFCVGSAMWIQLLYSACFWWLFCYAVDAYLVIRRSAGLSTILLYHIMAWGLATLLCVEGAAMLYYPSVSRCERGLDHAIPHYVTMYLPLLLVLVANPILFQKTVTAVASLLKGRQGIYTENERRMGAVIKIRFFKIMLVLII

SEQ ID NO: 5926 - protein, 287 aa, Artificial Sequence
  derived and/or modified sequence
  misc_feature (1)..(1): Xaa can be any naturally occurring amino acid
XTAGPVTGSASRGPARGPKGMVIRSTVWLGFPNFVDSVSDMNHTEIWPAAFCVGSAMWIQLLYSACFWWLFCYAVDAYLVIRRSAGLSTILLYHIMAWGLATLLCVEGAAMLYYPSVSRCERGLDHAIPHYVTMYLPLLLVLVANPILFQKTVTAVASLLKGRQGIYTENERRMGAVIKIRFFKIMLVLIICWLSNIINESLLFYLEMQTDINGGSLKPVRTAAKTTWFIMGILNPAQGFLLSLAFYGWTGCSLGFQSPRKEIQWESLTTSAAEGAHPSPLMPHENP

SEQ ID NO: 5927 - DNA, 1695 bp, Artificial Sequence
  derived and/or modified sequence
caccgagcctggctctactgcaggcgctgggggttggggtgggggagaggcccagggcacatgatgccgcccccagcccgcccagcacatgacccaggcaggccggcggggtcctggcacacccgagccgcgtccgcgaacacagcccatggcctccccgcgcctagggaccttctgctgccccacgcgggacgcagccacgcagctcgtgctgagcttccagccgcgggccttccacgcgctctgcctgggcagcggcgggctccgcttggcgctgggccttctgcagctgctgcccggccgccggcccgcgggccccgggtcccccgcgacgtccccgccggcctcggtccgcatcctgcgcgctgccgctgcctgcgaccttctcggctgcctgggtatggtgatccggtccaccgtgtggttaggattcccaaattttgttgacagcgtctcggatatgaaccacacggaaatttggcctgctgctttctgcgtggggagtgcgatgtggatccagctgttgtacagtgcctgcttctggtggctgttttgctatgcagtggatgcttatctggtgatccggagatcggcaggactgagcaccatcctgctgtatcacatcatggcgtggggcctggccaccctgctctgtgtggagggagccgccatgctctactacccttccgtgtccaggtgtgagcggggcctggaccacgccatcccccactatgtcaccatgtacctgcccctgctgctggttctcgtggcgaaccccatcctgttccaaaagacagtgactgcagtggcctctttacttaaaggaagacaaggcatttacacggagaacgagaggaggatgggagccgtgatcaagatccgatttttcaaaatcatgctggttttaattatttgttggttgtcgaatatcatcaatgaaagccttttattctatcttgagatgcaaacagatatcaatggaggttctttgaaacctgtcagaactgcagccaagaccacatggtttattatgggaatcctgaatccagcccagggatttctcttgtctttggccttctacggctggacaggatgcagcctgggttttcagtctcccaggaaggagatccagtgggaatcactgaccacctcggctgctgagggggctcacccatccccactgatgccccatgaaaaccctgcttccgggaaggtgtctcaagtgggtgggcagacttctgacgaagccctgagcatgctgtctgaaggttctgatgccagcacaattgaaattcacactgcaagtgaatcctgcaacaaaaatgagggtgaccctgctctcccaacccatggagacctatgaaggggatgtgctgggggtccagaccccatattcctcagactcaacaattcttgttctttagaactgtgttctcaccttcccaacactgcactgccgaagtgtagcggcccccaaaccttgctctcatcaccagctagagcttcttcccgaagggcctttaggataggagaaagggttcatgcacacacgtgtgagaatggaagagccccctccagaccactctacagctgctctagccttagttgccactaggaagttttctgaggctggctgtaaagtaagtgtaaggtccacatccttggggaagtagttaaataaaatagttatgactg

SEQ ID NO: 5928 - DNA, 1762 bp, Artificial Sequence
  derived and/or modified sequence
accgagcctggctctactgcaggcgctgggggttggggtgggggagaggcccagggcacatgatgccgcccccagcccgcccagcacatgacccaggcaggccggcggggtcctggcacacccgagccgcgtccgcgaacacagcccatggcctccccgcgcctagggaccttctgctgccccacgcgggacgcagccacgcagctcgtgctgagcttccagccgcgggccttccacgcgctctgcctgggcagcggcgggctccgcttggcgctgggccttctgcagctgctgcccggccgccggcccgcgggccccgggtcccccgcgacgtccccgccggcctcggtccgcatcctgcgcgctgccgctgcctgcgaccttctcggctgcctgggtatggtgatccggtccaccgtgtggttaggattcccaaattttgttgacagcgtctcggatatgaaccacacggaaatttggcctgctgctttctgcgtggggagtgcgatgtggatccagctgttgtacagtgcctgcttctggtggctgttttgctatgcagtggatgcttatctggtgatccggagatcggcaggactgagcaccatcctgctgtatcacatcatggcgtggggcctggccaccctgctctgtgtggagggagccgccatgctctactacccttccgtgtccaggtgtgagcggggcctggaccacgccatcccccactatgtcaccatgtacctgcccctgctgctggttctcgtggcgaaccccatcctgttccaaaagacagtgactgcagtggcctctttacttaaaggaagacaaggcatttacacggagaacgagaggaggatgggagccgtgatcaagatccgatttttcaaaatcatgctggttttaattatttgttggttgtcgaatatcatcaatgaaagccttttattctatcttgagatgcaaacagatatcaatggaggttctttgaaacctgtcagaactgcagccaagaccacatggtttattatgggaatcctgaatccagcccagggatttctcttgtctttggccttctacggctggacaggatgcagcctgggttttcagtctcccaggaaggagatccagtgggaatcactgaccacctcggctgctgagggggctcacccatccccactgatgccccatgaaaaccctgcttccgggaaggtgtctcaagtgggtgggcagacttctgacgaagccctgagcatgctgtctgaaggttctgatgccagcacaattgaaattcacactgcaagtgaatcctgcaacaaaaatgagggtgaccctgctctcccaacccatggagacctatgaaggggatgtgctgggggtccagaccccatattcctcagactcaacaattcttgttctttagaactgtgttctcaccttcccaacactgcactgccgaagtgtagcggcccccaaaccttgctctcatcaccagctagagcttcttcccgaagggcctttaggataggagaaagggttcatgcacacacgtgtgagaatggaagagccccctccagaccactctacagctgctctagccttagttgccactaggaagttttctgaggctggctgtaaagtaagtgtaaggtccacatccttggggaagtagttaaataaaatagttatgactgagctctcagcctgacttggattctgtcttaacacttctagcaaaagaaaataaatacatgtacagtta

SEQ ID NO: 5929 - DNA, 1275 bp, Artificial Sequence
  derived and/or modified sequence
atgacacaggctggtaggcgaggtcccggaactccagagcccaggccccgaacacagcccatggcatctcctcgcctgggcacattctgctgtccaacccgagacgccgccacccaactggttctgtcgtttcagccccgtgcgtttcacgccctctgcctcggttctggaggactacggcttgctctcggacttctgcaacttctgcctggtagacgccctgccgggcccgggagccctgctacaagtcccccagcgtctgtccgcatcctccgcgccgccgccgcatgcgatctgctcggatgcctgggcatggtaattcgaagcactgtgtggttagggtttcctaattttgttgacagtgtctctgatatgaaccacacagagatctggcccgcagccttctgcgtgggcagcgccatgtggatacagctcctgtacagcgcctgtttctggtggctgttttgttatgccgttgatgcctacctggtaatcagaaggagtgcagggctgtctacaatcttgctttaccacattatggcctggggattagccacactcctgtgcgtggaaggggctgccatgctgtattaccctagcgtgtcaaggtgtgagcgggggttggatcacgccattcctcactacgtcacaatgtatctgcccctcttgctcgttttggtggctaatcccatcctattccagaaaacagtgactgcggtggcaagcctactcaaaggacgacagggaatttacacagagaatgaacggcggatgggagcagtgatcaagatacgcttcttcaaaatcatgttagtgctcattatctgttggcttagcaacatcattaacgaatctctgctgttctatttagagatgcagacagacataaacggaggatcactgaaacccgtgcggacagccgccaagaccacctggttcatcatgggtatactgaacccagctcagggttttttgctatccctcgctttttatggctggacaggttgctctttggggtttcaatctccgcgaaaagaaatccagtgggagagcctaaccaccagcgccgctgagggcgctcacccatctcctctcatgcctcacgaaaatccggcaagcggaaaggtgagccaggttggtgggcagacaagtgatgaagcgctcagtatgctgagcgaggggtcagacgcgagcacaatagagattcacacagcgtccgaatcctgtaataaaaatgaaggagacccggcactcccgacacacggggacctgtag

SEQ ID NO: 5930 - DNA, 1215 bp, Artificial Sequence
  derived and/or modified sequence
atggcgtccccacgtctgggaaccttctgctgtccaactcgtgacgctgcaactcagcttgtcttaagcttccaaccgagggcgttccacgccctctgcctcggttctggggggttgagactggccctagggcttctgcagctcctcccggggcgtcgccctgcaggccctggatctcccgctaccagccctccagcgagcgtgcggattctgagggccgctgcagcatgcgacctgctcggatgcctggggatggtaattcgctccacagtgtggttgggtttccctaacttcgttgactcagtcagtgatatgaatcataccgaaatctggccagcggcgttctgtgtggggtccgccatgtggatccagctgctctattccgcctgcttctggtggttgttttgttacgccgtggacgcgtatctggtaattcggaggagtgccgggctgtctaccatccttctatatcacatcatggcctgggggctggccaccttgttgtgtgtggaaggcgcagcaatgttgtactacccatcagtttctaggtgcgaacgaggcctggaccatgcgatccctcactacgttacaatgtacctgccactcctgttggtgctggtggcaaacccaatactatttcagaagactgtgacagccgtcgcttctcttctcaaagggcgccaaggcatttataccgagaacgaacgccggatgggagcagtgataaaaattagattcttcaagattatgctagtcctgatcatctgctggctctcaaatatcattaacgagtcacttctgttctacctggaaatgcaaaccgacataaacggcggatcgcttaaacctgtaagaactgcggcaaaaaccacatggttcatcatgggcattttgaatccagcacaggggtttctgctgtcactggctttttacggctggaccggatgttctctaggattccagtcaccgaggaaggagatacagtgggagtcactgactacatctgctgccgagggcgcccatccaagcccgctgatgccccatgaaaatccagccagtggaaaagtctctcaggtcggcggccagacatccgatgaagctctcagcatgttgagtgaaggaagcgatgcaagcactatcgagatccataccgcatccgagtcttgtaacaaaaatgagggagaccctgccctaccaactcatggggatctgtag

SEQ ID NO: 5931 - DNA, 1275 bp, Artificial Sequence
  derived and/or modified sequence
atgacccaggccggccggcggggccctggcaccccagagccccggcccaggacccagcccatggccagcccccggctgggcaccttctgctgccccaccagagatgctgccacccagctggtgctgtccttccagccccgggccttccacgccctgtgcctgggcagcggcggcctgcggctggccctgggcctgctgcagctgctgcccggccggcggcctgctggccctggcagccctgccaccagccccccagcctctgtgcgcatcctgcgggctgctgctgcctgtgacctgctgggctgcctgggcatggtgatccgcagcacagtgtggctgggcttccccaactttgtggacagcgtgtctgacatgaaccacacagagatctggccagctgccttctgtgtgggcagcgccatgtggatccagctgctgtacagcgcctgcttctggtggctgttctgctatgctgtggatgcctacctggtgatccgccgctctgctggcctgagcaccatcctgctgtaccacatcatggcctggggcctggccaccctgctgtgtgtggagggcgccgccatgctgtactaccccagcgtgagccgctgtgagcggggcctggaccacgccatcccccactacgtgaccatgtacctgcccctgctgctggtgctggtggccaaccccatcctcttccagaagacagtgacagctgtggccagcctgctgaagggccggcagggcatctacacagaaaatgaaagaaggatgggcgccgtcatcaagatccgcttcttcaagatcatgctggtgctgatcatctgctggctgagcaacatcatcaatgaaagcctgctcttctacctggagatgcagacagacatcaatggaggcagcctgaagcctgtgaggacagctgccaagaccacctggttcatcatgggcatcctgaacccagcccagggcttcctgctgagcctggccttctacggctggacaggctgcagcctgggcttccagagccccaggaaggagatccagtgggagagcctgaccaccagcgctgctgagggcgcccaccccagccccctgatgcctcatgaaaatcctgccagcggcaaggtgtcccaggtgggcggccagaccagtgatgaggccctgtccatgctgtctgagggcagtgatgccagcaccatcgagatccacacagccagcgagagctgcaacaagaatgaaggagaccctgccctgcccacccatggagacctgtag

SEQ ID NO: 5932 - DNA, 1215 bp, Artificial Sequence
  derived and/or modified sequence
atggccagcccccggctgggcaccttctgctgccccaccagagatgctgccacccagctggtgctgtccttccagccccgggccttccacgccctgtgcctgggcagcggcggcctgcggctggccctgggcctgctgcagctgctgcccggccggcggcctgctggccctggcagccctgccaccagccccccagcctctgtgcgcatcctgcgggctgctgctgcctgtgacctgctgggctgcctgggcatggtgatccgcagcacagtgtggctgggcttccccaactttgtggacagcgtgtctgacatgaaccacacagagatctggccagctgccttctgtgtgggcagcgccatgtggatccagctgctgtacagcgcctgcttctggtggctgttctgctatgctgtggatgcctacctggtgatccgccgctctgctggcctgagcaccatcctgctgtaccacatcatggcctggggcctggccaccctgctgtgtgtggagggcgccgccatgctgtactaccccagcgtgagccgctgtgagcggggcctggaccacgccatcccccactacgtgaccatgtacctgcccctgctgctggtgctggtggccaaccccatcctcttccagaagacagtgacagctgtggccagcctgctgaagggccggcagggcatctacacagaaaatgaaagaaggatgggcgccgtcatcaagatccgcttcttcaagatcatgctggtgctgatcatctgctggctgagcaacatcatcaatgaaagcctgctcttctacctggagatgcagacagacatcaatggaggcagcctgaagcctgtgaggacagctgccaagaccacctggttcatcatgggcatcctgaacccagcccagggcttcctgctgagcctggccttctacggctggacaggctgcagcctgggcttccagagccccaggaaggagatccagtgggagagcctgaccaccagcgctgctgagggcgcccaccccagccccctgatgcctcatgaaaatcctgccagcggcaaggtgtcccaggtgggcggccagaccagtgatgaggccctgtccatgctgtctgagggcagtgatgccagcaccatcgagatccacacagccagcgagagctgcaacaagaatgaaggagaccctgccctgcccacccatggagacctgtag

SEQ ID NO: 5933 - DNA, 1275 bp, Artificial Sequence
  derived and/or modified sequence
atgacccaggccggccggcggggccccggcacccccgagccccggcccaggacccaacccatggcatctcctcgactggggacattttgttgccctaccagagacgctgccacgcaattggttctgtccttccagccccgagcctttcacgccctatgcctcggcagcggtggcctgaggctcgctttggggctgttacagcttctccccggacgtcgaccagcagggcctgggtcgcccgccaccagcccccctgcctcagtgcggatcttgcgcgccgccgccgcttgcgacttgctagggtgtctgggcatggtaatccggtctacagtgtggcttggctttccgaattttgttgactccgtgagtgatatgaaccacactgaaatctggcctgccgccttctgtgtgggtagtgcaatgtggatccagctcttgtacagcgcctgcttctggtggctgttctgttacgcagtggatgcttatcttgtcataaggaggagcgctggcctttcgaccattcttctctaccacatcatggcctggggcctcgccaccctgttatgtgttgagggcgcagcaatgttatactacccatcagtttcacgctgtgaaagaggtctggaccacgccattccccactatgtcacgatgtatttgccactactcttagtgctggtcgcgaaccccatactctttcagaaaacggtgaccgcagtcgctagcctacttaaaggccgccaaggcatatacactgagaatgagagacgaatgggggccgtcatcaagattagattcttcaaaataatgctcgtgctaattatctgttggttatccaatattatcaacgagtcactgctattttacttagagatgcaaactgatatcaatggcggctccctgaagcctgtcaggactgcggcgaaaaccacatggtttattatgggcattctaaaccccgcccaaggttttttgttgagcttagccttctatggctggactggatgtagcctaggttttcagtcaccacggaaggagatccagtgggaaagccttacaaccagcgcagcagagggcgctcaccctagcccactgatgccgcacgagaatcctgcctctggcaaagttagccaggtcggaggtcaaacttccgatgaggcactgagcatgctatctgagggctctgatgcctctaccatcgaaatacacaccgcctcggagtcatgtaacaagaatgagggcgacccagccctccctactcacggcgatctgtag

SEQ ID NO: 5934 - DNA, 1215 bp, Artificial Sequence
  derived and/or modified sequence
atggccagcccccggctgggcaccttctgctgccccacccgggacgcagccacccagctggtgctctctttccagcctcgcgcctttcacgcgttgtgtttgggttcggggggcttaaggctcgccctgggtctcttacagctgttaccaggtcgccgtcctgccggcccaggatcaccggcgacaagtcctcctgcctcagtacgcatcctgcgcgcggccgccgcttgtgacctgctcggttgcctgggaatggtaataaggtccacggtctggctgggttttccaaactttgtggacagtgtgtcagatatgaaccacactgaaatttggcctgccgccttctgtgtaggcagcgcgatgtggatacagttgctctacagcgcttgtttctggtggctgttctgttacgccgtcgatgcgtatcttgtgatccgtaggagcgctggtctgagcaccattttgttataccatatcatggcatggggcctggcaaccttactgtgtgtggagggtgccgccatgttatattacccttcagtgtctcgttgcgaaagaggactggaccacgcaattcctcattatgtaacaatgtacctgcccctcctcctggtgctggtggctaaccccatcctgtttcaaaaaaccgtaaccgccgtcgcgagcctgttaaaagggcggcaaggcatctatacagagaacgagaggcgcatgggagccgttattaagatccgattttttaaaattatgttagttctgattatctgctggctatccaatattattaatgaatctctgctgttttacttagaaatgcagactgatattaatggaggaagtttgaagcctgtgcgaacagccgccaaaactacttggtttataatgggcatcctgaacccagcgcaagggttcctgttaagtctggccttctacgggtggacagggtgctcactcggcttccaatctcccaggaaagaaatccaatgggagagtctaaccactagcgcagcggaaggcgcccaccccagccccctgatgccacacgagaaccccgcttcagggaaggtctcccaggttggcggacagaccagcgacgaagccttgagcatgctgagtgaagggagtgacgctagcacaatagagatccacacggcctccgaaagctgcaataaaaatgagggggatccagccctccctacgcacggagatctgtag

SEQ ID NO: 5935 - DNA, 1275 bp, Artificial Sequence
  derived and/or modified sequence
atgacccaggcagggcgaaggggtcctggaactccggagcccaggcctcggacccaaccaatggcaagcccaaggctgggaaccttttgttgccctactcgcgatgccgcaacacagttggtcctctcgttccagccccgagcttttcatgcgctgtgcctgggatccggcggattacgcctggctctggggcttttacagcttcttcctggccgaaggcccgctggtccaggatctcccgcaactagtcccccagcatctgtgagaattttgagggctgctgcagcctgcgacctgcttggctgcctcggcatggtaataagatcgaccgtttggctcggctttcccaactttgtggattccgttagtgatatgaaccacactgagatctggccggctgccttttgtgtgggctcagctatgtggatccagcttctgtactcagcttgtttttggtggctgttctgctatgctgtggacgcatatctggtgataagaaggagtgctggtctctctactatactactgtaccacatcatggcctggggccttgccacactactatgtgtggaaggagcggctatgttgtactatccaagtgttagtcgatgtgaacgaggtcttgaccatgccatccctcactatgtgactatgtatcttcccctgctcctggttcttgtcgcaaaccccattttgttccagaagacagtgacagccgtggcctccctcctgaaaggccgtcaggggatctacacagaaaatgaacgaagaatgggcgcagtaatcaagatacgattctttaaaatcatgctcgtgctaatcatttgctggctctctaacatcattaatgaatcactgctgttctacttagagatgcagacagacatcaatggcggtagcctgaagcctgtgagaaccgctgctaagactacctggttcatcatggggattctaaatccagctcaagggtttctgctgtctctggcattttatgggtggaccggatgtagtctaggatttcagtccccgaggaaggaaattcagtgggagagcctgacgacaagcgctgccgagggcgctcaccccagccccttgatgcctcacgagaatccagcatccggtaaagtgtcacaggtcggcggtcagacaagtgatgaggcactgtcaatgttgagtgaaggttccgatgccagtacaattgagatacatacagctagcgagagctgtaacaagaacgagggggaccccgctctgccaacgcatggcgatctgtag

SEQ ID NO: 5936 - DNA, 1215 bp, Artificial Sequence
  derived and/or modified sequence
atggcatctccacggctcggaacattctgctgccctacacgcgacgcagctacacagctcgtcctctcttttcagccacgcgcttttcacgccctctgcctgggatctggcggacttagattggcccttggattgttacagctactgcctgggaggcgaccggcaggcccaggaagcccggcaacatcgcctcctgcctcggtccgaatcttgagagctgctgctgcgtgtgatctgctggggtgtctcggtatggtgatccggtctaccgtgtggctgggctttcccaatttcgtggactcggtttcagatatgaaccatacggaaatctggcctgccgctttctgcgtaggcagcgctatgtggatccagctgctttattcagcttgcttctggtggctcttttgttacgccgtggacgcctatctggtcatacgccgatccgccggattatccaccattctcctctatcacatcatggcgtgggggttggcaaccctcctctgtgtggaaggcgcagccatgctgtattacccatccgttagccggtgtgaacgtggactggaccatgccatcccgcattatgtgacaatgtaccttcccctgctgcttgtactggtcgccaatccgatactcttccagaagaccgtaacggccgtcgccagtctgctgaagggaaggcagggaatttatactgagaacgaacgcaggatgggcgcagtcatcaagattcggttttttaaaattatgttggttctaattatttgttggctcagcaatataatcaatgagtctttgctgttctacttagagatgcagacagatattaacggcggttcactgaagcccgtacgcacagccgctaagactacatggtttatcatggggatcctgaatcctgcccaggggtttctgctctcccttgccttttacggttggacaggttgctctctggggttccagtccccccgtaaggagatccagtgggaaagtctgacgacgagcgctgccgagggcgcacatccgagtccacttatgccgcacgagaaccccgcaagcgggaaagtcagtcaagttggcggtcagactagcgacgaggccctctcaatgctgtcagaggggagcgatgccagcacaattgagattcacaccgcttctgagagctgtaacaagaacgagggagaccctgccctgcccacacatggcgacctgtag

SEQ ID NO: 5937 - DNA, 1275 bp, Artificial Sequence
  derived and/or modified sequence
atgacccaggccggcagaagaggccccggcacccccgagcccagacccagaacccagcccatggccagccccagactgggcaccttctgctgccccaccagagacgccgccacccagctggtgctgagcttccagcccagagccttccacgccctgtgcctgggcagcggcggcctgagactggccctgggcctgctgcagctgctgcccggcagaagacccgccggccccggcagccccgccaccagcccccccgccagcgtgagaatcctgagagccgccgccgcctgcgacctgctgggctgcctgggcatggtgatcagaagcaccgtgtggctgggcttccccaacttcgtggacagcgtgagcgacatgaaccacaccgagatctggcccgccgccttctgcgtgggcagcgccatgtggatccagctgctgtacagcgcctgcttctggtggctgttctgctacgccgtggacgcctacctggtgatcagaagaagcgccggcctgagcaccatcctgctgtaccacatcatggcctggggcctggccaccctgctgtgcgtggagggcgccgccatgctgtactaccccagcgtgagcagatgcgagagaggcctggaccacgccatcccccactacgtgaccatgtacctgcccctgctgctggtgctggtggccaaccccatcctgttccagaagaccgtgaccgccgtggccagcctgctgaagggcagacagggcatctacaccgagaacgagagaagaatgggcgccgtgatcaagatcagattcttcaagatcatgctggtgctgatcatctgctggctgagcaacatcatcaacgagagcctgctgttctacctggagatgcagaccgacatcaacggcggcagcctgaagcccgtgagaaccgccgccaagaccacctggttcatcatgggcatcctgaaccccgcccagggcttcctgctgagcctggccttctacggctggaccggctgcagcctgggcttccagagccccagaaaggagatccagtgggagagcctgaccaccagcgccgccgagggcgcccaccccagccccctgatgccccacgagaaccccgccagcggcaaggtgagccaggtgggcggccagaccagcgacgaggccctgagcatgctgagcgagggcagcgacgccagcaccatcgagatccacaccgccagcgagagctgcaacaagaacgagggcgaccccgccctgcccacccacggcgacctgtag

SEQ ID NO: 5938 - DNA, 1215 bp, Artificial Sequence
  derived and/or modified sequence
atggccagccccagactgggcaccttctgctgccccaccagagacgccgccacccagctggtgctgagcttccagcccagagccttccacgccctgtgcctgggcagcggcggcctgagactggccctgggcctgctgcagctgctgcccggcagaagacccgccggccccggcagccccgccaccagcccccccgccagcgtgagaatcctgagagccgccgccgcctgcgacctgctgggctgcctgggcatggtgatcagaagcaccgtgtggctgggcttccccaacttcgtggacagcgtgagcgacatgaaccacaccgagatctggcccgccgccttctgcgtgggcagcgccatgtggatccagctgctgtacagcgcctgcttctggtggctgttctgctacgccgtggacgcctacctggtgatcagaagaagcgccggcctgagcaccatcctgctgtaccacatcatggcctggggcctggccaccctgctgtgcgtggagggcgccgccatgctgtactaccccagcgtgagcagatgcgagagaggcctggaccacgccatcccccactacgtgaccatgtacctgcccctgctgctggtgctggtggccaaccccatcctgttccagaagaccgtgaccgccgtggccagcctgctgaagggcagacagggcatctacaccgagaacgagagaagaatgggcgccgtgatcaagatcagattcttcaagatcatgctggtgctgatcatctgctggctgagcaacatcatcaacgagagcctgctgttctacctggagatgcagaccgacatcaacggcggcagcctgaagcccgtgagaaccgccgccaagaccacctggttcatcatgggcatcctgaaccccgcccagggcttcctgctgagcctggccttctacggctggaccggctgcagcctgggcttccagagccccagaaaggagatccagtgggagagcctgaccaccagcgccgccgagggcgcccaccccagccccctgatgccccacgagaaccccgccagcggcaaggtgagccaggtgggcggccagaccagcgacgaggccctgagcatgctgagcgagggcagcgacgccagcaccatcgagatccacaccgccagcgagagctgcaacaagaacgagggcgaccccgccctgcccacccacggcgacctgtag

SEQ ID NO: 5939 - protein, 838 aa, Artificial Sequence
  derived and/or modified sequence
MHLEGRDGRRYPGAPAVELLQTSVPSGLAELVAGKRRLPRGAGGADPSHSCPRGAAGQSSWAPAGQEFASFLTKGRSHSSLPQMSSSRSKDSCFTENTPLLRNSLQEKGSRCIPVYHPEFITAEESWEDSSADWERRYLLSREVSGLSASASSEKGDLLDSPHIRLRLSKLRRCVQWLKVMGLFAFVVLCSILFSLYPDQGKLWQLLALSPLENYSVNLSSHVDSTLLQVDLAGALVASGPSRPGREEHIVVELTQADALGSRWRRPQQVTHNWTVYLNPRRSEHSVMSRTFEVLTRETVSISIRASLQQTQAVPLLMAHQYLRGSVETQVTIATAILAGVYALIIFEIVHRTLAAMLGSLAALAALAVIGDRPSLTHVVEWIDFETLALLFGMMILVAIFSETGFFDYCAVKAYRLSRGRVWAMIIMLCLIAAVLSAFLDNVTTMLLFTPVTIRLCEVLNLDPRQVLIAEVIFTNIGGAATAIGDPPNVIIVSNQELRKMGLDFAGFTAHMFIGICLVLLVCFPLLRLLYWNRKLYNKEPSEIVELKHEIHVWRLTAQRISPASREETAVRRLLLGKVLALEHLLARRLHTFHRQISQEDKNWETNIQELQKKHRISDGILLAKCLTVLGFVIFMFFLNSFVPGIHLDLGWIAILGAIWLLILADIHDFEIILHRVEWATLLFFAALFVLMEALAHLHLIEYVGEQTALLIKMVPEEQRLIAAIVLVVWVSALASSLIDNIPFTATMIPVLLNLSHDPEVGLPAPPLMYALAFGACLGGNGTLIGASANVVCAGIAEQHGYGFSFMEFFRLGFPMMVVSCTVGMCYLLVAHVVVGWN

SEQ ID NO: 5940 - protein, 901 aa, Artificial Sequence
  derived and/or modified sequence
MEPPLPVGAQPLATVEGMEMKGPLREPCALTLAQRNGQYELIIQLHEKEQHVQDIIPINSHFRCVQEAEETLLIDIASNSGCKIRVQGDWIRERRFEIPDEEHCLKFLSAVLAAQKAQSQLLVPEQKDSSSWYQKLDTKDKPSVFSGLLGFEDNFSSMNLDKKINSQNQPTGIHREPPPPPFSVNKMLPREKEASNKEQPKVTNTMRKLFVPNTQSGQREGLIKHILAKREKEYVNIQTFRFFVGTWNVNGQSPDSGLEPWLNCDPNPPDIYCIGFQELDLSTEAFFYFESVKEQEWSMAVERGLHSKAKYKKVQLVRLVGMMLLIFARKDQCRYIRDIATETVGTGIMGKMGNKGGVAVRFVFHNTTFCIVNSHLAAHVEDFERRNQDYKDICARMSFVVPNQTLPQLNIMKHEVVIWLGDLNYRLCMPDANEVKSLINKKDLQRLLKFDQLNIQRTQKKAFVDFNEGEIKFIPTYKYDSKTDRWDSSGKCRVPAWCDRILWRGTNVNQLNYRSHMELKTSDHKPVSALFHIGVKVVDERRYRKVFEDSVRIMDRMENDFLPSLELSRREFVFENVKFRQLQKEKFQISNNGQVPCHFSFIPKLNDSQYCKPWLRAEPFEGYLEPNETVDISLDVYVSKDSVTILNSGEDKIEDILVLHLDRGKDYFLTISGNYLPSCFGTSLEALCRMKRPIREVPVTKLIDLEEDSFLEKEKSLLQMVPLDEGASERPLQVPKEIWLLVDHLFKYACHQEDLFQTPGMQEELQQIIDCLDTSIPETIPGSNHSVAEALLIFLEALPEPVICYELYQRCLDSAYDPRICRQVISQLPRCHRNVFRYLMAFLRELLKFSEYNSVNANMIATLFTSLLLRPPPNLMARQTPSDRQRAIQFLLGFLLGSEED

SEQ ID NO: 5941 - DNA, 2706 bp, Artificial Sequence
  derived and/or modified sequence
atggaaccgcctctgcctgttggcgctcagcctttggctacagtggagggcatggagatgaaggggcccctgcgagaaccttgtgccctgaccctggcgcagcgcaatggtcaatatgagcttattatccagcttcacgaaaaggaacaacacgtgcaagacattatccctattaatagccacttccggtgcgtccaggaggcagaggagaccttactgatcgatattgcctctaacagcgggtgcaaaataagggtccagggcgattggatacgggagcgtcgcttcgagatcccagacgaagagcactgccttaaattccttagcgcggttttagccgcacagaaggctcagagccaactgctcgtgcctgagcagaaagacagctctagctggtaccaaaagttggacactaaagataaacctagcgtcttcagcgggctgctgggctttgaggacaatttttctagcatgaatctcgataagaaaataaattcccaaaatcagcctaccggcatccatagagagcccccaccaccaccctttagcgtcaacaaaatgctgccaagagagaaggaagcttccaacaaggaacagcccaaggtgaccaacactatgaggaaactgttcgtgccgaacacacagagcggacagcgagaaggcctgataaaacatatactcgccaagcgtgaaaaagagtacgtgaatatccagacctttcggttctttgttgggacatggaacgtcaatggacagtcacccgatagcggattagaaccttggcttaattgtgatccaaatccaccagacatatactgtatcggcttccaggaactggacctttctaccgaagcatttttctattttgaaagcgtgaaggagcaagaatggtccatggccgtcgaaagaggtctccactccaaggcgaagtacaagaaggtacagttagttaggttggtggggatgatgctgctgatttttgcaagaaaagatcagtgcaggtacattagggacatcgcgactgagacggtgggtacaggcatcatgggtaagatggggaacaagggcggtgtcgctgtgcgatttgtgtttcacaacacgactttctgcattgtgaatagccacctggcggcccatgtggaggattttgaacggaggaatcaggattataaagacatttgtgcccgcatgtccttcgtggtccctaatcaaacattgcctcagttaaatatcatgaagcacgaagtggtgatatggcttggggacttgaattaccgcctgtgcatgcccgatgccaatgaagtgaaatctctgattaataagaaggatctccagagactcctcaaattcgaccaactcaacatccagcgaacccagaaaaaggccttcgtcgatttcaacgagggagaaattaagttcatcccgacgtataaatatgatagtaaaaccgataggtgggatagttccggtaaatgccgtgtgcccgcatggtgcgatagaattttatggagggggacaaatgttaatcagctcaactaccgatcacatatggaactgaagacgtctgaccataagcctgtttccgcactattccacatcggtgtgaaggtagttgacgaacgaaggtaccgtaaggtatttgaagattctgtccgcattatggaccggatggagaatgattttctgccttcattggagctctctaggagggagttcgtgtttgagaatgtgaaattcaggcagctgcagaaagagaagtttcagattagtaacaatggacaggtcccgtgccacttctccttcatacctaaactgaatgactcccagtattgcaaaccttggctacgtgccgagccattcgaggggtacctcgaacctaatgagactgtggatatcagcctcgatgtttacgtgagcaaagatagtgttacaatcttgaatagcggtgaggacaaaatcgaggacatcttggttctgcatctggataggggcaaagactatttcctcacgatttctggcaattaccttcccagctgctttggtacctcgctggaggccttgtgccggatgaagagacccatccgggaagtgcctgtgacaaagcttattgacctcgaagaggatagttttctggaaaaggaaaaaagtctgctccagatggtccctctggatgagggcgcatcggagagacccctacaagtccccaaggaaatctggttgctggtagaccacctgtttaagtacgcctgccaccaggaagacctgtttcagacgccaggcatgcaggaggagctccagcagattatagattgcctggatacttctattccagagaccatcccgggctccaatcattccgtcgcagaagccttgctcatcttcctggaagctctgcctgaacccgtcatctgttatgagctttatcagcgctgcctggattccgcctacgatccaagaatctgtcgacaagtcatatcacagctgcccagatgccacagaaatgtctttcggtatctcatggccttcctgcgagagctcctcaagttcagcgaatataatagcgtgaatgccaacatgattgccacactcttcacctcactgcttctcagaccacctccgaatctcatggctagacaaactcctagcgaccggcaacgcgccatccaattcctgctgggctttttactcgggagcgaagaagattag

SEQ ID NO: 5942 - DNA, 2706 bp, Artificial Sequence
  derived and/or modified sequence
atggagccccccctgcctgtgggcgcccagcccctggccaccgtggagggcatggagatgaagggccccctgcgggagccctgtgccctgaccctggcccagagaaatggccagtatgagctgatcatccagctgcacgagaaggagcagcacgtgcaggacatcatccccatcaacagccacttccgctgtgtgcaggaggccgaggagaccctgctgattgacatcgccagcaacagcggctgcaagatccgggtgcagggcgactggatccgggagaggagatttgagatcccagatgaggagcactgcctgaagttcctgtctgctgtgctggccgcccagaaggcccagagccagctgctggtgcctgagcagaaggacagcagctcctggtaccagaagctggacaccaaggacaagcccagcgtcttcagcggcctgctgggctttgaggacaacttcagctccatgaacctggacaagaagatcaacagccagaaccagcccaccggcatccaccgggagcccccacctccacccttctctgtgaacaagatgctgccccgggagaaggaggccagcaacaaggagcagcccaaggtgaccaacaccatgaggaagctgtttgtgcccaacacccagagcggccagcgggagggcctcatcaagcacatcctggccaagcgggagaaggagtatgtgaacatccagaccttccgcttctttgtgggcacctggaatgtgaatggccagagcccagacagcggcctggagccctggctgaactgtgaccccaaccccccagacatctactgcatcggcttccaggagctggacctgagcacagaggccttcttctactttgaatctgtgaaggagcaggagtggagcatggctgtggagcggggcctgcacagcaaggccaagtacaagaaggtgcagctggtgcggctggtgggcatgatgctgctgatctttgccaggaaggaccagtgccgctacatccgggacatcgccacagaaacagtgggcaccggcatcatgggcaagatgggcaacaagggcggcgtggccgtgcgctttgtgttccacaacaccaccttctgcatcgtgaacagccacctggccgcccacgtggaggactttgaaagaagaaaccaggactacaaggacatctgtgccaggatgagctttgtggtgcccaaccagaccctgccccagctgaacatcatgaagcatgaggtggtgatctggctgggggacctgaactaccgcctgtgcatgccagatgccaatgaggtgaagagcctcatcaacaagaaggacctgcagaggctgctgaagtttgaccagctgaacatccagaggacccagaagaaggcctttgtggacttcaatgaaggagagatcaagttcatccccacctacaagtatgacagcaagacagaccgctgggacagcagtggaaaatgtcgggtgcctgcctggtgtgaccgcatcctgtggaggggcaccaacgtgaaccagctgaactaccgcagccacatggagctgaagaccagtgaccacaagcctgtgtctgccctcttccacatcggcgtgaaggtggtggatgaaagacgctacaggaaggtgtttgaggacagcgtgcgcatcatggacaggatggagaatgacttcctgcccagcctggagctgagcagaagagaatttgtgtttgaaaatgtgaagttccggcagctgcagaaggagaagttccagatcagcaacaacggccaggtgccctgccacttctccttcatccccaagctgaatgacagccagtactgcaagccctggctgcgggcagagccctttgagggctacctggagcccaatgaaacagtggacatcagcctggatgtgtatgtgtccaaggacagcgtgaccatcctgaacagcggggaggacaagattgaggacatcctggtgctgcacctggaccggggcaaggactacttcctgaccatcagcggcaactacctgcccagctgcttcggcaccagcctggaggccctgtgcaggatgaagaggcccatccgggaggtgcctgtgaccaagctgattgacctggaggaggacagcttcctggagaaggagaagagcctgctgcagatggtgcccctggatgagggcgccagcgagcggcccctgcaggtgcccaaggagatctggctgctggtggaccacctgttcaagtatgcctgccaccaggaggacctcttccagaccccaggcatgcaggaggagctgcagcagatcatcgactgcctggacaccagcatccctgagaccatccctggcagcaaccacagcgtggccgaggccctgctgatcttcctggaggccctgcctgagcctgtgatctgctatgagctgtaccagcgctgcctggacagcgcctatgacccccgcatctgccggcaggtgatcagccagctgccccgctgccacagaaatgtgttccgctacctgatggccttcctgcgggagctgctgaagttcagcgagtacaacagcgtgaatgccaacatgattgccaccctcttcaccagcctgctgctgcggcccccacccaacctgatggcccggcagacccccagcgaccggcagagggccatccagttcctgctgggcttcctgctgggcagcgaggaggactag

SEQ ID NO: 5943 - DNA, 2706 bp, Artificial Sequence
  derived and/or modified sequence
atggagccccccctgcccgtgggcgcccagcccctggccaccgtggaaggcatggagatgaaaggacctctacgtgagccctgcgcgctaactctggcgcagcggaacggccagtatgaactgattatccaactccacgaaaaagaacagcatgttcaagacattataccaatcaatagccattttcggtgcgtacaggaggccgaggagacactactcatcgacatcgcatcaaatagcggctgcaaaatcagagtgcagggcgattggattcgggaacgcaggttcgagatccctgacgaggagcattgcctcaagtttctgtccgctgtcctggccgcccagaaggcccagagccaactcctggttcccgagcagaaggacagttcttcttggtatcagaaactggacaccaaggataaaccgtccgtgttttctggtctgctgggctttgaggataattttagttccatgaatcttgacaaaaagattaattcccaaaaccagcctaccgggattcaccgagagccacctcctccccccttttcagtgaataaaatgttgccacgagaaaaggaggccagcaataaagagcaaccaaaagtgacgaacacaatgagaaagctgttcgtccccaatacacagtccggccagagagaaggcctgatcaaacatattctggctaaaagggagaaagagtatgtaaatatacagaccttccggtttttcgttggcacatggaacgtgaacggacaatcaccggacagcggtctggagccctggctcaactgtgacccaaacccacctgacatttattgcataggtttccaggaattggatttatctactgaggcatttttttacttcgagtctgtcaaggaacaggagtggtcaatggctgttgagcgcggcctgcactcaaaggccaagtacaaaaaagtccaactggtgcggctcgtagggatgatgctactgatctttgcacgtaaggaccagtgtaggtacataagggatattgccacagagactgtgggaacgggcattatggggaagatggggaacaaagggggggtggctgttagatttgtgttccacaacaccaccttttgcattgttaatagtcatttagccgctcacgtcgaggatttcgaaaggaggaaccaggactacaaagacatatgcgccaggatgtcattcgtggtgcccaatcaaactctcccccagttaaatatcatgaaacacgaggtggtcatctggttaggcgatctaaattatagactttgcatgccagacgcgaatgaagttaagtcactcattaataagaaggacctgcagcgtctcttgaagttcgatcaactaaacatccagcggacgcagaagaaagcgttcgttgattttaatgaaggtgagattaagttcattccaacatacaaatatgatagcaaaacggatcggtgggactcttctggcaagtgccgagtccccgcctggtgcgacaggattctctggagagggacaaacgttaatcagttaaattatcggtcccacatggagcttaagactagcgaccataagcctgtgtctgccctttttcatataggtgtcaaagtggtggatgagaggcggtatagaaaagttttcgaggactccgtgcggattatggatagaatggaaaatgacttcttaccctcattggaactgagcagaagggagtttgttttcgaaaatgtaaagtttaggcagttacagaaagagaaattccagatcagcaacaatggccaggttccctgccacttttcctttattcctaagctgaatgactcccagtactgcaagccctggttgagagcagaaccgttcgagggatatctggaacctaacgaaacggtggacatatctcttgacgtttacgtatccaaagacagtgttactatcttgaatagcggcgaggacaaaattgaagatattctggtgctgcatctggatagggggaaagattacttcctgactattagtgggaactacctcccatcctgtttcggcaccagtcttgaggccctatgtaggatgaagagacctatccgagaagtgcctgtgaccaaactaattgatttagaagaagatagctttctagagaaagagaaaagcctgctgcagatggttcccttagatgagggggcctccgagcgtcctctccaggttcctaaggagatatggttactggttgatcacttgttcaaatacgcctgtcatcaggaagacttattccagactcccggaatgcaggaggaactgcagcaaatcattgattgtttggatacaagcatcccggaaacaatccccggatctaaccatagcgtcgccgaggcccttctcattttcctggaggctctgccggaacccgtcatctgttacgaattgtatcagagatgtctcgatagtgcttacgatccacgcatctgccggcaagttatatcacagctgccacgctgccaccggaacgtattcaggtacctgatggcctttttgcgtgagctcctgaagttcagtgagtacaacagcgtgaacgctaatatgatagccaccctgttcacctctctgttacttagacccccccccaaccttatggcccgacagactcccagcgatagacagcgcgccatccagttcttgttgggttttctgttaggctcggaggaggattag

SEQ ID NO: 5944 - DNA, 5162 bp, Artificial Sequence
  derived and/or modified sequence
tctcagctcccagctccccgctcccggctcccggcgcccggcgcccggcgcggagctgttcctcaaacgacacgcagccgaggtgggtgggtgtggggacgcgggagccagtgtcgtcggatcggcccgcagtccgctgtcctgctgagcccggaggccgcctggatggagccgccgctcccggtcggagcccagccgcttgccactgtcgagggtatggagatgaagggtcctctccgggagccctgcgccctgaccctagcccagaggaacgggcaatatgagttaataatccagttgcatgagaaggaacagcatgttcaagatatcattcctataaatagccacttcagatgtgttcaagaagcagaagaaactcttttgattgacatagcttctaacagtggctgcaaaattcgggttcagggggactggatcagagagcgccgctttgaaatccctgatgaggaacactgtttgaagttcctctcagctgtccttgctgctcagaaagctcagtcacagcttcttgttccagagcaaaaggactcatctagctggtaccagaaattagacactaaggacaaaccttctgttttttcagggcttcttggatttgaagacaatttttcttctatgaatttggacaagaaaataaattcacaaaatcagcctactgggattcatcgggaacccccacctccacccttttcagtgaataaaatgcttccacgtgaaaaagaagcttctaacaaggagcagcccaaagtgaccaacaccatgcggaagctctttgtaccaaatacccaatctgggcagcgggagggtctcatcaaacatatcctggcaaagcgagagaaagaatatgtcaacattcagactttcagattttttgttggaacttggaatgtgaatggccagtctccagatagcgggttagaaccttggctgaactgtgatcccaatcctcctgatatctactgcattggattccaagaactggacttgagcacagaagccttcttctactttgaatctgtgaaggaacaagaatggtccatggctgtagagagaggtttgcattccaaagccaagtataagaaagttcaactggtgcgccttgttgggatgatgcttcttatatttgccagaaaggatcagtgtcgatacattcgtgatattgctacagaaacagttggaactggaatcatggggaaaatgggaaacaaaggtggggtagctgtgagatttgtatttcacaacaccaccttttgcattgtcaattcccatctggctgcacacgtggaggactttgagagaaggaatcaagattataaggacatttgtgcgagaatgagttttgtggtcccaaatcagaccctcccgcagttgaacatcatgaaacatgaggttgtcatttggttgggagatttgaattatagactttgcatgcctgatgccaatgaggtgaaaagtcttattaataagaaagaccttcagagactcttgaaattcgaccagctaaatattcagcgcacacagaaaaaagcttttgttgacttcaatgaaggggaaatcaagttcatccccacttataagtatgactctaaaacagaccggtgggattccagtgggaaatgccgggttccagcctggtgtgaccgaattctttggagaggaacaaatgttaatcagcttaattatcggagtcacatggaactgaaaaccagcgaccacaagcctgttagcgccctcttccatattggggtgaaggttgtggatgaacgaaggtaccggaaagtctttgaagatagtgtacgcatcatggacagaatggaaaatgacttccttccttccttagaactcagcaggagggagtttgtgtttgaaaatgtgaagtttcggcaactacaaaaggagaagttccagatcagcaacaatggacaggttccctgccatttttctttcatccctaaacttaatgacagccagtactgcaagccatggcttcgggctgaaccttttgagggctacttggagccaaatgagacagtggacatttctcttgatgtgtatgtcagcaaagactctgtaaccatcctgaactcgggagaagataagattgaagatattctcgtccttcacctggatcgaggcaaagattacttcttgactatcagtggaaattacctcccaagttgttttggcacatccttagaggctctgtgccgtatgaaaagaccaatccgagaagttcctgttaccaaactcatagacttggaagaagacagcttcctagaaaaggagaaatcccttctgcaaatggttcctttggatgaaggtgccagtgagagaccccttcaggttcccaaggagatctggcttctagtagatcacctattcaaatacgcctgtcaccaggaggacctgttccagacccctggaatgcaggaagagctccagcagatcattgattgtctggataccagcattcctgagacaatccctggcagcaaccactctgtggctgaagcactgctcattttcttggaagccctgccagagccagtcatctgttacgagctgtatcagcgatgtcttgactctgcttatgatccccggatctgccgacaggtgatctcccagcttccgagatgccatagaaatgttttccgttacttgatggcattccttcgagaactcttaaaattctctgaatacaatagcgtcaatgccaacatgatcgctactctcttcactagtcttctcctgaggcctccacccaaccttatggcaagacagactccaagtgaccgccagcgtgctattcagttccttctgggctttctgcttgggagcgaagaagactaaggcttttactgttctctgatattctagaagcagacgatctcgggctccaagtatttcagaatgatttaaaaagtcatgccacaggaagggtctattgcagaatttcaagttctgtttatagtaaaaaggaagagcgtttcctaatccctcctttaccatatcctacacagaaaaatacttttagacttatattgccaagccaaagttaccatattttggtgtttttgtgttttctctttataaggcaaaaagatctgtatttacactccttcacctagggatgtgtttgttgccctcctacccaattgtcatgattgtccttagtaccctaggcctagattctgagatcttcccattctaggcctacaagcactacttgctgtagctgagacttgtctagagtcctttgttttgcacttttgacccaccccttcctggatcactcctttgcactccactcccctcgttctgtcactttgaacgaagtctgagtgaggctagtgactccttgggtgtcctcaacagtgaattcactgtctgcgtgcagttattacatgcatttgtgcatttctactacaatggcatctttatgtctctgtaacattggccttttcatggctccacactgggtggaaccatattctcttagatcacatttagtagcataactgtagggactattagagatggcatctcatcgatgagagagaatcacaatcagaatggaagcactttgagtatctgaagagtgagagcattcatgtttgacaggtcctgcttcccactatccttttcctgttattattcaaattttacacaaggactaatcctgggtgtctctgagacccatctcctgcctagacatccacctccagagcaacactggccccacagtaaaagaggaagtcttgtacctcaggcaggcccatctagagctattgctccttcccacagcaaaggtattgtggatgacccttagaatccattctctggtcttctgaaataccaagggcagatgtcacctccttcctcagcaggactgactctgggctctacaaccagctccttcacataaagggtttagagactccccttggctcccagtcaccatatccagtgttgtgtaaagagactggccaacaggaccaaccaagcaccttacctctcccatacaagatgaccctctgagcttttcatttattcaagctctgtggtacagcctttttttaaaataaattaatctatattggttgacaaacaagccaccaaccactgactgcaaaactgcctgatgcagttgggttcctcctggttttcttttgttacaaccacccttgcctgtttacattaattgcaaggagcataacgtacaggctgtatgtacaatcctgggcattgactctgtgacatttctagcatatccaaggcaccaccagtgatttctcctgtttcttggtgggggtgggggggaaggtacgtattctgcaatatggctaaaccctttcctgattgagagttaaagcaataggagtcaagttactggtgccacagatctggaggtatgataggtcaggggctaggtgttgaacttagttaatggaagactgagagcagaacaggtttgtcatctccgcaaggccagaaagtgatcacaaaaagaggcagatgatagacactggggtagggtcataccacagggaaatacctttcctgggcttgttttctagcatatcactgacctgggatctttgggtgatcaagggtgtggttagtggaggctctgtgctgcacgtatgcagtatcctatctctttctacatcagatcaaaacactaagttggtgtactgcctcgaccttttttcagctcatcctggaacatatacagagttgagagttttagacaatctctaggtagaggagacaagatgtagacccagacagaagaaatctgcttccctaccatggctattccagcaccccaacctgtaattgccaagtcctctaaggtactaatttgtagctgctctgaagtaaggatttcggattcagctggtagggaaagactctgcacctgctgtcttagggaagaaatggttcaaatccatgtggtgacattgcattagtctccctttcactgttttcttattctgtaattgtttgttatatttcccaaaaacgtcttgatcactaagcaaagctgctagtgggattctatatttcgtgtcatcttttttattataatttattgcaaatttttttctgaataaatatatgttgtgtgaaaaagcaaa

SEQ ID NO: 5945 - DNA, 2706 bp, Artificial Sequence
  derived and/or modified sequence
atggaaccaccattgcccgtgggagcacagcccctggccaccgtggaagggatggagatgaagggtcctctgcgcgaaccctgcgcacttactctggcgcagagaaatgggcagtacgagctgatcattcagttgcacgagaaagaacagcacgttcaagatatcatacctatcaactctcactttaggtgcgtgcaggaagccgaagagaccctgttgatcgacattgcttccaattccgggtgcaaaatccgagtgcagggtgactggatccgtgagaggagatttgagatcccagacgaagagcactgtctgaagttcttgagtgccgtcctcgccgctcagaaagcccaatcgcaactgctcgtcccagagcagaaagattctagcagttggtaccagaagttagacaccaaggataaaccaagcgtttttagtggcttgctggggtttgaagacaacttcagctccatgaatcttgataagaaaattaatagccaaaaccagcccactggcatacaccgtgaaccgccaccaccacctttctctgtgaacaagatgttacctcgagaaaaggaagcatccaacaaggagcagccaaaggtgactaataccatgaggaagctgtttgtccctaacacccagagcgggcaacgagagggcctgatcaagcacatcctggcgaaaagggagaaagagtacgtgaacatccaaacctttcggttcttcgtgggtacatggaacgttaacggccagtctccggactccggcttggagccctggcttaattgtgacccaaaccctcctgatatctattgcatcggatttcaggaattggacctctctaccgaagcgtttttctattttgagtcagtgaaggagcaggaatggagcatggctgtagagagaggtttgcactcgaaggccaaatataaaaaggtccagttggttcggctggtgggaatgatgctgttgattttcgcccgaaaagatcaatgtcgatacattcgggacattgccaccgagaccgtggggactgggattatgggaaaaatggggaataaaggtggagtggccgtgcggtttgttttccacaatacaactttctgtatcgtcaattcccatctggccgcacacgttgaagacttcgagagaaggaaccaggactataaagacatttgtgcacggatgagtttcgtggtccctaatcaaaccttaccccagctcaacattatgaagcacgaggtcgtgatctggctgggtgatttgaactaccgcctgtgcatgccagatgctaacgaagtgaagagcctgatcaacaagaaagatctgcagcgtctgctgaagtttgaccagctcaacatccaaagaactcagaaaaaagcattcgtggacttcaatgaaggcgagatcaagtttattcctacgtacaaatacgattctaagactgatagatgggactcatctggtaagtgtagagtgcctgcctggtgcgaccgcatcctgtggaggggaaccaatgtcaatcagctcaactacaggagtcacatggaactgaagaccagtgaccataagccggtctcagccttgtttcacattggcgtcaaagtggtggacgagagacgctatcggaaagtgtttgaagactctgtaagaattatggacaggatggaaaacgacttccttccatcactggaactgagccgtcgggaatttgtgttcgagaatgtgaaattccgccagcttcagaaggagaagttccagatatcgaacaatggccaggtaccatgccacttcagcttcatcccaaagctcaacgacagccagtactgtaagccttggctccgggcagagccttttgagggctacctggagccaaacgagaccgtggatatcagcctagatgtttacgtgtctaaagattcagttaccattctgaactccggagaggacaagatagaggatatcctagtcttgcatctggataggggcaaggactattttctcactatctctggtaattacctgccttcatgttttggtaccagtctggaggccctctgtcgaatgaaacggcctatccgcgaagtccctgttaccaaactgatcgacctcgaggaagacagctttctggaaaaggaaaaatcgcttctgcagatggtaccccttgatgaaggtgcatccgagaggccactgcaggtcccaaaagagatttggctgctcgtcgatcatcttttcaagtacgcatgccatcaggaggacctgttccagacacccggtatgcaagaggagctgcagcagatcattgattgcctggatacaagcattcccgaaaccatcccaggctctaatcatagtgtggcggaggccctgctcattttcctggaagcactaccggaacctgtgatttgttacgagttgtatcagcgatgcctggacagcgcatacgatcctagaatttgtcggcaggtgatcagccagctgccaaggtgtcatcgtaatgtttttcgttaccttatggccttcctccgggagctgttaaagttttcagagtacaacagcgtgaacgcaaatatgatcgccacgttgtttacgagcctgctcctgaggccaccacctaatctgatggccagacaaactccttcagatcggcaacgagcgattcaatttttgctagggtttctgctcggctccgaggaggattag

SEQ ID NO: 5946 - DNA, 2706 bp, Artificial Sequence
  derived and/or modified sequence
atggagccccccctgcccgtgggcgcccagcccctggccaccgtggagggcatggagatgaagggccccctgagagagccctgcgccctgaccctggcccagagaaacggccagtacgagctgatcatccagctgcacgagaaggagcagcacgtgcaggacatcatccccatcaacagccacttcagatgcgtgcaggaggccgaggagaccctgctgatcgacatcgccagcaacagcggctgcaagatcagagtgcagggcgactggatcagagagagaagattcgagatccccgacgaggagcactgcctgaagttcctgagcgccgtgctggccgcccagaaggcccagagccagctgctggtgcccgagcagaaggacagcagcagctggtaccagaagctggacaccaaggacaagcccagcgtgttcagcggcctgctgggcttcgaggacaacttcagcagcatgaacctggacaagaagatcaacagccagaaccagcccaccggcatccacagagagcccccccccccccccttcagcgtgaacaagatgctgcccagagagaaggaggccagcaacaaggagcagcccaaggtgaccaacaccatgagaaagctgttcgtgcccaacacccagagcggccagagagagggcctgatcaagcacatcctggccaagagagagaaggagtacgtgaacatccagaccttcagattcttcgtgggcacctggaacgtgaacggccagagccccgacagcggcctggagccctggctgaactgcgaccccaacccccccgacatctactgcatcggcttccaggagctggacctgagcaccgaggccttcttctacttcgagagcgtgaaggagcaggagtggagcatggccgtggagagaggcctgcacagcaaggccaagtacaagaaggtgcagctggtgagactggtgggcatgatgctgctgatcttcgccagaaaggaccagtgcagatacatcagagacatcgccaccgagaccgtgggcaccggcatcatgggcaagatgggcaacaagggcggcgtggccgtgagattcgtgttccacaacaccaccttctgcatcgtgaacagccacctggccgcccacgtggaggacttcgagagaagaaaccaggactacaaggacatctgcgccagaatgagcttcgtggtgcccaaccagaccctgccccagctgaacatcatgaagcacgaggtggtgatctggctgggcgacctgaactacagactgtgcatgcccgacgccaacgaggtgaagagcctgatcaacaagaaggacctgcagagactgctgaagttcgaccagctgaacatccagagaacccagaagaaggccttcgtggacttcaacgagggcgagatcaagttcatccccacctacaagtacgacagcaagaccgacagatgggacagcagcggcaagtgcagagtgcccgcctggtgcgacagaatcctgtggagaggcaccaacgtgaaccagctgaactacagaagccacatggagctgaagaccagcgaccacaagcccgtgagcgccctgttccacatcggcgtgaaggtggtggacgagagaagatacagaaaggtgttcgaggacagcgtgagaatcatggacagaatggagaacgacttcctgcccagcctggagctgagcagaagagagttcgtgttcgagaacgtgaagttcagacagctgcagaaggagaagttccagatcagcaacaacggccaggtgccctgccacttcagcttcatccccaagctgaacgacagccagtactgcaagccctggctgagagccgagcccttcgagggctacctggagcccaacgagaccgtggacatcagcctggacgtgtacgtgagcaaggacagcgtgaccatcctgaacagcggcgaggacaagatcgaggacatcctggtgctgcacctggacagaggcaaggactacttcctgaccatcagcggcaactacctgcccagctgcttcggcaccagcctggaggccctgtgcagaatgaagagacccatcagagaggtgcccgtgaccaagctgatcgacctggaggaggacagcttcctggagaaggagaagagcctgctgcagatggtgcccctggacgagggcgccagcgagagacccctgcaggtgcccaaggagatctggctgctggtggaccacctgttcaagtacgcctgccaccaggaggacctgttccagacccccggcatgcaggaggagctgcagcagatcatcgactgcctggacaccagcatccccgagaccatccccggcagcaaccacagcgtggccgaggccctgctgatcttcctggaggccctgcccgagcccgtgatctgctacgagctgtaccagagatgcctggacagcgcctacgaccccagaatctgcagacaggtgatcagccagctgcccagatgccacagaaacgtgttcagatacctgatggccttcctgagagagctgctgaagttcagcgagtacaacagcgtgaacgccaacatgatcgccaccctgttcaccagcctgctgctgagacccccccccaacctgatggccagacagacccccagcgacagacagagagccatccagttcctgctgggcttcctgctgggcagcgaggaggactag

SEQ ID NO: 5947 - protein, 136 aa, Artificial Sequence
  derived and/or modified sequence
MSTAVLENPGLGRKLSDFGQETSYIEDNCNQNGAISLIFSLKEEVGALAKVLRLFEENDVNLTHIESRPSRLKKDEYEFFTHLDKRSLPALTNIIKILRHDIGATVHELSRDKKKDTVPWFPRTIQELDRFANQIL

SEQ ID NO: 5948 - protein, 452 aa, Artificial Sequence
  derived and/or modified sequence
MSTAVLENPGLGRKLSDFGQETSYIEDNCNQNGAISLIFSLKEEVGALAKVLRLFEENDVNLTHIESRPSRLKKDEYEFFTHLDKRSLPALTNIIKILRHDIGATVHELSRDKKKDTVPWFPRTIQELDRFANQILSYGAELDADHPGFKDPVYRARRKQFADIAYNYRHGQPIPRVEYMEEEKKTWGTVFKTLKSLYKTHACYEYNHIFPLLEKYCGFHEDNIPQLEDVSQFLQTCTGFRLRPVAGLLSSRDFLGGLAFRVFHCTQYIRHGSKPMYTPEPDICHELLGHVPLFSDRSFAQFSQEIGLASLGAPDEYIEKLATIYWFTVEFGLCKQGDSIKAYGAGLLSSFGELQYCLSEKPKLLPLELEKTAIQNYTVTEFQPLYYVAESFNDAKEKVRNFAATIPRPFSVRYDPYTQRIEVLDNTQQLKILADSINSEIGILCSALQKIK

SEQ ID NO: 5949 - DNA, 1356 bp, Artificial Sequence
  derived and/or modified sequence
atgagcaccgccgtgctggagaaccccggcctgggccgcaagctgagcgacttcggccaggagaccagctacatcgaggacaactgcaaccagaacggcgccatcagcctgatcttcagcctgaaggaggaggtgggcgccctggccaaggtgctgcgcctgttcgaggagaacgacgtgaacctgacccacatcgagagccgccccagccgcctgaagaaggacgagtacgagttcttcacccacctggacaagcgcagcctgcccgccctgaccaacatcatcaagatcctgcgccacgacatcggcgccaccgtgcacgagctgagccgcgacaagaagaaggacaccgtgccctggttcccccgcaccatccaggagctggaccgcttcgccaaccagatcctgagctacggcgccgagctggacgccgaccaccccggcttcaaggaccccgtgtaccgcgcccgccgcaagcagttcgccgacatcgcctacaactaccgccacggccagcccatcccccgcgtggagtacatggaggaggagaagaagacctggggcaccgtgttcaagaccctgaagagcctgtacaagacccacgcctgctacgagtacaaccacatcttccccctgctggagaagtactgcggcttccacgaggacaacatcccccagctggaggacgtgagccagttcctgcagacctgcaccggcttccgcctgcgccccgtggccggcctgctgagcagccgcgacttcctgggcggcctggccttccgcgtgttccactgcacccagtacatccgccacggcagcaagcccatgtacacccccgagcccgacatctgccacgagctgctgggccacgtgcccctgttcagcgaccgcagcttcgcccagttcagccaggagatcggcctggccagcctgggcgcccccgacgagtacatcgagaagctggccaccatctactggttcaccgtggagttcggcctgtgcaagcagggcgacagcatcaaggcctacggcgccggcctgctgagcagcttcggcgagctgcagtactgcctgagcgagaagcccaagctgctgcccctggagctggagaagaccgccatccagaactacaccgtgaccgagttccagcccctgtactacgtggccgagagcttcaacgacgccaaggagaaggtgcgcaacttcgccgccaccatcccccgccccttcagcgtgcgctacgacccctacacccagcgcatcgaggtgctggacaacacccagcagctgaagatcctggccgacagcatcaacagcgagatcggcatcctgtgcagcgccctgcagaagatcaag

SEQ ID NO: 5950 - DNA, 1502 bp, Artificial Sequence
  derived and/or modified sequence
gggaaataagagagaaaagaagagtaagaagaaatataagagccaccatgtccaccgcagtgcttgaaaatccggggttgggccggaagctctccgacttcggacaggaaacgtcgtatatcgaggataattgcaaccagaatggggccatctcgctcatcttctcactgaaagaagaggtgggagccttggctaaagtcttgagactgttcgaagagaacgatgtgaatctcacgcacatcgaaagccgcccaagcagattgaaaaaggacgagtacgagttctttacacatttggacaaaaggtcgctgcctgcgctcacaaatatcattaagattctccgccatgatatcggagcaacagtccacgaactttcgagggacaagaagaaagatacggtgccctggttcccgagaaccatccaagagctcgaccgatttgcgaaccagattctttcgtatggagcggaactcgacgccgatcatccagggtttaaggacccggtgtacagggcacgacgcaagcagttcgccgatattgcctataactatcgccatggtcaaccgattccacgggtagaatacatggaagaggagaaaaagacttgggggactgtgttcaagacgttgaagtcgctctataagacgcacgcatgctatgaatacaaccatatcttccctctgctcgagaagtattgtggattccacgaggataacattccccagctcgaggacgtaagccagttccttcagacatgcacggggtttagacttaggcccgtcgcgggacttctttcctcgagagatttcctcgggggtttggcatttcgagtctttcactgtacccagtatattcggcacggttccaaacctatgtacacccccgagccggatatctgccatgaattgctgggacacgtaccactgtttagcgaccggagctttgctcagtttagccaggagatcggattggcatcattgggtgcgcccgacgagtacattgagaaactggcgactatctactggtttacggtggaatttggcctgtgcaagcaaggcgattcaatcaaggcgtacggtgcggggttgctctcgtcgttcggggaactgcaatactgtctttcggagaaaccgaaactccttcccctcgagttggaaaagacggctatccagaattacactgtaacggagttccagcccttgtattacgtcgccgagtcctttaatgacgccaaagagaaagtgagaaacttcgcggcgacaatcccccgaccattttcggtccggtacgatccttatacacagcgcattgaggtccttgacaatactcaacagctgaagatcctcgccgattcaattaactcagagatcggaattctctgttcagcgctccagaagatcaagtgataagctgccttctgcggggcttgccttctggccatgcccttcttctctcccttgcacctgtacctcttggtctttgaataaagcctgagtaggaag

SEQ ID NO: 5951 - DNA, 1356 bp, Artificial Sequence
  derived and/or modified sequence
atgtctaccgctgtgttggagaaccctggactcggcaggaaactgtccgactttggccaagagacaagttatattgaggacaactgcaaccagaacggtgcaatttcccttattttctcccttaaagaggaggtaggcgcactggccaaggtcctgcgcctcttcgaagagaacgatgttaacctgacacacatcgaaagtaggcccagtcgtctcaagaaggacgaatacgagttctttacccacctggataagagatccctacccgctctgaccaacatcataaagattctgaggcatgatattggagctacagtgcacgaattgagccgcgacaaaaagaaggacacagtcccatggttcccgagaactattcaggagcttgatagatttgccaatcaaattctgtcatacggcgcggagctagacgctgatcaccccggatttaaagaccccgtgtatagagcgcggaggaagcagtttgccgatatcgcctataactaccggcacggccagccaattccaagagttgaatatatggaggaagaaaagaaaacctggggaaccgtgtttaagaccctcaaatcactttacaaaactcacgcctgctacgagtataatcacatctttcctctgctggagaaatattgtgggttccatgaagataatattcctcaactggaagacgtcagccagtttctgcagacctgtaccggattcaggcttcgacctgtggccggcttgttgtcgagcagagatttccttggaggattagctttccgggtgttccattgcacacagtacatccgtcacgggagcaagcctatgtacacaccagaaccggatatctgccacgaattacttggtcacgttcccctcttttcagacagaagtttcgcccagttttcacaggagattgggcttgcttccctgggagctcctgatgaatacatcgagaaactggctaccatttactggttcaccgtcgagtttggcctttgtaagcagggcgatagcatcaaggcctacggggctgggttactgagtagtttcggagagctgcaatattgcctttctgaaaagccaaaactgctgccactggaattggagaagaccgccatccagaactatactgttacggagttccagcccctctactacgtggcagagtcctttaacgatgccaaagagaaggttaggaacttcgccgcaacaataccccggccattttccgtaagatacgacccctacacccagcggatcgaagtgctggataacacccaacaacttaagatccttgcagactctatcaactctgaaatcggcattctgtgtagcgctctgcaaaaaatcaag

SEQ ID NO: 5952 - DNA, 1356 bp, Artificial Sequence
  derived and/or modified sequence
atgagcaccgcggtgctggagaatccgggtctggggagaaaactgtcagattttggtcaggaaacctcctatatcgaggacaactgcaaccaaaatggcgctataagcctgatcttcagcctgaaggaagaagtaggggctcttgcaaaagtgctgcggctgtttgaggagaatgacgtgaatctcacccacatagaaagccgccctagccgtctgaaaaaagacgaatacgagtttttcacccacttggataaacggtccctgcccgcactgacgaatatcattaagattcttcgccatgatattggtgccacggtgcacgagctgagccgggacaaaaaaaaggataccgtgccttggttcccacgcactattcaggagctggatcgcttcgctaatcagatcctgagctatggcgcagagctggatgccgaccatcctggcttcaaggatcctgtttatcgcgcccgtcgtaaacagttcgctgatatcgcctacaattatcgccatggacagccgatcccgcgcgtggagtacatggaagaggagaaaaagacatggggtactgttttcaagactctcaagagcctgtataagacccacgcgtgttatgagtacaatcacattttcccactgcttgaaaaatattgcggcttccacgaagacaacatcccgcagctggaggatgtctcccagtttcttcagacgtgcaccggatttaggctgcgcccagtcgcggggctgcttagcagcagggactttctaggtggtctggcttttcgcgtgttccattgtactcaatacatcaggcacggttccaaaccgatgtataccccagaaccagacatctgtcacgagctactgggccacgttccgttgtttagcgaccgcagcttcgcccaattctctcaagaaattggattggcttctctaggagcgcctgacgagtacatagaaaagctggcgacgatttattggttcacggtggaatttggtctgtgtaagcagggcgatagcatcaaggcatatggcgccggcctcctaagctcattcggggagctgcagtactgtctgagtgaaaaaccaaagctgctgccactggaactggagaagaccgcgatacaaaactacaccgttactgagttccagcccctgtattacgtggccgagagtttcaatgacgctaaagaaaaagtccgtaattttgctgccactattcctcgcccattctctgtgcgttacgatccatatacgcagcgaatcgaggtgctggataacacgcagcagctaaagatcctggctgacagcattaactctgaaattggaattctgtgctcggctctccagaaaataaag

SEQ ID NO: 5953 - DNA, 1356 bp, Artificial Sequence
  derived and/or modified sequence
atgtctacggctgtcctggagaatcctggtctgggacgcaagctgagcgatttcgggcaggagaccagctacattgaggacaactgtaaccagaatggtgccatatctttaattttttcattgaaggaggaggttggtgcattggctaaggttttgaggctgttcgaggaaaacgacgtcaatcttactcacattgagtctcgcccatcccgcctaaaaaaagacgaatatgagttcttcacccacctggataaacgcagcctcccagccctgacaaatataattaaaattttaagacatgacatcggcgcgacggtgcatgagctgtcaagagataaaaaaaaagatacagtgccatggttcccccgcaccatacaggagctcgatcgcttcgcaaaccaaatcctgagttatggcgcagaactggacgctgaccatcccggattcaaggaccccgtctaccgcgcccgaagaaagcaatttgccgacatcgcttataactacagacatggccaaccgattccccgagtagaatacatggaggaggaaaagaagacttggggaactgtcttcaagactttaaagtcgctttataaaacccacgcctgttacgagtacaatcacatttttccactgttagagaagtattgcggatttcatgaggataatattcctcagctggaggatgttagccagttcttgcagacctgcacgggctttcggctgcggcctgtggctggactcctttcaagcagagactttcttggcggcctggccttccgcgtgttccattgtactcagtatatccgacacgggtcaaagccaatgtacacacccgaaccagatatttgtcacgaattgctgggccatgtgccactgttctcagataggagctttgctcaattctctcaagaaatcggcctggccagcctaggagcaccagacgaatacattgagaaactggctacaatctactggttcacggtcgagtttgggttgtgtaagcagggcgattccatcaaagcttacggggcagggctgctttcgtctttcggtgaattgcaatattgcctttctgagaaaccaaagctgctacctctggaacttgaaaagaccgctatccaaaactacacggtaacggaatttcaacccctctactacgtggcggagtccttcaatgacgctaaggagaaggtccgcaatttcgcagcaactattccacggcctttctcggtgcggtatgacccgtatacgcagcgcatcgaggtcctagacaatactcaacagctgaaaatactggccgattccattaatagcgagattgggattctgtgctctgcactgcagaagatcaag

SEQ ID NO: 5954 - DNA, 1356 bp, Artificial Sequence
  derived and/or modified sequence
atgagtactgccgtcctggaaaatcccggtctgggccgtaagttgtcagattttggccaggaaacctcctacattgaagacaactgtaaccagaacggtgctattagcctgatatttagcctgaaagaggaagtgggcgcactcgccaaagtattgcgattattcgaagaaaatgacgtaaatctgacccatatcgagagtcgcccatcacgactcaagaaggacgagtacgaattttttactcacctggataagagaagtcttccggctctcacaaacatcatcaagattctgcggcacgacattggggccacggtgcacgagctgtccagagataagaagaaggacacagtcccatggtttcctaggacaatccaggaattagacagattcgccaaccaaatcctaagctatggcgctgagctggacgcggatcaccccggatttaaggatccagtgtatcgggcgcggagaaagcaattcgctgacatagcttacaactatcgccacggccagccaatcccaagagttgaatacatggaggaggagaagaaaacctgggggacggtgttcaagactctcaaatccttgtataaaacacacgcatgttatgagtataatcatatatttcctctgctggagaagtactgtgggttccacgaagataatattccgcagctggaagatgtctctcagtttctacaaacgtgtacgggctttaggctccgaccagttgccgggttgctgagtagccgtgactttctggggggactggcattcagggtattccactgcactcagtacattcgacacggtagtaaacccatgtacacaccagagcccgatatctgccacgagcttcttggccatgtgccacttttctccgatcgtagcttcgctcagtttagtcaggagatcggactcgcttccctgggtgcccctgacgagtatattgaaaagttggcaacaatctactggttcacagttgaatttggcctgtgcaaacaaggggattccatcaaggcatacggcgctggactgctcagcagtttcggggagctgcagtattgtctgagcgaaaagccaaagttattaccacttgagcttgagaagaccgctatccagaactataccgtgaccgagtttcagccactttattatgtggccgaatctttcaatgatgccaaggagaaggttcgcaactttgccgcgaccattcctcgtcccttctcggtcagatatgacccctatactcagcgcatcgaagttctcgacaacacccaacagctaaaaatcttagccgactcaatcaattcagagatcggcattttgtgttcagccttacagaaaatcaag

SEQ ID NO: 5955 - DNA, 1356 bp, Artificial Sequence
  derived and/or modified sequence
atgtcgaccgcggtgctggaaaatccagggcttggaagaaaacttagcgacttcggacaagagacttcatacatcgaggacaactgcaaccagaacggtgcgatctccctcatctttagcctgaaggaggaggtgggagccctggctaaagtcctgcggctgttcgaagagaatgacgtgaatctgactcacatcgagtcgcgcccgtcccggttgaagaaagatgaatacgagttctttacgcatctggacaaaaggtccctgccggcacttaccaatatcatcaagatcctgaggcatgatattggggctaccgtgcatgaattgtccagagacaagaagaaggatactgtcccgtggtttccgagaaccattcaggaactcgaccggttcgctaaccagatcttgtcctacggagccgaactcgacgccgaccacccgggattcaaggacccggtgtaccgcgcacgccggaagcagttcgcggatatagcctacaactatagacacggacaaccaatcccgcgcgtggaatacatggaagaagaaaagaaaacttggggcaccgtattcaagaccctcaaatcgttgtacaagacccacgcctgttatgaatacaatcacatttttccattgttggagaagtactgcggcttccacgaggataacatcccgcaactggaagatgtctcgcagttcctccaaacctgcaccggcttccgactgaggccggtggcaggactgctgtcatcacgcgacttcctcggcggcctggccttccgcgtctttcattgcacgcagtacataagacatggtagcaagccaatgtacactccagagcccgacatctgtcacgagctgctggggcacgtaccactgttctcggatcggtccttcgcgcagttctcacaggaaattggacttgcttctctgggagcccctgacgagtatatcgagaaactcgccacgatctactggttcacggttgagtttggtttgtgcaaacagggtgattcgataaaggcatacggggcgggacttcttagcagctttggggaattgcaatactgcctctcagaaaagcctaagctgctgcctctcgagctggagaaaactgcaatccaaaactacaccgtcaccgaattccaaccattgtattacgtggctgagtcattcaacgacgccaaggaaaaggtgcgcaatttcgccgcaactatccctcgaccgttcagcgtgcggtatgatccctacacccagcgcatcgaggtcttggataacactcagcaactgaagatcctcgcggatagtatcaactcggagatcgggatcctgtgttcggcgctccagaagatcaaa

SEQ ID NO: 5956 - DNA, 1356 bp, Artificial Sequence
  derived and/or modified sequence
atgtcaaccgcggtgcttgagaacccgggactgggtcgcaaactgtcggatttcggacaggaaactagctacatcgaggacaactgcaaccaaaatggtgccatctccctgatcttctccctcaaagaggaggtcggagcgctggcgaaggtgctgagactttttgaggagaatgacgtgaatttgacgcacatcgaatcacggccgagcagactgaagaaggatgaatacgagttcttcacccatttggataagcggagccttcccgccctcaccaacataatcaaaatcctcagacacgacatcggagcaactgtgcatgagctgagccgagacaagaaaaaagataccgtgccgtggttcccgcgtaccattcaggaactggaccggttcgcgaatcagattctgtcgtacggcgcggagctggatgctgatcatccaggcttcaaagacccggtctaccgggcccggcgcaaacaattcgcggacatcgcctacaattaccgccatggacaaccgatcccacgggtggagtacatggaggaggaaaagaaaacctggggaactgtctttaagacgctcaagtcactgtacaagacccacgcctgttacgaatacaaccacatcttccctttgttggagaagtattgcggatttcacgaggacaatattccacaattggaggacgtctcacagtttctgcagacttgtactggctttaggcttcgtccggtcgctggactgctctccagcagagactttcttggaggactcgccttccgagtgttccattgtacccagtacatccggcacggctcgaagccgatgtacactccagaaccggatatctgccacgagctcctgggacatgtgccgctcttctccgaccgctcgttcgcgcagttctcgcaagaaattggacttgcctccttgggcgctccagacgagtacatcgaaaagctggcgactatctactggtttactgttgagtttggactgtgcaagcagggagactccatcaaggcctatggcgctgggctgttgtccagctttggcgagctccaatattgtctgtcggaaaagccgaagctcttgcctctggagctggaaaagaccgccattcagaactacaccgtgaccgaattccagcccctctactacgtcgccgaaagttttaacgacgcgaaggagaaagttagaaatttcgcagcaaccattccgcgcccgttctcggtcagatacgacccttacacgcagcggattgaggtactggataacacccaacagctcaagatccttgccgactccatcaattccgagatcggaatcctgtgctcggccctgcaaaagatcaag

SEQ ID NO: 5957 - DNA, 1356 bp, Artificial Sequence
  derived and/or modified sequence
atgtcaaccgccgtgctggagaacccagggctcgggaggaagctgtctgatttcggtcaggagaccagctatattgaagacaactgcaatcagaatggcgcaatttctcttatattcagtttgaaggaggaggtgggggccctggccaaggtgctgaggttgtttgaggaaaacgatgtcaacctgacccatattgagtcccggccgagccggcttaaaaaggacgagtatgaattttttacccacttagacaaaaggagcctgcctgcactgactaacataattaagatcttaagacacgatatcggagcgacggtgcacgaattgagtcgcgacaagaagaaggatacagtgccttggttccctcgtactatccaggagctagatcggtttgctaatcagatcctgtcctatggggcagagttggacgcagatcaccctggcttcaaagaccccgtgtacagggcccgacggaagcagttcgcagatattgcttataattatcgccatggccagcctattccccgggtcgagtacatggaagaagagaagaagacctggggcacggtttttaaaactctgaaatccttgtacaagacgcacgcttgttatgaatataatcacatatttcctctgcttgagaagtattgtggttttcacgaggataacatcccgcagcttgaggatgttagtcagtttcttcagacctgtactggcttcagattgaggccagtggccggattgctttcaagccgcgacttcctcggtgggttggcttttcgggtgtttcactgtacacaatatattagacacggcagtaagcccatgtacactcctgagcccgacatctgtcacgagctgctggggcatgtgcccctgtttagtgaccggtctttcgcccagtttagccaagagattgggctggcctcacttggcgctccggatgaatacattgagaagctggctactatttattggttcaccgtagaatttggcctttgcaaacaaggagacagcattaaagcctatggggctggcttgcttagttcttttggagaattacagtactgtcttagcgagaagcccaagctcctaccactcgaactggagaagacggctatccagaactataccgtcaccgaattccaaccactctattacgtcgcagagagctttaatgacgccaaggaaaaggtccgcaatttcgccgcaacaattcctcggccgttcagtgtccgttatgatccctatacccagcgaatcgaggtactggacaacacacagcagctgaaaatcttggcagactccatcaactcagagatcgggatactctgttctgctttacagaaaatcaaa

SEQ ID NO: 5958 - DNA, 1356 bp, Artificial Sequence
  derived and/or modified sequence
atgtcaactgctgtactcgaaaatccagggctcgggcgcaaactgtctgacttcggacaggaaacaagttatatcgaagataactgtaatcagaatggagcaatttccctgatattctccctaaaagaggaggtgggggctctcgctaaagtactgcgcttatttgaagaaaacgacgtcaatttaacacacatcgaatcaagaccttcacggctcaaaaaagacgagtacgaattttttacacacctagataaacggtcgctgcctgcactcacaaatataataaaaatactcagacacgatattggagccactgttcacgaactgtcccgcgataaaaaaaaagacacagttccctggtttcctcgcactattcaggaacttgatagattcgccaatcagattctatcctacggagctgagctcgacgctgatcatcccggatttaaagatcctgtctatagggcacggcggaagcagttcgctgatatcgcttacaattaccggcacgggcagcccattccaagggtggaatacatggaagaagagaaaaaaacatgggggacagtttttaaaacactgaaaagtttgtataagacacacgcctgctacgaatacaatcacatttttccactgctggaaaaatattgcggatttcatgaagataacatccctcagctcgaagatgtttcccagtttctccagacttgtactgggtttagacttagacccgttgcagggcttctttcatcaagagatttcttgggaggactcgcatttcgggtgttccattgtacacagtatattcgacacggatcaaaacctatgtatacacctgagccagatatctgtcatgaattgcttggacatgtgcccctgttctcagatagatcctttgctcagttctctcaggagattggactggcctcccttggggctccagatgaatacatagaaaaacttgctactatatactggttcacagtcgagttcggactgtgtaagcagggagattccataaaagcatatggggcaggactgttaagttcctttggggaactgcagtactgtctatccgaaaaacccaaactcttaccactggaactggaaaagactgctatccagaattatacagtcacagaattccagcccctgtattatgttgcggaaagtttcaacgatgctaaagaaaaagtgcggaactttgctgccactattccgcggccctttagtgtgcgatatgatccctatactcagcgcatcgaagtgcttgataacacacagcagctaaagatacttgcagactctattaactctgaaatcggaatcctgtgctctgcactccagaaaataaaa

SEQ ID NO: 5959 - DNA, 1356 bp, Artificial Sequence
  derived and/or modified sequence
atgtcaactgcggtgctcgaaaatccgggtctgggccggaaattgtcggacttcgggcaggaaacctcatacatcgaggataactgcaatcagaatggcgccatcagcctgatcttctccctgaaggaggaggtgggagcattggcaaaagtgctccggttgttcgaagaaaatgacgtcaacctgactcacattgagtcaagaccgagccggctgaaaaaggatgaatacgagtttttcacccacttggacaagcggtcgcttccggctctgactaacatcatcaaaatcctgcgccacgacatcggagccactgtgcatgaactgagccgcgacaagaaaaaggacaccgttccatggttcccacgaacgatccaggaactcgatcggttcgctaaccaaattctctcctacggagccgagctcgacgcagaccatccgggattcaaagatcctgtgtatagagcgcgccgcaagcagttcgcagacatcgcctacaactaccggcatggccagccgatcccgcgcgtggaatacatggaagaggagaaaaagacgtggggtaccgttttcaaaactctgaagtcactgtacaagactcacgcttgttacgagtacaatcatatcttcccactgctcgaaaagtactgcggatttcacgaggacaatatcccccaactcgaagatgtgtcgcaatttctccagacctgtaccggattcagactgaggcctgtggccggactgctcagctccagggacttccttgggggattggcattccgcgtctttcactgcactcaatacatccggcatggatccaagccaatgtacaccccagagcccgatatctgtcatgaactgctcggtcacgtcccgctgttcagtgataggtccttcgcccagttcagccaggaaatcggactcgcgagcctgggagcgccggatgagtacatcgagaagctggcgacgatttactggttcactgtggaattcggcctctgcaagcagggcgacagcatcaaggcatacggagctggattgctgtctagctttggagagctccagtactgtttgagcgagaagcctaagctcctgccgcttgagctcgagaaaaccgcaatccagaactacactgtgactgagtttcaaccattgtactatgtggccgaatccttcaacgatgccaaggaaaaagtgagaaatttcgccgccactatcccgaggccgttttccgtgcgctacgacccgtacacccagaggatcgaggtgctggacaatacgcagcagctgaaaattctggccgactcgatcaatagcgaaatcggaatcctctgctcggctctgcagaagatcaaa

SEQ ID NO: 5960 - DNA, 1356 bp, Artificial Sequence
  derived and/or modified sequence
atgtcaactgcggtcctggaaaatccaggactgggtcgcaaattgagcgattttggccaagagacatcatatatagaggacaactgcaatcaaaacggggcaatttcacttattttcagcttgaaggaggaagtgggtgccctcgcgaaagtcttgcgactattcgaggaaaatgatgtaaatctgacacacatagagtcccgccctagtagattaaagaaagacgagtatgaattcttcacccatctggataaacggagtctaccagccctcacaaatattataaagattctgcgtcatgacatcggtgctaccgttcacgaattgagccgggacaaaaagaaggacaccgtgccctggtttccccgcaccatacaagagttggatcgcttcgcgaatcaaatcctaagttacggcgcggagctagacgcggaccatccaggctttaaggacccggtctatcgtgcgaggcgaaagcagttcgccgatattgcgtataactatcgtcacggtcagccgataccgagggtggaatatatggaagaggagaagaagacctggggcaccgtgtttaaaactttgaagtccctctataagacccacgcgtgctacgaatataatcacatcttcccgttactggagaagtactgcggctttcacgaagacaacatcccgcagctagaggacgtgtcacaattcctccaaacctgcacgggttttcgtctgcgaccagtagccggcctgctgagcagtcgtgatttcttgggtggactggccttccgagtgtttcactgcactcaatatatccgccacggtagcaaacccatgtacacgcctgaacccgacatctgccacgagctactcggccacgtcccactgttttcggatcgcagctttgcgcagttctcacaggagattgggttggcaagtctgggtgcaccggacgagtacatcgagaagctggccacgatctattggttcaccgtggaatttggtctatgcaaacagggcgacagcattaaagcgtacggtgccggactgttgagctcgtttggcgagttgcaatactgcctcagcgagaagccaaaactgttgcctctggagttggagaagaccgccatccagaactacaccgtaaccgaattccagccgttgtattacgtcgcagaaagcttcaacgatgcaaaggagaaagtacggaactttgcggccacaattccacgcccattctctgtacgctatgacccgtacacccagcgcatcgaggttctggataacacccagcaactaaagatactagccgatagtatcaactccgagataggcatcctgtgctccgcattgcagaagattaag

SEQ ID NO: 5961 - DNA, 1356 bp, Artificial Sequence
  derived and/or modified sequence
atgtccacggccgtccttgaaaaccccggcctgggccgcaagttaagcgacttcggtcaagaaacgtcgtatatcgaggataattgtaaccagaacggagctatcagcctgatcttctccttgaaggaggaggtcggtgccttggccaaggtactgcgtctcttcgaagaaaatgacgttaacctcacacacatcgagtcccgcccctcccgtttgaagaaggacgagtacgagtttttcacacacctcgacaagaggagcctgcctgccttgacgaatataatcaaaatcctgcgtcatgacattggagcaaccgtacacgagctcagtcgtgacaagaagaaggacacagttccttggttccctcgaaccattcaagagttggatcgcttcgccaatcagattttgtcttatggcgcagaactcgatgctgaccaccccggcttcaaggatcccgtctaccgtgctcgtcgcaagcaattcgcggatatcgcgtacaactaccgacacggtcagcccatcccccgcgtagagtacatggaggaggagaagaagacctggggaaccgtgttcaagacgctgaagtccctctacaagacgcatgcttgttacgagtataatcacatcttcccgctgctggaaaagtattgcggcttccatgaagataatatccctcagctcgaggatgtctctcagtttcttcaaacgtgtactggctttcgcctccggcccgttgccgggttgctcagctcccgtgacttcctcggcggtctcgccttccgggttttccactgcacccagtacatccgccacggcagcaagcccatgtacacaccggaaccagacatctgccacgaactactgggccatgttcccctgttctccgataggtcattcgcgcagttctcacaggaaatcggcctggcatcgctgggagcacccgacgagtacatcgagaagttggcgaccatttactggttcaccgttgaattcggcctttgcaagcagggggatagcatcaaggcctacggtgctggcctcttgagctcctttggcgaactgcagtactgcctatccgaaaagccgaagctgctgcctctggaactcgagaagaccgctatccaaaactatacagttacggagtttcagcccttgtactacgtggccgagtccttcaacgacgcaaaggagaaagtgcgtaactttgcggctaccattcctcgtccgttttctgtccgttacgacccctacacccagcgtatcgaggttcttgataacactcagcagctgaagattctggccgactctattaattccgagattggcatcctttgtagtgcccttcagaagatcaag

SEQ ID NO: 5962 - DNA, 1356 bp, Artificial Sequence
  derived and/or modified sequence
atgagcaccgcagttcttgaaaaccctggtttgggcaggaagctgtcggattttgggcaggaaacctcatatatcgaggacaactgcaaccaaaacggggcaatatcccttatcttttcattgaaggaggaagtgggcgccctcgctaaagttctgagactgttcgaagagaatgatgtcaatctgacacacatcgagtcacggcccagtcgtctcaaaaaggacgagtatgagtttttcacccacctggacaaaaggagtctgccagcattgacgaacataatcaagatcttacgacacgatataggcgccacagttcacgagctgtctcgggataaaaaaaaggatacagttccttggtttcctagaacaatccaagagcttgaccggttcgctaaccagatcctctcatacggcgctgagctggacgccgaccatcccggtttcaaagacccagtgtatagagcccggcgcaaacagttcgcggatatcgcttacaactatagacatggacagccaatccccagagtggagtacatggaagaagaaaagaagacctgggggacagtttttaaaacattgaagagcctgtacaagacacacgcttgctacgaatataaccatatattccctctactcgaaaaatactgtgggttccatgaagataatatacctcaactggaggatgtcagccagttcctccagacttgtactgggtttaggctgaggcccgtggcgggcctgctctcctcaagagactttcttggaggactcgcctttcgtgtgttccattgcacccaatatattagacacggcagtaagcccatgtatactcctgagccagacatttgtcatgagctgctggggcatgtgcccctgttctccgatagatctttcgcccaattcagtcaggagatcggattggcctctctgggggctcccgatgaatacattgagaagctggccaccatatattggtttacagtggagttcgggctatgcaagcagggcgactctatcaaagcctatggcgccgggctgttgtcatcctttggcgaacttcagtactgcctctccgagaagccaaagttgctgccgctggaactggaaaaaactgctatccagaattataccgtgaccgaattccagcccctttactacgtagccgaaagcttcaatgacgcgaaggaaaaggtgaggaatttcgcagcaacaattccacgacctttctccgtcaggtatgacccttacacgcaaaggatcgaagtgctggataatacacagcagttgaagatcttagctgattcgatcaattccgagatcgggattctgtgctctgcactgcagaaaatcaag

SEQ ID NO: 5963 - DNA, 1356 bp, Artificial Sequence
  derived and/or modified sequence
atgtccaccgccgtgttagagaacccgggtctggggcgaaagctgtctgatttcgggcaggaaacatcatacattgaggacaattgtaaccagaatggcgccatctcactaattttctccctcaaggaagaggtcggggcgcttgccaaagtgctgcgcctgttcgaggaaaatgatgtcaacctgacccacattgagtctagaccaagtcgattgaaaaaggatgagtatgagttttttacacaccttgacaagaggtcactaccggctcttaccaatattattaaaatcctgcggcatgatattggcgctaccgtgcacgagctgtcgagagacaaaaaaaaggacacagtgccgtggtttccccggaccatacaggagttggaccgctttgctaatcaaatattgtcttacggcgctgagctcgatgccgaccacccagggtttaaagatcctgtttacagagctaggagaaagcaattcgctgacatagcctataattatagacatggccaacccatcccacgtgtggagtatatggaggaagagaagaagacttggggcaccgtgttcaagaccctgaaatctttatacaaaacacacgcctgctacgaatataatcacattttccctttgctagaaaaatattgcggctttcatgaagataacatccctcaattagaggatgttagtcagttcttgcaaacttgtaccggattccgcctgagacctgtggctgggctactctcaagccgggacttcctcggtggactggcgtttcgtgtctttcattgcacccaatatattcggcacggctccaagcccatgtatacccctgaacccgacatctgtcacgagctgctgggccatgtgcctctcttcagcgatagaagttttgctcaattctcccaggagataggcctggcgtcactgggggcccctgacgagtatatcgagaagctcgcgactatttattggtttaccgtggaattcggcttgtgcaaacagggcgatagtatcaaagcctatggagctgggctcttatcttccttcggcgagttgcaatactgcctctccgagaagcctaagttgctgcccttggaacttgaaaagacagccatacagaactatactgtaaccgaatttcaacctctttattatgtggccgagtcatttaacgatgccaaagagaaagtgaggaacttcgccgctaccattcccagaccgttctccgtgagatatgatccctacactcagaggattgaggttctagacaatacccagcagcttaagatcctcgccgactcaatcaactcagagatcggcatcttatgtagtgcgttgcagaagataaag

SEQ ID NO: 5964 - DNA, 1356 bp, Artificial Sequence
  derived and/or modified sequence
atgagcactgcagttttagagaatccaggacttggaagaaagttatccgacttcggtcaagagacatcatatatcgaagacaactgtaaccagaatggagctatttcgctgattttttctctcaaagaggaagtgggtgccctagcaaaggtgctccgactgtttgaggagaacgatgttaatctcacacacatagagagccgaccatcaagacttaaaaaagatgaatacgagttctttacgcatctggacaaacgtagtcttccagcgcttacaaatataataaagattcttagacacgatatcggagctacagtacacgagctcagccgagataagaagaaagatactgttccatggtttccgcggacaatccaagaattggaccgatttgcaaaccaaatattgtcttacggggctgaactcgatgctgaccaccctggttttaaggatccagtttaccgggctagacgtaagcaattcgcggatattgcttataattatcgacatggtcaaccgattccacgagttgaatacatggaggaggaaaaaaagacgtgggggacggtgttcaaaaccttaaaatccctttataaaacgcacgcttgctatgaatacaatcatatattcccacttttagaaaaatattgcggattccacgaagacaatattccacaactagaagacgtgtcccagttcctccagacctgcacgggatttagactcagaccagtggccggattgctttcttcgagagacttcctgggtggacttgcttttcgcgtctttcattgcacccaatacataaggcatggttccaaaccaatgtacacccccgaaccggacatttgccatgaacttttagggcatgtgccacttttttctgaccggtcctttgcgcaattttcacaggagatcggacttgcatcattgggagcgcccgatgaatacattgaaaagttggccacaatttattggttcacagtcgaattcgggctttgcaaacaaggagattcaattaaagcatatggagccggccttttgtcgagctttggagagttgcaatattgcctttcagaaaagccgaaattattgcctctggaactagaaaagactgctatccaaaattatactgtgacagaatttcagccattgtattatgtggctgagtcttttaatgatgccaaggaaaaggtgagaaattttgcagctactatcccaaggccattcagcgtccgatacgatccatacactcagcgcattgaggtgttagataacactcaacagctaaaaatccttgctgattccattaacagtgaaatcgggatcctctgctcggcattgcaaaaaattaaa

SEQ ID NO: 5965 - DNA, 1356 bp, Artificial Sequence
  derived and/or modified sequence
atgtccacggctgtgctggagaacccggggttgggaagaaagctctcggacttcgggcaggagacgtcctacatagaggacaattgcaaccaaaacggggccatctcactgatcttctcgctcaaggaagaagtgggagcgctggctaaggtgctccgcctctttgaagaaaacgatgtcaatctgactcacattgagtcgcggccaagccgactcaaaaaggatgagtacgagttcttcacccatcttgacaaaagaagcctcccagcactgactaacatcattaagatcctccggcacgatatcggcgcaactgttcacgaattgtcgcgggacaagaagaaagacactgtgccgtggttcccacgcaccattcaggagctggataggttcgccaaccaaatcctgtcttacggtgccgagctggacgcagaccacccaggattcaaagacccagtctacagagcgcgcaggaaacaattcgcggacatcgcgtacaactacaggcatggacaaccgattccgcgcgtggaatacatggaggaagagaaaaagacttggggtactgtgtttaagactcttaagtcgctgtacaagactcacgcgtgctacgaatacaatcacatctttcctttgctggaaaagtactgcggatttcatgaggacaacatcccgcagttggaagatgtgtcgcaattcctgcagacttgcactgggttccgcctccgcccagtcgcgggcttgctgtcgtcccgggacttcctgggaggtctggctttccgggtttttcattgcacccagtacattcgccatgggtcgaagccgatgtacactcctgaacccgacatctgccacgagttgctgggtcatgtgccactcttctctgatcgctcatttgcacagtttagccaggagatcggactggcgtccctgggcgccccagacgaatacatcgaaaaactggccacgatttactggttcactgtggaattcggactgtgtaagcaaggagacagcatcaaggcctacggagccgggcttctttcctcgttcggtgaactgcagtattgtctgagcgaaaagccgaagctgcttccccttgagctggaaaagaccgcgatccagaattacactgtgacggaatttcagccgctctactacgtggctgagtcgtttaacgacgccaaagaaaaggtgaggaattttgcggctacgatccctcgccccttttcggtccggtatgatccatacactcaaaggatcgaggtgctggacaacactcagcagcttaagatcctcgccgattccatcaactcggagatcggaatcctctgctcggccctgcaaaagatcaag

SEQ ID NO: 5966 - DNA, 1356 bp, Artificial Sequence
  derived and/or modified sequence
atgtctacggctgtgctcgaaaacccagggttgggccgaaaattgtcggattttgggcaagaaacctcatacatcgaggacaattgtaatcagaacggagccatttcgttaatattttcgctgaaggaggaggttggagcgttggccaaggtgcttcggctattcgaagagaacgacgtcaatctgacacatatcgaaagtagaccctcacggctgaagaaagatgaatacgaattcttcactcatctcgataaacgatctttaccagccctgactaacataatcaaaattctgcgacatgacatcggcgccaccgtgcacgaactcagtcgagacaagaaaaaagatacagtcccttggtttccacggacaattcaagagctcgatcgatttgccaaccagatcctgagctacggtgccgagcttgacgctgaccaccctggttttaaggatcccgtctaccgggcgcgccgcaaacaatttgcagatattgcttacaactaccggcacgggcagccaattccaagagtcgagtacatggaagaggaaaagaaaacctggggcacagtctttaaaacattgaaatccctgtataaaacacacgcgtgttatgaatacaatcacatctttccactgctggaaaaatattgcggttttcacgaggacaacattccccagctggaggatgtttctcagtttctgcagacctgcaccgggttccgtctgcggccggtggccggcctactcagttcacgggacttcctcggcgggctcgctttcagggtgttccattgtactcagtatataagacatggatccaagcctatgtatacccccgagcccgatatatgtcacgaactgctgggccatgttccactgttcagcgaccgctcttttgcccagtttagtcaagagataggcctggcctctctgggggccccagacgagtacatcgagaaactcgccaccatatactggttcaccgtagaatttgggttatgcaaacaaggagattcaatcaaggcttatggcgcgggactcctctcttcctttggcgagctgcaatattgtctgtccgaaaagccaaagcttctgcctttagaattggaaaaaacagcaatccaaaactataccgtcaccgagtttcaaccgttatactatgtggcagagagtttcaatgacgctaaggaaaaggtgaggaattttgctgccaccataccacgcccgttctccgtgagatatgacccatacacgcaacgaatcgaggtgttggataacactcagcagctgaaaatcttggccgactccattaatagcgagattggtatcctatgctcggccctgcagaaaattaag

SEQ ID NO: 5967 - DNA, 1356 bp, Artificial Sequence
  derived and/or modified sequence
atgagtacagctgtccttgaaaaccctggtctgggccggaaactgagtgattttgggcaagaaacttcgtacattgaggataattgtaaccagaatggagccatcagcttgattttctccctgaaggaggaggttggggccttggccaaggtgttgcgactgttcgaagagaacgatgtgaacctgacccacattgaatcccgaccttcaagactcaaaaaggacgagtacgagtttttcacccatctggataagcgatctctgcccgcgctgaccaacatcataaagattctacgacacgacatcggggccactgtgcatgagttgtcaagggacaaaaaaaaggatacagtgccatggtttccaagaacgatacaggaactggacagattcgcaaatcagatcctaagttacggggctgagctagatgcagatcacccggggtttaaagaccccgtgtaccgtgcaagaaggaagcagtttgccgatatcgcttataattaccgccatgggcagcctatcccacgggtggaatacatggaggaggagaagaagacttggggaactgtgtttaagacactgaagagcttatacaaaactcacgcctgttacgagtacaatcatatattccccttgctggaaaaatactgtggattccacgaggacaatatacctcagctggaggacgtctcacagttcctacagacctgcacagggttccgattgcgtcccgtggctgggcttctatctagcagagactttctgggtggtctggcattcagagtgttccactgcactcagtacattaggcacggatccaaaccgatgtatacaccagaaccagacatatgtcatgaactgctcggacacgtgcctctgttctccgatcggagcttcgcgcagttctctcaagagattggtctggcatcgctgggtgcccccgacgaatacatcgagaaactcgccacgatctattggtttaccgtggagtttggcctgtgcaagcaaggcgatagtatcaaggcctacggcgccggcctgctctccagtttcggcgaactgcagtactgcctgtctgaaaaacccaagctgctaccactagagcttgaaaagaccgccattcagaactacaccgtgacagagttccagcctctatattatgtggctgaatctttcaatgacgctaaagaaaaggtcagaaactttgccgccaccattccaaggccattcagtgttcggtacgacccctatactcaacgaatagaggttttagataacacacagcaactgaaaatcttagccgatagtataaactccgagattgggatcctgtgttccgctctgcaaaaaataaag

SEQ ID NO: 5968 - DNA, 1356 bp, Artificial Sequence
  derived and/or modified sequence
atgtcgacggcggttctagaaaatccgggtctaggtcgaaaattatcggattttggtcaagaaacgtcgtatatagaagataattgtaatcaaaatggtgcgatatcgctaatattttcgttaaaagaagaagttggtgcgttagcgaaagtactacgattatttgaagaaaatgatgtaaatctaacgcatatagaatcgcgtccgtcgcgattaaaaaaagatgaatatgaattttttacgcatttagataaacgatcgttaccggcgctaacgaatataataaaaatactacgtcatgatataggtgcgacggtacatgaactatcgcgagataaaaaaaaagatacggtaccgtggtttccgcgtacgatacaagaattagatcgttttgcgaatcaaatattatcgtatggtgcggaactagatgcggatcatccgggttttaaagatccggtatatcgtgcgcgtcgaaaacaatttgcggatatagcgtataattatcgtcatggtcaaccgataccgcgtgtagaatatatggaagaagaaaaaaaaacgtggggtacggtatttaaaacgttaaaatcgttatataaaacgcatgcgtgttatgaatataatcatatatttccgctattagaaaaatattgtggttttcatgaagataatataccgcaactagaagatgtatcgcaatttctacaaacgtgtacgggttttcgtttacgaccggttgcgggtttattatcgtcgcgagattttctaggtggtctagcgtttcgtgtatttcattgtacgcaatatatacgtcatggttcgaaaccgatgtatacgccggaaccggatatatgtcatgaattattaggtcatgtaccgttattttcggatcgttcgtttgcgcaattttcgcaagaaataggtttagcgtcgttaggtgcgccggatgaatatatagaaaaactagcgacgatatattggtttacggtagaatttggtttatgtaaacaaggtgattcgataaaagcgtatggtgcgggtctattatcgtcgtttggtgaattacaatattgtttatcggaaaaaccgaaactattaccgttagaactagaaaaaacggcgatacaaaattatacggtaacggaatttcaaccgctatattatgtagcggaatcgtttaatgatgcgaaagaaaaagtacgaaattttgcggcgacgataccgcgtccgttttcggtacgatatgatccgtatacgcaacgtatagaagtattagataatacgcaacaactaaaaatattagcggattcgataaattcggaaataggtatattatgttcggcgctacaaaaaataaaa

SEQ ID NO: 5969 - DNA, 1356 bp, Artificial Sequence
  derived and/or modified sequence
atgtccaccgccgtgctggagaatcctggactgggacggaaactttccgatttcggacaggaaaccagctacatcgaggacaactgcaaccagaacggcgcgatctcgctgatcttctctctcaaggaagaagtcggcgccctcgccaaagtgttgcgcctgtttgaagagaatgatgtgaacctgactcacatcgaatctcgtccttcccgcctgaaaaaggacgaatatgaattcttcacccacctggataagcgctcgctgccggcgctgactaacatcatcaagatcctcagacatgacatcggagcgaccgtgcatgagctctcacgcgacaagaagaaagacacggtgccgtggttcccgagaactatccaagaactggacagattcgccaatcaaatcctgtcctacggggccgaactcgatgcggaccaccctggattcaaggatcccgtctaccgcgcacggcgcaagcagttcgcagacatcgcatacaattaccggcatggccaaccgatcccccgggtcgagtacatggaggaagagaaaaagacctggggtaccgtgtttaagaccttgaagtccctgtacaagacgcatgcgtgctacgagtacaatcacatctttccactgcttgagaagtactgcggatttcacgaagataacatcccacaactggaggacgtgtcccaattccttcagacctgcaccggatttcgacttagacccgtcgctggactgttgtcgagccgcgactttctgggaggactcgccttccgcgtgtttcactgcactcagtacatcagacacggaagcaaacctatgtacacccctgaacctgacatctgccatgaactgctcggtcatgtcccgctgttttctgaccggtcatttgcccagttttcgcaagagatcggactcgctagcctgggtgcccctgacgagtacatagaaaaactcgcgaccatctattggttcactgtcgagttcgggttgtgtaagcagggagacagcatcaaggcctacggagcaggactgctgtcctcgttcggagaactccagtactgcctgtcggagaagcccaagctcctgccgcttgaactggaaaaaaccgctattcagaactacactgtgaccgagttccagcctctctactacgttgccgaatcattcaatgatgcaaaggagaaagtccggaacttcgcggcaactattcctcgcccattctcagtgcggtacgatccatacacgcagaggatcgaagtgttggataatacccagcagctgaaaatcctggcggactcgatcaattccgaaatcggcatcctctgctctgcattgcaaaagatcaag

SEQ ID NO: 5970 - DNA, 1356 bp, Artificial Sequence
  derived and/or modified sequence
atgtcgacggccgtgctggaaaatccgggccttgggagaaaactcagcgacttcggtcaagaaacttcctacatcgaggacaactgcaaccagaatggagcaatttcgctgatcttttctctcaaggaagaagtgggcgcactggcaaaagtgctgcggctttttgaagagaacgacgtcaacctcacccatattgagtcacgcccatccaggctgaagaaagatgaatatgaattctttacgcatctggataaacgaagcctccccgcgcttactaacatcatcaaaatactccgccatgatataggagcaaccgtgcacgaactgagccgggataagaaaaaggatactgtcccgtggttcccaagaaccatccaggagctggatcggtttgcaaatcagatcctttcatacggtgccgaacttgatgcagaccatcctggctttaaggacccggtgtacagggcaagacgcaaacaattcgcagatattgcatacaattatcgacacggtcagccgatacccagagtggaatacatggaagaggagaaaaagacctggggaaccgtgttcaaaacccttaagtcgctctacaagacccacgcctgttatgagtataatcatatctttccacttcttgagaaatactgtggatttcatgaagataacattccccagctcgaagatgtgtcccaatttcttcaaacctgtactggtttccgccttcgaccagtcgcgggtctgctcagctctcgggatttccttgggggtctggcctttagagtgttccactgcactcagtacatcaggcacggatccaagccaatgtacactcctgagccggacatatgccatgaacttctgggtcatgttccattgtttagcgatcgttcttttgcacaattttcgcaggaaattggactcgcctcactcggggccccagatgagtacatcgagaaactggccaccatctactggttcactgtcgagttcgggctttgtaagcagggcgattccattaaggcatacggagcaggtttgttgtccagctttggcgaactgcagtactgcctgtcggaaaagccgaagctgcttcctcttgaactggaaaagacggcgatacagaattacacggtgaccgaatttcaaccactttactacgtggcggaatcctttaacgatgcgaaagagaaggtgcgcaatttcgcagccaccatccctcggccgtttagcgtccgctacgatccatacacgcaaagaatagaagttctcgataacactcagcaacttaagatcctggcagactcaattaactccgaaattggtatcttgtgctccgcactgcaaaagattaaa

SEQ ID NO: 5971 - DNA, 1356 bp, Artificial Sequence
  derived and/or modified sequence
atgtcgaccgccgtgcttgaaaaccccggactgggtcgcaagttgagcgattttggacaagaaacttcgtacatcgaggacaattgtaaccagaatggcgccatctccctcatattcagcctcaaagaggaagtgggggcccttgccaaggtgcttcgcctgttcgaggagaacgatgtgaaccttacccatatcgagtcgcgtccgtcacgacttaagaaggacgaatacgagttctttacgcacctggataagcgttcgctgccagcactcaccaacatcatcaaaattctgcggcatgatataggcgccaccgtccacgaactgtcgcgggataagaaaaaggacactgtgccatggttcccccgcactattcaagagttggaccgctttgcaaaccagatcctgagctatggagccgaacttgacgctgaccaccccgggtttaaagaccctgtgtaccgcgctcggagaaagcaatttgccgacattgcctacaattaccgtcatggacagccaattcctagggtggaatacatggaggaagagaaaaagacgtggggcaccgtgttcaagactttgaaatcgctttacaaaactcacgcatgttatgaatacaaccatatcttccctctcctggagaaatactgtggcttccatgaagataacattcctcaactggaagatgtctcgcagttcttgcagacttgtaccggttttcgtttgaggccagttgcaggcctgcttagctcccgagatttcctgggaggtcttgcatttagagtctttcactgcactcaatacattagacatggatcgaagcccatgtacaccccagaaccagacatctgccatgaacttctggggcatgtgcctcttttctctgatagatcgtttgcacaattctcgcaggaaattggcctggcatctctgggggccccggacgaatacattgaaaaactggctacgatctactggtttaccgtcgaatttgggctttgcaagcaaggcgattccattaaggcatacggggcggggcttctgtccagcttcggagagctccaatactgccttagcgagaaacctaagctccttccactcgaactggaaaagaccgcaattcaaaactacaccgtgacggaatttcagcctctgtactatgttgctgagtcatttaacgatgcaaaggaaaaggtccggaattttgccgcgacgattccaaggcctttttcggtccgttacgatccttacacccaacggatagaagttttggataacacccaacagcttaagatattggccgattccatcaatagcgagattggaattttgtgtagtgcactgcaaaagatcaag

SEQ ID NO: 5972 - DNA, 1356 bp, Artificial Sequence
  derived and/or modified sequence
atgtccaccgctgtgctggagaaccctgggttgggtcggaagctgtcggacttcggccaagaaacctcctacatcgaggacaactgcaatcaaaacggtgcgatttcgctgatcttctccctgaaggaagaagtgggagctctggcgaaggtcctgcggctctttgaggagaacgacgtcaacctcacccacatcgaatcgcgtccatcacgcctgaaaaaagatgagtatgagttctttactcatctggacaaaagatcgctgcctgcgctcaccaacatcatcaaaatcttgaggcacgacatcggtgcgaccgtgcatgaactgtcccgggataagaagaaagatactgtgccctggttccccagaaccatccaggaactggaccgcttcgctaaccaaatcctgtcatacggcgccgaactggatgccgaccacccgggtttcaaggatcctgtgtaccgcgcccgcagaaagcaattcgcggacatcgcatacaactaccgccacgggcaaccgattcccagagttgagtacatggaagaagagaagaaaacctggggcaccgtgtttaagacgctgaagtccctgtacaaaacccatgcctgttacgaatacaaccacattttcccactcctcgagaagtactgtggattccatgaagataacatccctcagctggaagatgtctcacagtttctgcagacttgcactggattccgcctcagaccggtcgccggcctgctctcgtcgcgggacttcctgggaggcctcgcgttcagagtgttccactgcacccaatacatcagacacggatcaaaaccgatgtacaccccagagcctgatatatgccatgaacttctgggacacgtcccgctgttctcagataggtcgtttgctcagttctctcaagagatcgggctggcctcgctgggagctcctgacgagtacatcgaaaagctcgcaactatttactggttcaccgtggagtttggcttgtgcaagcaaggcgattcgatcaaggcctacggcgccggacttctgtcctccttcggcgaactccaatactgtctgtcggagaaaccgaagctgctccctctggaactcgaaaagaccgccatccagaactacactgtgaccgaattccaacccctctattacgtcgcggagtccttcaacgacgcaaaggaaaaggtgcgcaatttcgcggcaaccatccccagaccgttttccgtgcggtacgacccctatactcagcggattgaggtgcttgataacacccagcagctgaagattctggccgactccatcaacagcgagatcggaatcctgtgctctgcactgcagaagatcaag

SEQ ID NO: 5973 - DNA, 1356 bp, Artificial Sequence
  derived and/or modified sequence
atgtcgactgctgtgctggagaatcccggtctgggtcgcaagctcagcgacttcgggcaggaaacctcatacatcgaggacaactgtaatcagaatggagcgatcagccttatcttcagcctcaaggaggaggtgggagccctggcgaaagtgcttaggctgttcgaggaaaatgacgtgaacctcactcacatcgagagccgcccgtcccgcctgaagaaagatgaatacgagtttttcacccacctcgataagcggtcactgccggccctgaccaatatcatcaaaattctgcgccatgacattggcgccaccgtgcacgaactgtcccgtgacaagaagaaggataccgtcccgtggttcccaagaaccatccaggaactggaccggtttgcgaatcaaatcttgtcctacggagccgagctggacgctgaccacccgggttttaaggatccggtataccgcgctagacgcaaacagttcgcggacatcgcatacaactaccgccatgggcagccgatccctcgggtcgagtacatggaagaggaaaagaaaacgtggggaactgtctttaagactttgaagtcactgtacaaaacgcatgcctgctacgaatacaaccatatcttcccgctcttggagaagtactgcggatttcacgaggataacatacctcaactggaggacgtgtcgcaattcctgcagacttgtactggcttccgccttagaccggtggcgggactcctgtcctcgcgggactttctcgggggcctcgcgttccgcgtgttccattgcacgcagtacatcagacatggatccaaaccgatgtacactccagagccggatatctgccatgagttgctgggccatgtgcctctgttcagcgaccgcagctttgcccagttcagccaggaaattggtctggcctccttgggagctcctgatgagtatatcgaaaagctggcaactatctactggttcacggtggagttcggactctgcaagcaaggtgactcgatcaaggcctacggcgcgggactgctctcgtccttcggcgagctgcagtactgcctctcggaaaaacctaaactgcttcccctggaactggaaaagaccgcaatccagaattacacggttacggaatttcagccactctactacgtggcagaatcgttcaacgatgcaaaggaaaaggtgaggaattttgccgccaccatcccgcgtccgttttccgtgcggtacgatccttacacccagcgcatcgaagtgctggacaacacccagcagctgaaaatcttggccgattccatcaacagcgaaatcggcatcctctgcagcgccctgcagaagatcaaa

SEQ ID NO: 5974 - DNA, 1356 bp, Artificial Sequence
  derived and/or modified sequence
atgtccactgcagttctggagaatcccggcctggggcggaagctgtctgacttcggtcaggaaacttcatatatcgaagataattgcaaccagaacggagccataagcctgatcttcagcctgaaggaggaggtcggtgcacttgctaaggttctgcgacttttcgaggagaacgatgttaacttgacccatatagagtctcggccctcccggctgaaaaaggatgaatatgagtttttcacgcacctggataaacgcagtctgcccgctttgacaaacattatcaagattctcaggcatgatatcggggcgacggtgcatgaattgtcccgggataaaaagaaggataccgtcccgtggttccccaggacaattcaggagttggataggtttgctaaccagatcctctcctacggcgcagagcttgacgcagaccaccctgggtttaaggaccctgtttaccgagcacgcagaaagcagttcgccgacatagcttacaactatagacatggacagcctatccctagggttgaatacatggaggaggagaagaaaacatgggggacagtttttaaaacacttaaaagcctctacaaaacgcacgcgtgttacgaatacaatcacatttttccacttctggagaagtattgcggattccatgaagacaatatcccgcagctcgaggacgtctcacagttcctgcaaacctgcacgggattcagactgagacccgtggcaggcctgctatcatcacgggatttcctgggcgggcttgccttccgcgtctttcactgcacacagtacatccgccacggatcaaaacctatgtatacgccagagcctgatatctgccatgagttgctcgggcacgtgcctctgttctcggaccgcagtttcgcccaattctctcaggaaattggcctagcttcacttggggctccggacgaatatattgaaaagctggcaactatatactggttcactgtagagtttgggctttgcaaacaaggcgatagcattaaagcctatggcgctggccttttatctagtttcggggaactccaatactgtctgagtgagaagcccaagctgcttcctttagaactggagaagacagcaatccagaactatacagtcaccgagttccagcctttgtattacgtggcggagtccttcaacgatgctaaggagaaagtgaggaatttcgccgccactattccaaggcccttttcagtccgctacgacccctacactcaaagaattgaggtcctggacaatacccagcagcttaagatattggctgactcaatcaacagcgagatcggaatcctctgctctgccctgcagaagatcaaa

SEQ ID NO: 5975 - DNA, 1356 bp, Artificial Sequence
  derived and/or modified sequence
atgtcgaccgccgtgctggagaaccccggactcggacggaagctgtccgacttcgggcaggagacgagctacattgaggacaactgtaatcagaacggggccatctcccttatcttttcactgaaggaggaggtcggggcactggccaaggtgctgcgtttgttcgaggagaacgatgtgaatcttactcacatcgagtcgcggccgagcaggctcaagaaggatgaatacgagtttttcacccacttggataagagatccctgcccgcgctgaccaatatcatcaaaatcctgcgccatgatatcggagcgactgtgcacgaactgtcgcgggacaagaagaaagataccgtcccgtggttcccacggactatccaggagttggaccgcttcgcgaatcaaattctgtcctacggcgcagagctggacgccgaccatcctggcttcaaggacccagtgtaccgcgcacggcgcaaacagtttgccgacatcgcctacaactatcgccatggacagccgatacccagagtggaatacatggaagaagagaagaaaacgtggggcacggtattcaagaccttgaagtccttgtacaagacccacgcgtgctacgagtacaatcatatctttccgctgctcgagaagtactgcggatttcacgaggacaatattccgcaactggaggacgtgagccaattcctccaaacctgtactggctttcgccttaggccggtggccggcctgctcagctcaagagatttcctgggcggcctggccttccgggttttccactgcactcaatacatcagacatggatccaagccaatgtacaccccggagcccgatatctgccacgaactgctgggacatgtgccgctcttctcagatcgctcattcgcccaattctcccaagaaatcgggttggcctcgctgggtgcacctgatgagtacatcgaaaaactcgctaccatctattggttcacggtggaattcgggctctgcaagcaaggggactcaattaaggcgtacggagccggcttgctgtcgtcctttggcgaactgcagtactgcttgtcggaaaagcctaagctgcttcctctggaactcgaaaagaccgccattcagaattacaccgttacggaattccagccgctgtactacgtcgctgaatcgtttaatgacgccaaggagaaagtgaggaatttcgccgcaacgatcccacggccgttcagcgtgcgatacgatccttatacgcagcgcatcgaagtcctggacaacacccagcagcttaagatcctggcggacagcatcaacagcgagatcggaatcttgtgctccgcactccaaaagatcaaa

SEQ ID NO: 5976 - DNA, 1356 bp, Artificial Sequence
  derived and/or modified sequence
atgagcaccgctgtgttggagaatcctggactggggaggaagctcagcgacttcggtcaagaaacttcgtacatcgaggacaactgtaatcaaaacggagcaatttcgcttatcttctctctgaaggaggaagtcggagccctggcaaaagtgctgagattgttcgaagagaatgatgtcaacttgacgcatatagaatcgcggccttcgagactcaagaaggacgaatacgagttcttcacccatctcgacaagcgctcgcttccggcccttaccaacatcatcaaaatcctccgccatgatatcggagccaccgtgcatgaactgtcacgggacaagaaaaaggacactgtgccctggtttccccgcactattcaggagcttgaccggttcgctaaccagatcctgtcgtacggtgccgaactggatgccgatcacccaggcttcaaagatccagtttatagggcaaggcgcaaacagttcgcagacatagcgtacaattaccgacatggccaaccaatcccaagagtggaatacatggaggaggagaaaaagacttggggaacggtctttaagactttgaaaagcctgtacaagactcatgcttgctacgagtacaaccatatcttccctcttctcgaaaagtactgcgggtttcacgaggataacatcccacaattggaagatgtgtcacagttcctccagacgtgtaccggctttcggctcaggccggtcgcagggcttctgtcctcacgggacttccttggaggactggcgttcagggtgttccactgcacccagtacatccggcacggatccaaaccgatgtacactccggagccggatatctgccacgaactcctggggcacgtgcctcttttcagcgacaggtcattcgcgcaattttcccaagaaatcggactcgcgagcctgggcgcccctgacgaatacatcgaaaaactggccaccatatactggttcaccgtggaattcggcctgtgcaagcaaggagatagcatcaaggcgtatggcgccggactgctgtcgagctttggagagctgcaatactgcctctccgaaaagccgaagctgctgccgctcgaactcgaaaagactgccatccagaactacactgtcaccgaattccaaccgctgtattacgtggcagaatcctttaatgacgcgaaggagaaggtgcggaactttgctgctaccatccctcggccattctccgtccgctacgacccctacactcaacgcattgaagttctcgataacacccagcagctcaagatcctggcggactccatcaactcagagatcggcattctgtgcagcgccctccaaaagattaaa

SEQ ID NO: 5977 - DNA, 1356 bp, Artificial Sequence
  derived and/or modified sequence
atgtctaccgccgtgctggagaaccctggactcggacgaaaactttcggactttggacaggagacttcgtatattgaagataattgtaaccagaacggtgctatttcgctgattttctctctgaaggaggaagtcggggcactggccaaagtccttcggctttttgaagagaacgatgtgaatcttacccatatcgaatcgaggccttccagattgaagaaggatgaatacgaattcttcacgcacttggacaagaggtcccttcctgcgctcactaatatcataaagattcttcgccatgatattggcgctactgttcatgaattgtcgagagataagaaaaaagatactgtgccatggtttccacgtacgatacaagagctcgatcgctttgcaaaccagattctttcctatggcgcggaactcgatgccgaccaccctggatttaaggaccccgtgtaccgagcgagacggaagcaatttgctgacatcgcctacaactaccgacatggtcaaccaatcccgcgggtggagtacatggaagaagaaaagaaaacctggggcaccgtgtttaagactctcaagtctctgtacaaaacgcatgcatgttacgaatacaatcacattttcccacttctcgagaaatactgcgggttccatgaagataacatacctcagctggaagatgtgtcccaatttcttcagacctgcaccggctttagactgaggcctgtggctggactcctctcctcaagagatttcctgggaggcctggcttttcgggtatttcactgcactcaatacattcgccacggcagcaagcccatgtacacgcccgagcctgatatctgccacgagttgctcggccatgtacctctgttttcagatcgctcgttcgcacaattttcgcaagaaatagggctggcgtcactgggagccccagacgagtacattgaaaagctcgcaactatttactggtttactgtggaatttggtctgtgtaagcaaggtgatagcattaaggcatacggagcaggacttttgtccagctttggtgagctgcagtactgtctttcggagaaaccaaaactccttcccttggagcttgagaaaactgcaattcaaaactacaccgttaccgaatttcagcctctgtactacgtcgccgaatccttcaatgatgcaaaggaaaaggtgaggaacttcgccgccactattcctagaccctttagcgtccggtacgacccatacacccagaggatcgaagttcttgacaatacgcaacaactcaagatccttgcagattcaatcaacagcgagatcggaatcctgtgttcagcacttcagaagattaaa

SEQ ID NO: 5978 - DNA, 1356 bp, Artificial Sequence
  derived and/or modified sequence
atgagtacagcagtcctggagaatcccgggctggggcggaaactgtccgactttgggcaggaaactagctacatcgaggacaattgcaatcagaatggagccatctcgttgatcttcagtctcaaggaggaagtcggcgccttggcaaaggtgctgcgcttattcgaggagaacgacgtcaacctcacccatatcgagtcccgcccttccagactcaaaaaggatgagtatgagttttttactcatcttgataagaggagtctgcccgcactgacaaacataatcaaaattctgcggcacgatatcggggccaccgtccacgaactctcacgggacaagaaaaaggataccgtcccatggtttcctcgcacaatccaagaactggacagattcgcaaatcagattctctcatatggggcagagctagacgctgatcatcctgggtttaaagacccagtatatagggcgaggcgcaagcaattcgcagatatagcctataactatcgacacggacagcccatcccccgagtggaatacatggaggaagagaagaagacatggggcacggtttttaaaaccttgaagtcattgtacaagactcacgcatgctacgagtacaatcatatttttccactgctcgaaaagtactgcggcttccacgaggataacatcccacaacttgaggacgtgagtcagttccttcagacctgcacaggattccggctgcgacccgttgccggcctgctctctagccgagattttcttgggggtttagccttccgcgttttccactgtacacagtatatccgtcacggctccaagccaatgtatacgccggaacccgacatctgtcacgagctcttgggccatgtgccattattctctgacaggtcttttgcccagttttcacaggaaatcggactggctagtctcggcgcaccagatgagtatatcgaaaagttggcaaccatctattggtttacagttgagttcggcctttgcaaacagggtgactcgattaaggcctatggagcggggctactgagctcctttggagagctccagtattgcttaagcgaaaagcctaagttgctgcctctggagctcgagaagacagccatccaaaactataccgtgaccgaattccagcctctttattacgtcgcagagtcatttaacgacgcgaaggagaaggtgcgtaactttgccgcaacaatcccccgccccttcagcgtccgctatgatccttatacgcaacggattgaggtgctggataacactcagcaactcaagatactggcagattcaataaactccgaaatcggcatcctctgttccgctttgcaaaagatcaag

SEQ ID NO: 5979 - DNA, 1356 bp, Artificial Sequence
  derived and/or modified sequence
atgagcaccgccgtactcgaaaatccgggcctagggcgcaaattgtccgactttggccaagagaccagttacatagaggataactgcaatcagaacggtgctataagcctgatcttcagtctgaaggaggaagtcggcgcccttgctaaggtgctcagacttttcgaggagaacgacgtgaacctcacacacatagagtcccgtccaagtcgcctgaaaaaagacgagtatgagttttttactcatttggacaagcggtctctgcccgctctgaccaacatcatcaaaattcttcgacatgatatcggcgccactgttcatgaattgtcacgcgacaagaaaaaagacaccgtcccatggtttccccgcactatccaagagctggaccggttcgctaatcagatcctgagttacggcgccgaactagacgcagaccatcctggctttaaagaccccgtgtatagagcgcgcaggaagcaatttgctgacatcgcatacaactatcgccacgggcagcccatcccccgggttgagtatatggaggaggaaaagaagacctggggcacggtattcaagacactcaagtccctgtataaaacacatgcatgttatgagtacaatcacatcttccccctgctggaaaaatattgcggctttcacgaggataacattccccagttggaggacgtttctcagtttttgcagacttgtaccggctttcggttgcgtcctgtggcaggtctgttgtcatcccgggattttcttggagggcttgctttccgggtgtttcattgtacgcagtacattcggcacggcagcaaacctatgtatactcccgagcctgacatctgccacgaattgctgggtcatgtgcccctgttctctgatagaagcttcgcacaattctctcaagagatcgggttagcttccctaggggcaccagacgagtatattgagaagctcgctaccatttattggttcaccgtggagttcggcttgtgtaaacagggggattccattaaagcctacggggccgggctactaagtagcttcggggaactccagtactgtctcagcgagaaaccgaagttactacctctcgagctcgaaaagacggccattcagaattatacagtgactgaatttcagccactgtattatgtggcagagtcatttaatgatgccaaggagaaggttaggaactttgcagctactatcccgcggccgttctcggtgcgctacgatccttacacacagcgcatcgaggttctggacaacacgcagcagctgaagattctggccgattctatcaactcagaaatcgggatcctctgcagtgccctgcagaagattaag

SEQ ID NO: 5980 - DNA, 1356 bp, Artificial Sequence
  derived and/or modified sequence
atgtcgactgctgtgctggagaatccgggactgggaagaaagctgtcggacttcggacaggagacgagctacatcgaagataactgcaatcagaacggtgcgatctcactgattttctccctgaaggaggaagtgggcgctctggctaaggtgctccgcctgttcgaagaaaatgatgtgaatctgactcatatcgagtcgaggccctcacgcctgaagaaggatgaatatgagtttttcactcacctcgacaagcgctccttgccggccctcaccaacatcatcaagattctgcggcacgacatcggcgccactgtgcatgagctgtcacgcgataagaagaaagacacggtgccatggttcccccgcactatccaggaattggaccgtttcgcaaaccaaatcctctcgtacggagctgaactggacgcggaccatcctggattcaaggacccagtctaccgcgccaggagaaagcagttcgcggatattgcctataactaccggcacggacaaccaatccctcgcgtcgagtacatggaagaggagaaaaagacctggggcactgtgttcaagactctcaagtcgctctacaaaactcacgcgtgctatgagtacaatcacatctttccgttgttggaaaagtactgcggcttccatgaagataacatcccccagctggaggacgtgtcacagttcttgcagacctgcactgggttccgcctccgccccgtcgcaggcctgctgtcaagccgggacttcctgggaggactggctttccgcgtgtttcactgtacccagtacatccggcacggatcaaagccgatgtacacgcctgaaccggacatttgccacgagctgctggggcatgtgccgctcttctccgatcgcagcttcgcccaattctcgcaagaaatcggcttggcttccctgggcgccccggacgagtacatcgagaaacttgcgaccatctactggttcaccgtggagttcggcctgtgcaagcagggagattcgatcaaggcctacggggccggactcctgtcgtcgttcggcgaacttcagtactgcttgtcggaaaagccgaaactgctccccctggaactggaaaagacggcgatccagaactacaccgttaccgaattccaaccgttgtactacgtggccgaatcatttaacgatgccaaggaaaaagtgagaaatttcgcggcaaccatccctagacctttctccgtgcgctacgatccatacacccagcggatcgaagtgctggacaacacccagcagctcaaaatcctggcagactcaatcaattccgaaatcggaatcttgtgttccgcgctccaaaagatcaaa

SEQ ID NO: 5981 - DNA, 1356 bp, Artificial Sequence
  derived and/or modified sequence
atgtctacggcagtgcttgaaaatcccggactcggacgcaagctcagcgacttcggccaagaaacctcatacattgaagataactgcaatcaaaacggtgctatttccctcatcttttcacttaaagaggaagtgggagcacttgctaaggtgcttcgtctctttgaggaaaacgacgtgaacctgactcatatcgagtcccgaccgagcaggctcaagaaagatgaatacgagtttttcacccaccttgacaagcgcagcctccctgcccttactaatatcattaagatactgcgccacgacataggtgcaacggtgcacgaactgtctcgggataagaagaaagatacggtcccttggtttccacgtactattcaggaattggataggtttgcgaatcaaattctcagctacggagccgaactggatgcagaccatcctggttttaaggatcctgtctatagagctcggagaaagcagtttgcagatatcgcatacaactacaggcacggacagccaatccctagagtggaatacatggaagaggagaaaaagacctggggcactgtgtttaagaccctgaaatctctgtacaagacgcatgcttgttacgaatacaatcacattttcccactgcttgaaaagtactgtggattccatgaggacaacattcctcaactcgaagatgtttcgcaattccttcagacttgcaccggcttcagacttagacccgtggcaggcctgcttagctcccgcgatttcctgggtggactcgcgtttagagtctttcactgtacccagtacattagacatggatcgaagcctatgtacacccctgaaccggatatctgtcacgaactgctcggacacgttcctttgttctcggataggtcatttgcacaattcagccaggaaattggccttgcctccctcggagcacccgatgagtacatcgagaagctggccaccatttactggtttaccgtcgaattcggcttgtgcaaacaaggtgattcgataaaagcatacggcgccggccttctgtccagcttcggtgaactgcaatactgcctttcggaaaaaccgaagctcctcccactggaactggaaaagaccgcaattcaaaactacaccgtgactgagtttcaacctctttactacgtggcggaatcgtttaacgatgcaaaggagaaagtccggaatttcgcagccactatcccaaggccattttcagtgcggtacgacccctacactcagcgtatcgaggtgctcgacaacacccagcagctcaagatccttgcagactccattaactcggaaataggcattctttgttcggcactccaaaagataaag

SEQ ID NO: 5982 - DNA, 1356 bp, Artificial Sequence
  derived and/or modified sequence
atgtccaccgcggtgctcgaaaacccgggattgggaagaaaactgtcggactttggccaggagactagctacatcgaagataattgtaaccagaatggagccatctccctcattttcagcctcaaagaagaggtgggagctctggctaaggtgctccgcctcttcgaggagaacgacgtaaacctgacccatatcgaaagccgcccttcacgtttgaagaaggatgaatacgaattcttcactcacctcgataaaaggtcgttgcctgcgttgacgaatatcattaagatcctgagacacgacattggggctactgtccacgaactctcgagagacaagaaaaaggataccgtgccatggtttccgcgcactatacaagaactggatcggttcgccaatcagatcctgtcctatggagctgagcttgacgcagaccacccaggctttaaggacccggtgtaccgcgcgaggcgcaagcaattcgccgacatcgcctacaactaccggcatggacagccgatcccccgggtcgaatacatggaagaagagaaaaagacctggggaaccgtattcaagacgctgaagtccttgtacaagacccacgcctgctatgaatacaaccacattttccctctgctggagaagtactgcggctttcatgaggacaacatcccgcagttggaagatgtgagccaattcttgcagacgtgcaccgggttcaggctgcgcccggtcgcgggactccttagctcgcgggacttcctcggaggactggcctttagggtgttccattgtactcagtacatccgccacggttctaagccgatgtacacccctgagcccgatatctgccatgaactgctgggccacgtcccactgttttcggatcgcagcttcgcgcagttctcccaggaaattgggctggcatcactgggtgcacctgacgaatacatcgagaagctggccaccatctattggtttactgtggagttcggcctctgcaaacaaggagattccatcaaggcctacggtgccggccttctgagttcgtttggcgagctgcaatattgtctgtccgagaaacccaagctgctgccactggaactggaaaaaactgcgattcagaactacacggtcaccgagttccagcccctttactacgtggcagagtcgttcaatgacgcaaaggagaaggtgcggaacttcgcggctactatcccgcggcctttcagcgtgcgctacgatccttacactcagagaatcgaagtgctcgacaacactcaacaactgaaaatcctcgctgactcaatcaattcggaaataggaatcctttgcagtgcccttcagaaaatcaag

SEQ ID NO: 5983 - DNA, 1356 bp, Artificial Sequence
  derived and/or modified sequence
atgtcaacagccgtactggagaaccccggcttgggacgtaagttgtctgatttcggccaagagacctcatatattgaggacaattgtaatcagaacggcgctatatccctgatcttttcccttaaggaggaggtaggagccctggctaaggtccttaggctgtttgaagaaaacgacgtcaacctgactcacatcgaaagtcgccccagccgtctcaaaaaggacgagtatgaattcttcacccacctggacaaaagatcacttccagctttgaccaacatcatcaagatcctgagacatgatattggtgctaccgtgcacgagctcagccgtgacaaaaagaaggacaccgtgccttggttcccaaggaccattcaagagttggaccgctttgcaaaccaaattttgtcttacggcgccgagctggacgccgatcaccccggattcaaggatcccgtgtaccgcgctcgccgtaaacaatttgccgacattgcctacaactaccgccacggccagccaatcccacgtgtcgagtacatggaagaggaaaagaagacttggggtaccgtgttcaaaactctgaaatctctgtacaagacccacgcttgctatgagtataaccatatctttcccctgttggagaaatactgcggtttccacgaagacaacataccacagttggaggacgtgagtcagtttcttcaaacctgcactggtttcaggctgcgtcccgtggcaggtttgctctccagtagggacttcctgggcggcctcgcattcagggtgttccattgtacccagtacattcgtcatggctccaagcctatgtatacccccgaaccagatatttgtcacgagttgttgggccacgtgccactcttcagcgacagatcattcgcccagttttctcaagaaataggactggcttctctgggtgctcctgacgaatatattgaaaaactcgctactatctactggttcactgtagaattcggattgtgtaagcagggagacagtatcaaggcttatggtgcaggtctccttagcagcttcggcgagcttcagtattgcttgagcgagaaacctaagttgctgccactggaactggaaaagactgctatccaaaattacactgtcaccgaatttcagcccctctactacgtcgcagagtctttcaacgatgctaaagagaaggtaaggaatttcgctgccactatcccaaggccattctccgtcagatatgacccctacactcaacgtatcgaagtcctggataacacccagcagctgaagattctggccgatagtatcaactctgagattggcatcctgtgtagcgccttgcaaaagataaaa

SEQ ID NO: 5984 - DNA, 1356 bp, Artificial Sequence
  derived and/or modified sequence
atgagcactgccgtgctcgaaaacccgggactgggccggaaactgtcggattttggacaagagacttcgtacatagaagataactgcaaccagaacggcgccatttctctgatcttctcgctgaaggaggaggtcggggcgctcgcgaaggtcctcaggcttttcgaagagaatgatgtcaatcttactcatattgagtcgcgcccttcaaggctgaagaaggacgaatacgagtttttcacccatctggacaaacgctctctcccggccctcactaatatcatcaagatccttcggcacgacatcggagctactgtgcacgaacttagccgcgacaagaaaaaggataccgtgccatggttcccacgcacgattcaggaattggatagattcgcgaaccaaatactgtcctacggagccgaactcgacgccgatcacccaggcttcaaggaccctgtgtaccgcgcccgcagaaagcagttcgcggacatcgcgtacaactacagacacgggcagcctatcccacgggtggagtatatggaggaagagaaaaagacttggggaaccgtgttcaagactctgaagtcgttgtacaagacccacgcatgctacgagtataatcacatctttccgctgctggaaaagtactgcggattccacgaggacaatatccctcaactggaggacgtttctcagttcctgcagacgtgcaccggatttcgtctgcggccagtcgcagggctgctctcttcacgcgatttcctcggtgggttggcatttcgcgtctttcattgcactcagtacatccggcatggttccaagcctatgtacaccccggaaccggacatttgtcacgaattgctcggacatgtgcctttgttttcggatcggtcctttgcccaattctcgcaggaaatcggcctggcgtccttgggagctcccgacgagtacatcgaaaagctcgccaccatctactggttcactgtggaattcgggctgtgcaagcagggagattcgattaaggcctacggcgccggcctgttgtcatcatttggtgagctgcagtattgtctgtcggagaaaccaaagctcctgcctctggagctcgaaaagactgcgatccagaactacaccgtgaccgagttccaaccgctgtactacgtcgctgaatcgtttaacgacgcgaaagaaaaagtccgaaacttcgccgcaaccatcccacggccatttagcgtaagatacgacccgtatactcaacggatcgaagttctggataacactcagcagctgaagatcttggccgactccatcaattcggagatcggaatcctttgtagtgcgctgcagaaaatcaag

SEQ ID NO: 5985 - DNA, 1356 bp, Artificial Sequence
  derived and/or modified sequence
atgtctacagctgtgctggaaaaccccggattgggcagaaagctctccgactttggacaggaaacgagctacattgaagacaattgcaatcagaatggcgcgatttcactgatcttctcactgaaggaggaggtcggcgcccttgccaaggtgctgagactgttcgaggagaacgatgtgaacttgactcatattgagtcgcgaccctctcgactgaagaaggatgaatacgaattcttcacccacctcgataagcggtccctccccgccctgaccaacattataaagatcttgcggcacgatatcggagccactgtccacgaacttagtcgcgataagaaaaaagacaccgttccctggtttccccggaccattcaggagctggatagatttgccaaccagattttgtcttacggggctgagctggatgccgaccacccaggcttcaaggatcccgtctaccgcgctcggcggaaacaatttgcagacatcgcatataattacaggcatggccagcccattccacgggtggaatatatggaagaagagaagaaaacatggggaactgtgtttaagacactgaagagtctctacaaaacccatgcatgctacgagtacaaccatatcttccccctgctggagaagtattgcgggttccacgaggacaatattcctcagctggaagatgttagtcagttccttcagacctgcacagggttcaggctgaggcccgtcgccgggctgctgagttctcgtgatttcctggggggcctcgccttcagagtgttccattgcacacaatacatccggcatgggtccaagcctatgtacacgcccgagcccgacatttgccatgaactgcttggtcacgtgccattgtttagcgataggtcatttgctcagtttagtcaggagattggcttagctagtctgggcgcacctgacgagtatatagagaagctggctactatttactggttcacagtagagttcggattgtgtaagcaaggcgactccattaaggcatatggagccggactcctatctagcttcggagagctccagtactgcctgtctgagaaacccaagttactgcctctagaattggaaaagaccgcaatccagaactacacagtcacagagtttcagcccttgtattatgtggcagaatcattcaatgatgcaaaagagaaagtaagaaactttgccgctacaatcccaaggcccttttccgtccgctatgatccatacacacagcgcattgaggtcttagacaatacgcagcagctgaagatcttagccgattccataaatagcgagatcggaatcttgtgtagcgcgctgcaaaagattaaa

SEQ ID NO: 5986 - DNA, 1356 bp, Artificial Sequence
  derived and/or modified sequence
atgtccactgcagtgctggaaaacccaggtttgggtaggaagctgtcggacttcggacaagagacttcttacatagaggataactgcaaccagaatggagctatctccctgatctttagccttaaggaagaagtgggtgcacttgcaaaggtcctccgcttgttcgaagagaacgatgtgaacctcacgcatatcgaatcccgcccttcgcggctgaagaaggacgaatacgaattcttcacgcatctcgacaagaggagcctgcctgctctgaccaatatcatcaagatcctgagacatgacatcggcgcgaccgtgcacgaactgagtcgggacaagaaaaaagataccgtgccgtggttcccacggacgatccaagaacttgacagatttgcgaatcaaatcttgagctacggcgccgaactggacgctgaccacccgggcttcaaggacccggtctaccgggccagacgcaaacaatttgcagatattgcctacaactatcggcacggccagcccatccctcgggtggagtacatggaggaggagaagaagacttggggaactgtgtttaagactcttaagtccctgtacaaaacccacgcctgttacgagtacaatcacatctttccgctcctcgagaagtactgcggatttcacgaagacaatattcctcaactcgaagatgtgagccagttcctgcaaacttgtactggattccgactccgccccgtcgccggactgctgtcgtcccgagatttcctcggaggacttgcttttagagtgtttcattgtactcagtacatcagacacggaagcaaaccgatgtacaccccagagcctgatatctgccatgagctcctcggacacgtgccgcttttcagcgatcgttcgtttgcgcagttctcgcaggaaattggactcgcctccctgggcgcgccggacgaatacatcgaaaagctggcaaccatttactggttcactgtggaatttggcctgtgcaagcagggcgactcgattaaggcctatggagcgggtctgctctcgtctttcggggagctccagtactgcctctccgagaagcccaagctcctgccgctggagctcgagaagaccgcgatccagaactacacggtgactgaatttcagccgctctattacgtggcagagtcattcaacgacgccaaagaaaaggtgagaaacttcgctgccactatccccaggccattctcagtaagatacgatccctatactcagcgaattgaggtgctggataacacccaacaacttaagatcttggctgattcgattaactcggagataggcatcctctgctccgccctgcagaagatcaaa

SEQ ID NO: 5987 - DNA, 1356 bp, Artificial Sequence
  derived and/or modified sequence
atgtccaccgcagtcctggagaacccaggacttggtaggaagctctcggattttggccaagaaaccagctacattgaagataattgtaatcaaaatggtgccatcagccttatcttttccctcaaggaagaggtgggggcactcgctaaggtcctgagactttttgaggagaatgacgtgaatctgacccacatcgagtcgaggcctagcagacttaagaaggatgaatacgaattcttcactcatcttgataaacggtcgctgccagcacttactaatatcatcaagatcctgagacacgatattggagctaccgtgcatgaactttccagggataagaagaaagacaccgtcccttggtttcctcgcaccattcaagaacttgatcgattcgcaaatcaaatactgtcatacggtgcggaactggacgcggatcatcctgggtttaaggatcccgtgtacagagcccggagaaagcagtttgctgatatcgcgtacaactaccgtcacggccaacctatacctcgagtggaatacatggaggaagagaaaaagacgtggggtactgtgtttaagaccttgaagtcactgtataagacccacgcatgctatgaatacaaccacattttcccgctgctggagaaatactgcggttttcatgaagataacatacctcagctggaggatgtcagccaatttctccaaacctgcacgggttttaggcttcgtccagtggcgggactgctttcatcgagggactttctcggaggccttgcattccgggtgtttcattgtacgcagtacattcgccacggttccaaaccaatgtatacccctgaacctgatatatgtcatgaacttttgggacatgtgcctttgttttcggatcgctcgtttgcacagttttcccaggagattggcctcgcatcccttggagcaccggacgaatacattgaaaagttggctacgatctactggtttaccgtcgaatttggcctttgtaagcaaggggattccattaaggcctacggagcaggtctgctgtcatcgttcggggaactgcagtactgtttgtcggaaaaacctaagttgcttccgctcgaactggagaaaaccgccatacaaaactacacggtgactgagtttcaacctctgtactacgtcgcggaaagttttaacgatgcaaaggagaaggtgcgcaactttgcagcaaccattccacgcccatttagcgtgcggtacgatccctatacccaacggattgaggtgcttgataatactcagcaactcaagattctggcggacagcattaacagcgagataggaatcttgtgctcggcacttcagaagataaaa

SEQ ID NO: 5988 - DNA, 1356 bp, Artificial Sequence
  derived and/or modified sequence
atgagcactgccgtgctggagaaccccggacttggccgcaagctgtcggatttcggacaggaaacttcctacatagaagataattgtaaccagaacggagcgatttcacttatcttttcgctcaaggaggaagtcggtgccctcgcgaaagtgctgagactgtttgaagagaacgatgtcaatcttacccatattgaatccaggccaagcagactcaagaaggacgaatacgagttctttacgcatctggataagcgctcgcttcctgcgttgaccaacatcatcaagatcctccgccatgatattggcgctaccgtgcatgaactgtccagggataagaagaaggatactgtgccttggttcccgagaactatccaggaactggaccgcttcgcaaaccagattctctcgtacggtgcagaacttgacgcagaccatccaggttttaaggatcccgtgtaccgtgcacgtcgtaagcaatttgccgatattgcgtacaactacagacatggtcaaccaattccacgggtggagtatatggaagaggagaaaaagacgtggggcactgtgtttaagaccctcaagagcctgtacaagactcatgcctgttacgaatacaatcacatatttccactcctggaaaagtactgcgggtttcacgaggacaatatcccccagcttgaggatgtgtcccaattcctgcaaacttgtactggatttaggcttaggccagtggcagggctgcttagctccagagattttcttggcgggctcgccttcagagttttccattgcacccaatacatcagacacggttccaagccgatgtacactccagaaccagacatttgtcatgaacttctgggacacgtgcccctgttttccgatcgatcgtttgcccaattttctcaagagataggactggcatcccttggcgcccctgatgagtatatcgagaaactggccaccatatactggtttaccgtcgagtttgggctttgtaaacaaggcgatagcataaaggcttatggtgcgggcttgctctcctcgtttggggagcttcagtactgtctttccgagaagccgaagctcctcccactcgaactggaaaaaaccgcgattcaaaactacactgtgactgagtttcaacctctttactacgtcgccgaatcgttcaacgatgcaaaggaaaaggtgcggaactttgcagcaacgattccccgccctttctcggtgcgttacgacccctacactcaacggatcgaggtccttgataatacgcaacaactcaagatcttggcagattccattaactccgaaatcggcattctgtgttcggccctccagaagataaag

SEQ ID NO: 5989 - DNA, 1356 bp, Artificial Sequence
  derived and/or modified sequence
atgtcgactgcagtgctcgaaaacccaggactgggtcgcaaactttcagactttggacaagagacgtcgtacatcgaggataactgtaatcaaaatggtgcaatcagccttatcttttcccttaaggaagaagtgggagcacttgcaaaggttctgcggctgtttgaggaaaatgatgtcaatcttacccacattgaatccagaccaagcagacttaagaaggatgaatatgagttctttacccacctcgataagcgttcactgcccgcgctgactaatatcataaagatcctccggcacgatattggagcaaccgtgcatgaactctccagggataagaaaaaggataccgttccgtggtttcccaggacgatacaggagctggaccgctttgccaaccagatcttgagctacggggccgaactggatgcagaccaccctggatttaaggatcccgtctaccgtgccagacggaagcaattcgctgacatcgcatacaactacaggcacggtcaacccattcctcgcgtggagtacatggaagaagagaaaaagacttggggtaccgtgttcaagacccttaagagcttgtacaagacgcacgcatgctacgaatacaaccacatttttcctcttcttgagaaatactgtggtttccatgaagataacatacctcagttggaagatgtgtcacaatttctccagacttgtactgggtttcgcctgcggccggtcgcaggcctgctgtcatcgcgcgactttctcggcggactcgccttcagggtgtttcattgcacccagtacattcggcatggaagcaagccaatgtacaccccggaacctgatatctgtcacgaactgcttgggcatgtgccgctgttctcggatagatcgtttgcccaattttcgcaagagattgggctcgcctcacttggagcccctgacgaatacatcgaaaagctggcaacgatttactggtttactgtggagtttggcctgtgcaagcagggagattcgattaaggcctacggagcaggccttttgtcctcgttcggcgaactgcagtactgtctgtcggaaaagccaaaacttctgcccctggagctggaaaagactgccattcagaactacactgtcaccgaattccaacctctttactacgtggcagaatcatttaacgatgcaaaagagaaagtgcgaaacttcgcagccactatacctagacctttttccgtgcgatacgacccatacacccaacggatcgaggtccttgataacacccaacagctgaaaattctcgccgactcaatcaactcggaaataggaatactttgctccgcccttcaaaagatcaag

SEQ ID NO: 5990 - DNA, 1356 bp, Artificial Sequence
  derived and/or modified sequence
atgtctacagcagtccttgaaaatcctggtttaggacgaaaattgtcagattttggacaagaaacatcatatatagaagataactgtaatcaaaatggtgctatctctttaattttttcacttaaagaagaagtcggagcattagcaaaggttttaagactttttgaagagaatgacgttaatttaacacatattgaatctcgaccatctagattaaaaaaagatgaatatgaatttttcactcatttagataaaagatctttgccagctttaacaaatattattaaaattttacgacatgatattggagctactgttcatgaactttctagagataaaaaaaaagacacagttccatggttcccaagaacaattcaagaacttgatagatttgcaaatcaaatattatcatatggagctgaattagatgctgatcatcctggatttaaagatccagtttatagagctagaagaaaacagttcgctgatattgcatataattatagacatggacaaccaattccaagagtagagtatatggaagaagagaaaaaaacatggggaactgtatttaaaacattaaaatctctctataaaactcacgcatgttatgaatataatcatatttttccattacttgaaaaatattgtggttttcatgaagataacataccacaattagaagatgtctcacaattcttacaaacttgtactggatttagattaaggccagtagcaggacttttatctagtagagattttttaggtggtttagctttcagagtatttcattgtacacaatatattagacatggatcaaaacctatgtatacaccagaaccagatatttgccatgaattattaggacatgttccattatttagtgatagatctttcgcacaattctcccaagaaattggactagctagtcttggagctccagatgaatatattgaaaagttagcaacaatctattggtttacagtcgaatttggtctttgtaaacaaggagattcaattaaagcttatggagcaggattgttgagttcctttggagaattacaatattgtttaagtgagaaaccaaagttattgccattagaacttgaaaaaacagctattcaaaattatacagttacagaatttcagccattatattatgtagcagaatctttcaatgatgcaaaggaaaaagttcgaaattttgctgctacaatccctagaccattctcagttagatatgatccatatactcaaagaatcgaagttttagataatacacaacaattgaaaattcttgcagattcaatcaactcagaaattggaattttatgtagtgcacttcaaaagattaaa

SEQ ID NO: 5991 - DNA, 1356 bp, Artificial Sequence
  derived and/or modified sequence
atgtctaccgcagtactggaaaacccaggcctggggagaaagctgagcgattttggacaggagacttcatacattgaggataattgtaatcagaatggcgcgatctcccttatcttctctctgaaggaggaagtgggcgccctggctaaagtcctgagactgtttgaagaaaatgatgtgaacctgacacacatcgagtcacgcccgagtcgactcaagaaagacgaatatgaattcttcacgcacctcgacaagaggagcttgcccgctctcactaacatcatcaagatcctcagacacgacattggggccaccgtccatgaactgagtcgcgacaagaaaaaggacaccgtaccgtggttcccccggacaatccaggagttggaccgcttcgccaaccagatcctctcttacggcgcagaactggatgcggatcatccaggattcaaggatcccgtgtaccgcgcacgaagaaagcagttcgctgatatcgcttacaattacagacacggtcagcctatccctagggtggagtacatggaggaagaaaagaaaacatgggggaccgtgttcaagactctgaaatccctgtacaagacccacgcatgctacgaatacaatcatatatttcccttgctcgagaagtactgcgggtttcacgaggataacataccgcagctggaggacgtgagtcagttcctgcagacttgcaccggttttcggctcagacccgtagccggtttgctctcaagcagggactttttgggaggattggccttcagagttttccactgcacccagtacatcaggcatggaagtaagcccatgtatactcctgaacccgacatctgccacgaactgctgggtcacgttccactgttctctgaccggtcattcgcccagttttcacaggaaatcgggcttgcctctctgggggcacctgacgagtacatcgaaaaactcgctaccatctattggttcaccgtggagtttgggctttgcaagcagggagattccattaaggcttacggggctggactgctgagctcattcggcgagttgcagtattgcttgtccgaaaagccaaaactgctccccctggagctggagaagacagctatacagaattacaccgttactgagtttcagcccctctactatgtggccgaaagctttaacgacgccaaggagaaggtacgcaattttgccgcgactattccccgaccattcagcgtgcgctacgatccatacacgcagcgcatcgaggtgctcgacaacactcagcagctcaagatccttgctgatagcatcaacagcgagatcggcatcctgtgcagtgccctgcagaagatcaag

SEQ ID NO: 5992 - DNA, 1356 bp, Artificial Sequence
  derived and/or modified sequence
atgtcgaccgccgttcttgagaacccagggctgggacgaaagttgtccgattttggacaagaaacctcgtatatcgaagataattgcaatcaaaacggcgcgatatcactcatcttttcccttaaggaggaagtgggggcacttgcgaaggtcctcagactttttgaggaaaacgatgtgaacctgactcatattgagtcacgcccttcgcggctcaagaaggatgaatacgagttctttacccatcttgataaacgctcgctcccagcactcactaacattatcaaaattctgaggcacgacattggcgcgaccgtgcacgagctttcccgggataagaaaaaggatactgtgccttggtttcctagaactatccaagaacttgatcgttttgccaatcagatactgtcgtacggtgcagagcttgacgcagatcacccgggatttaaggatcctgtgtacagggcacgcaggaaacaattcgcagacatcgcctacaattacagacatggtcaaccaatcccccgcgtcgagtacatggaggaggagaaaaagacctggggaaccgtgttcaagactcttaaaagcctttacaaaactcacgcttgttacgaatacaaccacatttttcccctcctggaaaagtactgtggctttcacgaggataacataccacaactggaagatgtgtctcaatttcttcaaacgtgcactggattccggctcagaccagtggcagggcttctttcctcgcgtgattttcttggaggtcttgcatttcgggtgtttcattgtacccaatacattaggcatgggtcgaagcctatgtacacccccgaacctgatatttgtcatgagctcctcgggcacgtgccattgtttagcgatcggtcgttcgcacagttctcgcaggaaatcggactcgcttcgctgggagccccagatgaatacatcgaaaaacttgcaactatatactggttcaccgtggaattcggattgtgtaaacagggcgactcaatcaaggcatacggagcaggtttgctgagctcctttggtgaactccaatactgcctttccgagaagccaaagctcttgccacttgagctggaaaagaccgcaatccagaactacactgtgactgaatttcagcccctttactatgtggcagagtcattcaacgatgcaaaggaaaaggtccgcaattttgcggcaaccatcccaagacccttttcggtccgttacgacccatacactcagcgcatcgaggtgctggataatacgcagcagcttaagatactcgcagactcaatcaactccgaaattgggattttgtgttctgcccttcaaaagatcaag

SEQ ID NO: 5993 - DNA, 1356 bp, Artificial Sequence
  derived and/or modified sequence
atgtccacagccgtgctggaaaaccccggactgggtaggaagttgagcgatttcggccaggagacatcctacattgaggataattgcaaccagaacggggcgatctctttgatattcagtctgaaggaggaagtaggggcactcgctaaagttttgcgacttttcgaggaaaatgatgttaatctgacccacatcgagtcccgcccatcgcggctgaagaaggatgaatacgagttcttcacgcatcttgataagaggagtctgcccgctctcactaatataatcaaaattctccggcacgacatcggggccacagtgcacgaattgagtcgcgacaagaaaaaagacaccgtgccttggttcccgcgcacaatacaggagctcgacaggtttgctaaccaaatactctcatatggggccgaattggatgccgaccatcctggcttcaaagaccctgtgtatcgagctagacgcaaacaatttgcggacatcgcttacaattacaggcatgggcagcctattcctcgcgtggagtacatggaggaggagaaaaaaacatggggaacggtgttcaagacgcttaagagtctctataagacccatgcatgctacgaatacaaccacatcttccccttgctcgaaaaatattgcggattccatgaagataacatcccccaactggaggatgtttcacagttcctgcaaacatgcacaggttttaggcttagaccagtggccggcctgctgtccagtcgcgactttctgggcggcctggcctttcgagtattccattgcacacaatatatcaggcacgggagtaaacccatgtatactcctgagcctgatatttgccatgagctactggggcacgtgcccctcttcagtgacaggtcctttgcccagtttagccaggagatcggcctagcctcccttggggctcccgatgaatatatagagaagctggcgaccatatactggtttacagtcgaattcggtctctgcaaacagggtgactctattaaggcatacggcgccggcctcctttcctcctttggcgaattacaatactgcctgtcagaaaaacctaaactcttgcctttggaactggagaagactgcgattcaaaattacactgtgactgaatttcaaccactatattatgtcgcagaatcatttaatgatgcaaaagagaaagtgcgcaacttcgctgcaaccattccccgccctttttccgtccgctatgatccctacacacaacgcatagaggtgctggataatactcagcagcttaagatcctggccgattccatcaattcagagatagggattctgtgttctgcgctgcagaagattaag

SEQ ID NO: 5994 - DNA, 1356 bp, Artificial Sequence
  derived and/or modified sequence
atgagtacagccgtcctggaaaacccaggcctaggtagaaaactgtccgactttggtcaggagacgagctatatcgaggacaactgtaatcagaatggcgctatctctttaattttcagcctcaaggaggaggtgggtgctctcgctaaggtgcttcggctctttgaggagaacgacgtgaatctcacccacatagagtctaggccctctaggctaaagaaggatgagtacgagttctttacacatttggacaagagatcattaccggcactcacaaacattattaagattctgcgccacgatatcggcgccaccgtgcacgaactgagtcgcgacaagaaaaaagacaccgtcccttggtttccacgcacaatacaggaattggacaggtttgccaatcagattttgagctatggcgcagagctcgacgccgatcaccctggctttaaagatcccgtttatcgagcaagaagaaagcagttcgccgatatcgcctataattaccggcatggtcagccaatacctcgcgtagagtatatggaggaggagaagaagacatgggggactgtttttaaaactctcaagagtttatataaaacacacgcttgttatgaatataaccatattttccctctgctcgaaaaatactgcggttttcacgaagataatataccacagctggaggacgtgtcccaattcctgcagacatgtactggctttcggctgcgccctgtggctggcctgttatcaagccgcgactttctgggaggcctggcctttcgagtgttccactgcacccagtacatcagacacggatccaagcccatgtacacacctgagccagacatttgccatgagctgctggggcatgtgcctctgttttccgaccgaagtttcgcacagttttcccaagaaatcggactggcatccctaggcgccccagacgagtacatagaaaagctggccacgatttattggtttacagtggagtttggcttatgtaagcagggggattcaatcaaggcttacggcgccggtctcctgtcatcctttggagaactgcaatactgcctctcggaaaagcctaagttgcttcccctggagttggagaaaaccgctatccaaaattatacggtgacagagtttcaacccctctactacgtggcggaatcctttaacgacgcgaaagaaaaggtaagaaatttcgccgccacaattccccggcctttcagcgttaggtacgacccctatacccaacgcatcgaggtgttggataatactcagcaactgaagattctcgctgactccatcaatagcgagattgggatcctgtgcagcgctctgcagaaaattaaa

SEQ ID NO: 5995 - DNA, 1356 bp, Artificial Sequence
  derived and/or modified sequence
atgtccaccgccgtgctggaaaaccctggcctgggtcggaagctgtccgattttggtcaagaaacatcctacatcgaggataactgcaatcagaacggtgccataagtctgatttttagtttaaaggaggaagtgggtgcgctggccaaggtactacggctgttcgaggagaacgacgtgaatctaacccatatcgaatcaaggccgtctagactgaagaaggacgagtatgagttctttacccacctcgacaagcgttcacttcctgcgctgacaaatatcatcaagatccttaggcatgacatcggtgccaccgtgcacgaactctcccgggacaaaaaaaaggataccgtcccttggttcccgcgcaccatccaggaactggaccggtttgctaaccagattctgtcctatggagctgagctggacgccgatcaccctggcttcaaggacccagtgtatcgggcccggcggaagcagtttgctgacatcgcttacaactataggcatgggcagccaatacccagggtggagtacatggaagaggaaaaaaagacttggggtaccgtctttaagacactcaagtctctttacaagactcatgcatgctacgagtataaccatatattccctctgctagagaagtattgtggcttccatgaagacaatattccacagcttgaggacgtgagccaatttctgcagacctgcaccgggttccggctccggccagtagccggactgctctcgtctagagactttctcggcggcctggccttcagagttttccactgcacccagtacattagacacggctccaagcctatgtatacacctgagccagatatatgccatgaactcctggggcacgtcccgttgttcagtgacagaagcttcgcacagtttagccaggagatcggactcgcttctctgggagcccccgacgaatatatcgaaaagctcgcaacaatttactggtttactgtcgaatttggcctgtgcaaacagggtgactctataaaggcttacggagccggtctgctaagttccttcggcgagctgcaatattgtctctccgagaagcctaagctacttcctctcgagctggagaaaaccgccattcaaaattatacagtgacagagttccagcctctgtattatgttgccgagagcttcaatgacgccaaggagaaggtccggaactttgccgccactataccacggcctttcagcgtgaggtatgatccctatacccaaagaatagaggttctggataacacacagcaacttaagattctcgccgattcaatcaacagcgagatcggtatcttgtgctccgcactccaaaaaatcaag

SEQ ID NO: 5996 - DNA, 1356 bp, Artificial Sequence
  derived and/or modified sequence
atgagcacagctgttttggaaaatccaggactgggccgcaagctgagtgacttcggccaggaaaccagttacatcgaggacaattgtaatcagaacggtgccatctccctgatcttttccctcaaagaagaggttggagctcttgccaaagttcttaggctctttgaagagaacgacgtgaacctgacccacatcgaaagcaggcccagtaggctgaagaaggatgaatatgagtttttcacccacctcgacaagaggtccctcccagcactgaccaatattatcaaaatccttcgccatgatatcggcgcaacggtgcacgagctgtccagagacaaaaaaaaggacacagttccgtggtttcctaggacgatccaggaactggacagatttgctaatcagattctcagttatggcgctgaactggacgcagaccaccccggctttaaagaccctgtgtacagagctagaagaaaacagttcgccgacattgcttacaattaccgccatggacaacctatcccacgcgtcgagtacatggaggaagagaaaaagacgtggggaaccgtcttcaagaccctgaaatctctttataagacccatgcctgctatgagtacaaccatattttccctctgctcgaaaaatactgtggtttccacgaggacaacatacctcagctcgaagacgtatcccaatttctgcagacatgcacaggatttagactcagacccgtggccggactgctctcttcaagagactttctgggaggccttgcattcagggtctttcattgtacccaatacatcagacacggcagcaaacctatgtacaccccagagcccgatatatgccatgagctccttggccatgtgccgctcttctcagatcgcagcttcgcgcaattcagccaagagattggactggcttctctcggcgctccagacgaatacatcgaaaagctcgctactatctattggtttacagtggaattcggtttgtgcaaacaaggagacagtatcaaggcctatggagcgggactgcttagtagtttcggcgaacttcaatactgcctttcagagaaacccaagcttcttcccctggagctcgaaaagactgcgattcaaaattacactgtcactgagttccaacccctctattacgtcgctgagtcttttaatgacgccaaggaaaaggtgagaaattttgctgccactattccaagaccattttcagtccgctatgacccctacacccagagaatagaagtgttggacaacacccagcagctgaagatactggcagacagtatcaattctgagatcggaatcctgtgcagtgcactgcagaagattaag

SEQ ID NO: 5997 - DNA, 1356 bp, Artificial Sequence
  derived and/or modified sequence
atgagcactgcagtgctggaaaaccctggtctgggcagaaagctgtccgatttcgggcaggaaacctcttatattgaggacaactgtaaccagaacggcgcgatctccctgattttctccctaaaggaagaggttggcgccctggcaaaggtactgagactctttgaagagaatgatgtgaacttgacacatatcgagtcaaggcccagccggcttaaaaaggatgaatacgaattcttcacacatctagacaagcgaagtcttccagctcttaccaatatcatcaagatcctccgacatgacatcggagctacagttcacgaattgtctagagataagaagaaggacacagttccttggtttcctcgaacaattcaggaactggatcgtttcgcaaaccaaatacttagttatggtgccgaacttgatgccgaccatcctggcttcaaggacccagtctaccgagccaggcgaaaacaattcgcagacatcgcttacaattatcgtcacggacagcccatacctagagtggagtatatggaggaagagaagaaaacatggggcaccgtctttaagacgctcaaatcattatacaagacacacgcatgctacgagtacaaccacatcttcccactactcgagaagtactgtgggttccatgaagataacatccctcagctggaagacgtaagccagtttctgcaaacttgcacgggcttcagattgcgccccgttgctgggctgcttagtagccgtgactttctgggagggttggcgttccgagtgttccactgcacgcagtatatcagacacggaagcaagccaatgtatactcccgagccagatatctgccatgaactcttggggcacgtgccacttttttccgaccggtctttcgcccaattcagtcaagagattgggttggccagcctgggcgcccccgacgaatacatcgaaaagctggcgacgatttattggttcactgtagaattcggcctgtgcaagcagggtgactcaatcaaggcctacggtgctgggttgctgagctcatttggtgaactgcagtattgtttgagcgagaaaccaaagcttctgccccttgagctagaaaaaactgccatccaaaactacacggttacagagttccagccgctttactatgtagctgaatcatttaacgacgccaaggaaaaagtgaggaatttcgcagccaccataccaaggcctttctcggtgagatacgatccttacacacagagaatcgaagtgcttgataatactcaacagctcaaaattctggcggactcaattaattccgagattggaatcctatgttctgcgctccagaagattaaa

SEQ ID NO: 5998 - DNA, 1356 bp, Artificial Sequence
  derived and/or modified sequence
atgtccacagccgtgctggagaatccaggtctcggacggaaactctccgattttggccaggaaacctcgtacatcgaggacaattgcaatcagaacggcgccatctccctaatcttttccctgaaagaggaggtaggagccctcgctaaagtacttcggctttttgaggaaaacgacgttaacctgacacacatagaatcaaggccctctcgcctgaagaaggacgaatacgaattcttcactcatctggataagcgaagcctgcctgccctcactaatatcatcaagattctgagacatgacattggagctactgtccacgagttgagcagggataagaaaaaggataccgtgccttggtttccacgcacaatccaggagttagatcgcttcgcgaatcagatattatcttacggcgccgagcttgatgccgatcatcctggcttcaaggaccctgtgtatagggcacgccgtaaacagttcgccgatatcgcgtacaactatcggcacgggcaaccaatcccaagggtggaatatatggaggaagaaaaaaagacttgggggacagtgtttaagaccctgaagtcactgtacaagacccatgcgtgctatgagtataatcacatttttccccttctggagaaatattgtggttttcacgaagataacataccccagctcgaggatgtgagccagttcctgcaaacatgcactgggtttaggctgcgacctgtggcggggcttctgagttcacgtgactttctcggagggctggcttttagagtcttccactgcacgcagtatatacggcatggctctaagccaatgtacaccccagaacccgacatttgccatgagctgctggggcacgtccctctgttttctgaccgcagctttgcacagtttagccaagagatcggcctggcttctctgggagctccagacgaatatatcgaaaaacttgcaaccatttactggttcaccgttgagttcgggttgtgcaagcagggcgacagtattaaagcctacggcgccggactgctttcctctttcggggagctgcagtactgcctaagcgaaaaacctaaactgctccccctagagctagagaagaccgcaatacaaaactatacggtcaccgagtttcaacctctctactacgtggccgagagcttcaacgacgcaaaggaaaaagttagaaacttcgccgccacgataccacggcccttctcagtcaggtatgatccgtatactcagaggatcgaagttctggacaacacacagcaattaaaaatcctggccgactcgatcaattccgaaattggaatcctctgttccgctctccaaaaaattaag

SEQ ID NO: 5999 - DNA, 1356 bp, Artificial Sequence
  derived and/or modified sequence
atgtcgacagctgtcttggagaatcccggattaggacgaaagctctccgacttcggccaggagacctcctatattgaggacaactgtaaccagaatggtgccatatcgttgatctttagcctgaaggaagaggtgggagctctcgcaaaagtcctgagactttttgaagaaaatgatgtgaacctgacccacattgagtcacggccatctcggctgaagaaggatgagtatgaatttttcacccacttggacaaaagatcattgcccgccctgaccaacatcatcaagatcctgcgccacgatatcggcgccacagtccacgagttgagccgcgacaagaaaaaggataccgtgccctggttcccgcgaactattcaggagctcgaccggttcgccaatcaaattttgtcctatggggccgagttagatgctgaccaccctggcttcaaggaccctgtgtacagagcgcggcgcaaacagttcgccgacattgcatacaattatcgccacggacagcctatcccccgggtcgaatatatggaagaggagaagaagacatggggaaccgtgtttaagaccttgaaaagcctctataagacacatgcctgctatgagtacaatcatatctttccactgctcgagaaatactgtgggttccacgaggacaatattccccagctcgaggatgtctcccaattcctccagacttgcaccggattccgattgcggcctgtggccggtttactctccagtcgggatttcttgggtggccttgcattcagggtattccactgtactcaatatataaggcacgggagtaagcccatgtacacccccgagccagacatctgtcacgagctcttgggccacgtgcccctattttccgatcggtcctttgcgcagttcagccaggagataggcctcgcctccctgggcgcacctgacgaatacattgagaaacttgctaccatctactggttcacagtggaattcggactgtgcaaacagggtgatagcatcaaggcctacggcgccggtctgttatctagtttcggagagttgcaatactgcctgtccgagaagcccaaacttcttcctctcgaattagaaaaaaccgctatacagaactatactgtcaccgagtttcagcccctgtactacgtcgcggaatcttttaacgacgctaaggagaaggtacgcaatttcgctgctacaattcctcggcccttttccgtacggtacgacccctacacccagcggatagaagtcttggacaacacgcagcagctgaagattttggcagacagcataaattccgaaatcggcatcctgtgttccgccctgcagaagatcaaa

SEQ ID NO: 6000 - DNA, 1356 bp, Artificial Sequence
  derived and/or modified sequence
atgtccaccgccgtcctggagaacccgggcctcggccgtaagctgagtgattttggccaggaaacttcatatatcgaagataactgcaatcaaaatggggccatcagcctcatcttcagcctgaaggaggaagttggagctcttgctaaagtgctgaggctctttgaagaaaacgatgtaaatctgacccacatcgagagccgaccctctcgcctcaagaaggatgaatatgagttttttacacacctggataaacgaagcctccccgccctcactaacattataaaaatcctacgccacgatataggtgccacagttcacgaactatcccgcgacaagaagaaggatacagtgccttggtttcctcggaccatacaggaactggatcgatttgccaaccagatactgagttacggtgcagagctggacgcagaccaccccgggttcaaggaccccgtatatagagcccggcgtaagcaattcgcagacattgcttacaattaccggcacggacagccaataccgcgagtggaatacatggaagaggagaaaaaaacctgggggaccgtgttcaagacactgaaatcactttataagacacatgcatgttatgaatataaccatattttcccactgctggagaagtattgtggatttcacgaggataatattcctcagctagaggacgtgtctcaatttctccagacctgtaccgggttccggctgagaccagtcgcaggtctcttaagcagtagagattttctcgggggactcgccttcagagtgtttcattgcacccagtacataagacatggttctaaaccaatgtacacccccgagccggatatctgtcatgagctgctgggccacgtgcccctattcagcgataggtctttcgctcaattcagccaggagatcggtcttgcatccctgggggcccccgacgagtacattgagaaacttgcaaccatctactggtttaccgtagagttcggcctctgtaagcagggcgattctatcaaggcatatggagctggtctgctcagcagctttggggagttgcaatactgtctgagcgagaagcccaagttgctgccactggagctagagaaaacggccattcaaaattatacagtgactgagtttcagccattgtactatgtggcagaaagttttaatgacgccaaagagaaagtgagaaattttgcagcaacaatccctaggcccttttctgtgcgttatgatccatatactcagaggatcgaggttcttgataatacccagcagctcaagatcctggccgattccattaactcagagatagggattctgtgctctgcactgcagaagatcaaa

SEQ ID NO: 6001 - DNA, 1356 bp, Artificial Sequence
  derived and/or modified sequence
atgagcaccgcggtcctcgaaaacccgggactgggccgaaaactctcagatttcggacaagaaactagttacattgaggacaactgcaatcaaaatggggctattagcctgattttttccttaaaggaggaggtaggggcactggctaaagtgctcaggctttttgaggagaatgatgtcaacctgacacacatcgagtctcgcccttccaggcttaagaaagatgagtatgagttttttacacacctcgataagaggtcactgcccgcactgacgaatataatcaaaatactccgtcacgatataggtgctacggttcacgagctgtcacgggataaaaagaaggatacagtgccatggtttccacgaacgatccaagagctggatcgatttgccaaccagatcctgtcctacggagccgagctggatgcagaccaccccgggtttaaggatcctgtgtaccgcgcccgacgaaagcagtttgccgacattgcctataactaccgacacgggcagccaattcctagggttgaatatatggaagaagaaaagaagacgtgggggacggtcttcaagacactgaaaagtctgtacaaaacccacgcatgttatgaatataaccacatcttcccactgctagagaagtattgcggattccatgaggataatattccccagctggaagatgtgtcccagtttttacagacatgcaccggattccgactgcgacctgtggccggcctgctcagctcccgagattttttgggtgggctagctttcagggtgttccattgcacacagtacatcagacatgggtccaagccaatgtatacgcctgaaccagatatctgtcatgagctcctcggacacgtgccactctttagtgatcgcagctttgcccaatttagccaagagatcggactcgcctcattgggcgcacccgatgagtacatcgaaaagctggcgacgatttactggttcactgtggagtttggtctgtgcaaacagggggactctatcaaggcttatggggccggcttgttgagttcattcggagaactgcagtattgcttgtccgagaagccaaaactgcttccattggagctagagaaaactgccatccagaactacacagtcaccgagtttcagcccctctactacgtcgctgaatcctttaacgatgctaaagagaaggtgaggaactttgcagcaactattcctcggccattctcagtgaggtatgacccctacacccaacgcatcgaggtccttgataatacgcagcagctgaagatcctagctgattcaattaactctgagatcggaatcctctgtagcgctctccagaagataaaa

SEQ ID NO: 6002 - DNA, 1356 bp, Artificial Sequence
  derived and/or modified sequence
atgtcaactgcggtgttggagaatcccggtctgggcaggaagctgtcggactttgggcaggagacgtcgtatatcgaagataattgcaaccagaacggcgcgatttcgctcattttcagcctcaaagaggaggtgggagccctggcgaaagtgttgaggctgttcgaagaaaatgacgtcaacctcactcatatcgagagcagaccgtcgcgtctcaagaaggatgagtacgagttctttactcatctcgataagcgctcccttccagccctcactaatatcatcaaaatccttcggcatgacattggcgccacggtgcacgaactgtcccgggataagaagaaggataccgtgccatggtttccgcgcactatccaggaactggaccgctttgcgaatcagatcctgtcatacggagcagaattggacgctgatcacccaggatttaaggatccggtctaccgcgcgcgccggaagcaatttgcggacattgcctacaactaccggcacggtcagccaatcccgcgcgtggagtacatggaagaagaaaagaaaacttggggaactgtgttcaagaccctcaaatcgctctacaaaactcacgcctgctacgagtacaatcacatttttccactgctggagaaatactgtgggttccacgaggacaacatcccgcagctcgaggatgtgtcacagttcctgcaaacctgcaccggatttcgcctccggcctgtggcgggtctgctgtcaagccgggacttcctcggaggcctggcgttccgcgttttccactgcacgcaatacattcgccacggatcaaaaccgatgtacaccccagagccagacatctgtcatgaactcttggggcacgtcccgctgttctccgatcgctcattcgcccagttcagccaggagatcggactggctagcctgggagctccggacgaatacatcgagaagttggcgacgatctattggtttaccgtggaatttggactttgcaaacaaggagactcaatcaaggcatacggcgcaggcctcttgtcctccttcggagagctccagtactgcctttcagagaagccgaaactgctgccacttgaattggaaaagactgcgatccaaaactacaccgtcactgagttccagccgttgtactacgtggccgagtcctttaatgacgcgaaggaaaaggtgaggaatttcgctgccaccatcccgcgcccctttagcgttaggtatgatccctacactcaacggattgaagtcctggataatacccagcaacttaagattctggccgattcaatcaatagcgaaatcggaatcctgtgttcggctctgcagaagattaag

SEQ ID NO: 6003 - DNA, 1356 bp, Artificial Sequence
  derived and/or modified sequence
atgagcacggcggtcctcgagaatcctggcctgggacgcaagctgtcggatttcggacaagaaacttcatacattgaagataactgtaaccaaaatggcgcaattagcctgattttcagcttgaaggaagaagtgggagcacttgcgaaggtgcttagattgtttgaagaaaacgatgtgaaccttactcacattgaatcacggccatcgagactgaaaaaggatgagtacgaattctttacccaccttgacaagcgctccctcccagccctgactaacatcattaagattctccgacacgatattggggcaactgtccatgaactttcgagagacaagaaaaaggacaccgtgccttggttcccacgaactattcaagaacttgatcggttcgctaatcagattctttcatacggagctgagcttgatgcagatcatcccggcttcaaggatcctgtgtaccgcgcgaggcgcaaacagttcgcggatatcgcctacaattaccggcacggacagcccatcccccgcgtcgaatacatggaagaagagaagaaaacttggggcaccgttttcaaaacccttaaatcgttgtacaaaacgcatgcctgctacgaatacaaccacatctttcctcttcttgaaaagtactgcggtttccacgaggataacattccccaacttgaggacgtgtcgcagtttttgcaaacttgtaccggatttcggctccgccccgtggcaggtctgctgtcgagccgcgattttctcgggggacttgcattccgagtgtttcattgcacccagtacattaggcatggatccaagccaatgtatacccctgaacccgatatatgccacgagctgttgggtcacgtcccgctcttttcggacagatcgtttgcccaatttagccaggaaattgggctggcaagcctgggtgcacctgacgaatacatcgaaaagttggccaccatttactggttcactgttgagttcggactgtgtaagcaaggagattccattaaggcatacggtgcagggctcctctcatccttcggcgagctccaatactgcctttcagaaaaacccaagctgctgcctctggaactggaaaagacggcaattcagaattacacggtgactgaatttcaaccactctactacgtggccgaatcctttaatgacgccaaggagaaggtgcgcaattttgcagcgaccatccctcgcccatttagcgtgagatacgatccttacacccagcgtattgaagtgctggataacacccaacagttgaaaatacttgccgattccatcaactccgaaatcggaatcctttgtagcgctctgcaaaagattaag

SEQ ID NO: 6004 - DNA, 1356 bp, Artificial Sequence
  derived and/or modified sequence
atgtccactgccgtgctggaaaacccggggctcggcaggaaactttccgatttcggacaagaaaccagctacatagaggacaattgtaaccaaaatggggccatctcgctcatcttttcactgaaggaggaagtgggggcactcgctaaggtgcttagactgttcgaagaaaacgatgtcaacttgacccacattgaatccaggccttcccgcctgaagaaagacgagtatgagttctttacccatctggacaagcggtcccttcctgcgctgactaatatcattaagatcttgcggcacgacattggcgcaaccgtgcacgaactgtcgcgagataagaaaaaggatactgtgccctggttccctaggaccatccaagagctggatagattcgcaaaccagattctgtcctacggagcagaactggacgcagatcatccaggatttaaggaccctgtgtaccgggcacggcggaagcaattcgcagatattgcgtacaattaccgccatggccaacctatccctagagtcgagtacatggaggaagaaaagaaaacctggggtactgttttcaaaactttgaagtccctgtacaaaactcacgcgtgttacgaatacaaccatatctttccactgctcgagaagtattgtgggtttcatgaagataacatccctcaacttgaggatgtgtcgcagtttctgcagacttgcacggggtttagactgaggcccgtcgcaggcctgctgagctctcgggattttcttggaggactggcatttcgagtctttcattgcactcaatacattaggcatggatcaaagcccatgtacacccctgaacctgatatttgtcatgaacttcttggccatgtgcctctgttctcagaccgttccttcgctcaatttagccaggagattggtctggcttcgcttggtgccccagacgaatacattgagaagctcgcgaccatttactggtttaccgttgagtttggcctttgcaagcaaggtgacagcataaaggcatatggagcaggtctgctctccagtttcggtgaacttcagtactgtctttcagagaaacctaagctccttccgctggagctggagaaaactgccatccagaactacaccgtgacggaattccaacctctttactacgtagcagaatcatttaacgatgctaaggaaaaggtcagaaatttcgcagccaccattcctagaccgttctcggtacgctacgatccctacacgcaacgtatcgaagtgcttgacaacactcagcagcttaagatacttgctgacagcatcaactccgaaattggaatcctgtgttccgcacttcagaagataaaa

SEQ ID NO: 6005 - DNA, 1356 bp, Artificial Sequence
  derived and/or modified sequence
atgtcgaccgctgtgctggaaaacccgggcctcgggcgaaagctgagcgacttcggacaagaaacctcctacatcgaggacaattgtaatcagaatggggctatttcactcatattctcgcttaaggaagaagtgggcgcactggcaaaggtgctccgcctgttcgaagaaaatgacgtgaacctgacgcacatcgagtcacggccaagcagactcaaaaaggacgaatacgagttcttcacccacctggacaagcgcagcttgccggccctgactaacattattaaaatcctcagacatgatatcggagcgaccgtccatgaactgagcagagacaagaagaaagataccgtgccttggttccctcggactatccaggagctggaccgtttcgccaaccaaatcctgtcgtacggggccgaactggacgcagaccaccctggctttaaggacccggtgtaccgcgccaggaggaagcagtttgccgacatcgcgtacaattaccgccacggacagcccattccaagggtggaatacatggaggaggagaaaaagacgtggggcactgttttcaagaccctcaagtccctgtacaagactcatgcctgttacgagtataaccatatctttccgctgctggagaaatactgcggcttccacgaggataatattccacaactggaggacgtctcccagttcctccagacttgcactggattccggctgcggccggttgctggtttgttgagtagcagagattttctgggaggcctcgcgttccgggtgttccactgcacccagtacatccgccacgggtccaagccaatgtacaccccggaacccgatatctgccacgagctcctcggacatgtgccgctgttctcggatcgctcatttgcgcaattctcccaggaaatcggactcgcgagcctgggtgccccggatgaatatatcgagaaacttgctactatctactggtttaccgtcgagttcggactgtgcaaacaaggagattcgatcaaagcctacggtgcgggactgctgtcgtccttcggagaactccagtactgtttgtcggaaaagccgaagctgcttccactcgaactggaaaagactgcaatccagaactacaccgtgacggaattccaaccgttgtactatgtggccgaatcctttaacgatgctaaagaaaaggtccgcaacttcgccgcgactatccctagacccttttcagtccggtacgatccatacactcaacgcatcgaggtgcttgacaacacccagcagctgaagatcttggccgactctattaactcagagatcggaatcctctgctcggcacttcagaagatcaag

SEQ ID NO: 6006 - DNA, 1356 bp, Artificial Sequence
  derived and/or modified sequence
atgagcactgcagtccttgagaaccccggcctgggaaggaaactgagtgactttggacaggagacctcttatattgaagataactgtaatcagaacggcgccatttcccttatctttagcctgaaagaggaggtgggggcactggctaaggtgctgcgactgttcgaggaaaacgacgtgaatctcacacatatcgagtctaggccgtcaaggttgaaaaaggatgagtatgagttttttacacatttggacaagagatccttgcccgccttgacaaatatcattaagatcctccggcatgacatcggggccaccgtgcacgagctttcacgcgataagaaaaaggacacagtcccttggtttccccgaacgattcaggagcttgataggtttgccaaccagatcctctcttatggcgctgagctggacgctgatcaccccggatttaaagaccccgtgtacagagctcgcaggaaacagttcgccgacatagcatacaattatcggcacggccaacctatcccaagagttgaatacatggaagaggagaaaaagacttgggggacggttttcaagactttgaagagcctctataaaacccatgcttgctatgagtacaatcatatctttcctctcctggaaaaatactgtgggttccacgaggataatattcctcagctggaagacgtaagccagtttctgcaaacatgtactggctttcgcctgcgacctgtggccgggcttctgtccagcagagatttcctcggaggcctggcatttcgagtgtttcattgtacccagtatatccggcatggcagcaagccaatgtataccccagaacctgacatttgccatgagctccttggccatgtacctctgttctctgaccggtctttcgcgcagttttcacaggagatcggtctggcgagcttgggcgctcccgatgagtacatagaaaaacttgccactatctactggttcacggtggaattcggactgtgcaaacagggcgatagcattaaggcatacggggccggactccttagctctttcggtgagctgcagtactgcctcagtgagaaacctaagttgctcccgctggaactggagaaaaccgccattcaaaactataccgtcacagagttccagccattgtattatgttgccgagagctttaacgacgctaaagagaaggtcaggaacttcgccgctacaatcccgaggccgtttagtgtgagatatgacccatatacacagagaatcgaagtgctggataacacgcagcagctcaagattctggctgattctataaattcagaaattggaattctgtgcagtgcccttcagaaaattaag

SEQ ID NO: 6007 - DNA, 1356 bp, Artificial Sequence
  derived and/or modified sequence
atgtcgaccgccgtcctcgaaaacccgggattgggacgtaagctcagcgacttcggtcaggaaaccagctacattgaagataactgtaatcagaacggagccatctccctcattttctcgctcaaggaagaggtcggtgcactggcgaaggtccttagactgttcgaagagaatgatgtgaatctgactcatatcgaatcaaggccaagccggttgaaaaaggatgaatacgaattcttcacgcatctggacaagcggtcactgccggccctgactaacatcataaagatccttagacatgacatcggggctaccgtgcacgagctgagccgcgataagaagaaggacaccgtgccgtggtttccgcggaccatacaagagttggaccgctttgccaaccaaatcctgagctatggagcggagctggatgcggaccaccccggattcaaggacccggtttaccgggccaggaggaagcagttcgctgacatcgcgtacaattaccggcacggacagccaatcccgagagtggaatacatggaagaggagaaaaagacctggggcactgtgttcaagacccttaaatcgctgtacaagacccatgcgtgctatgaatacaaccacattttcccgttgctcgagaagtactgtggcttccacgaggacaacatcccacagctggaggacgtgagccaattcttgcagacctgtactggattcagactcagaccagtggcaggactcctgtcaagccgggatttccttgggggactggcctttcgcgttttccattgcacccagtacattagacacggatccaagccaatgtacacgccggaacctgatatctgtcacgagctcctggggcacgtcccgctgttctcagaccggtcctttgcacagttctcccaagaaattggcctggcgtctctcggagccccggacgagtacatcgaaaaacttgcaactatctattggttcactgtggaattcgggttgtgcaagcagggagattctatcaaggcctacggagcaggactgctgtcctcctttggcgaactgcaatactgcctcagcgagaagccaaagctgctgccgctcgaactcgaaaagactgccatccaaaactacaccgtgaccgagttccaacctctgtactatgtggccgaatcgtttaatgacgctaaggaaaaggtgcgcaatttcgccgctaccattccaaggcctttttcggtccgctacgacccttacactcagcgcattgaggtgctggataacactcagcagctgaagattttggcggattcaattaactcggagatcggtattctgtgttccgcactccaaaagatcaag

SEQ ID NO: 6008 - DNA, 1356 bp, Artificial Sequence
  derived and/or modified sequence
atgagcaccgccgtactggaaaacccggggctggggcgcaagctgtcggacttcggacaggaaactagctatatcgaggataattgcaaccaaaatggggccatcagcctgattttctcactgaaggaagaggtcggagccctggccaaggtgctcagactgttcgaagagaacgacgtgaacctgacccacatcgaatcccgcccatcacgcctcaaaaaggatgaatacgaattcttcacccacctcgacaaaaggagcctgccggccctcactaacattatcaaaatcctcagacatgacatcggtgcgactgtgcatgaactctcacgggacaagaaaaaggacaccgtgccgtggttccctcgcaccatccaggaactggatcgcttcgcaaatcaaatcctgtcatacggcgcggagctcgatgcggaccaccccggctttaaggacccagtgtaccgagcacggagaaagcaatttgccgacatcgcgtataactaccgccacggtcagccgattcctcgcgtcgagtacatggaagaggaaaagaaaacttggggaactgtgttcaagactctgaagtcgctgtacaagacccacgcatgctacgagtacaatcatatctttccactgctggagaaatactgcggtttccatgaggacaatatcccgcagttggaggatgtgagccaattcctccagacttgtactggtttcagactcagacctgtcgcggggctgctgtcgtccagggattttctcggtggactggcgttccgggtctttcactgcacccagtatatccgccacggctcaaaacctatgtacactccagaacccgacatctgccatgaactcttgggacacgtcccgctcttctccgaccgctcgtttgcacagtttagccaagaaatcggactggcatcgctcggagcacctgacgagtacatcgaaaaactggccactatctactggttcactgtcgagttcgggctgtgtaagcagggagattcgatcaaggcctacggtgctggactcctgtcatcatttggtgagctgcaatactgcttgagcgagaagccaaaacttctgccacttgagctggaaaagactgcaattcagaattacaccgtgaccgaattccagcccctctactacgtggccgagtcctttaacgacgctaaagagaaggtgcgcaattttgccgctaccatcccgcgaccgttctccgttaggtacgatccgtatacgcaacgcatcgaagtcctcgataatacccagcagctgaagatcctcgccgattccatcaatagcgaaatcggaatcctgtgcagtgcccttcaaaagatcaaa

SEQ ID NO: 6009 - DNA, 1356 bp, Artificial Sequence
  derived and/or modified sequence
atgtccacagctgttcttgagaaccctgggcttgggaggaaattgtccgattttgggcaggaaactagttacattgaagataattgtaaccagaatggggccatctcactgatcttcagtctgaaagaagaggtgggggcactggccaaggtgctccgcctgttcgaagaaaatgacgtgaatctaactcacatcgaatcacggccttctcggctcaagaaagatgagtacgaattctttactcatctcgacaaacgctctctccctgctctaacaaatatcatcaaaattttacgccatgacatcggggcaacagtgcacgaactgtctagagataaaaagaaagatacagtgccatggttcccgcggacaatccaggaacttgatcgctttgctaaccagattctgtcatacggggcagagcttgatgccgaccacccagggttcaaagatccagtttatcgggctcgacggaaacagtttgctgatatagcttacaattatcgacatggacaacctatcccacgagtcgaatacatggaagaagaaaaaaaaacatgggggactgtgtttaaaacgctcaaatctctgtacaaaactcacgcctgctacgaatataaccatatattccctcttctggaaaaatattgtggatttcatgaagataacataccccagttagaagatgtgagtcagtttctgcagacgtgcacaggatttcgcttgagacctgtagcaggactactctcctcgagagatttcttgggagggctcgcctttcgcgtgttccactgcacacagtacatacggcatgggtcgaaaccaatgtacacacctgaacccgatatctgccacgaactactggggcacgtgcctcttttttctgatcgaagttttgcacagttctcccaggagataggactggcttcactgggagccccagatgaatatattgaaaaactcgcaacaatctattggtttacagtggaattcgggctctgtaaacagggggatagtatcaaagcatatggagccgggctgctctctagttttggggaacttcagtattgtttatcagaaaaacctaaacttttgcccctcgaactcgagaagacagccatccagaactatacagtgactgaatttcagcccctttattatgtcgctgagtcattcaatgatgcaaaagaaaaagtgaggaacttcgccgctacaatccctcgaccctttagtgtgagatatgatccctatactcagagaatcgaagtgctcgataatacacagcagctgaaaatactagcagacagtattaattctgagataggaatactctgctctgctctgcagaaaatcaaa

SEQ ID NO: 6010 - DNA, 1356 bp, Artificial Sequence
  derived and/or modified sequence
atgtccacagcggtacttgagaatcctggcttgggccgcaaactttctgactttggacaggaaacatcatatatcgaggataactgcaaccagaatggagcgatctctctcatcttttcactgaaggaggaagtgggcgccctcgccaaagtgttacgacttttcgaagaaaacgacgttaacctcacacacatcgaatcccgcccttctagactgaagaaagacgagtacgagttctttacccacctggacaagcgatccctgcctgccctgacgaacataatcaagattctgagacatgatatcggtgccacagtacatgaactgagtcgcgacaaaaagaaggatacagtgccgtggttcccacgtacaattcaggagcttgaccgcttcgcaaaccaaattctgtcttatggagcagagctggacgcagaccatccgggctttaaggacccggtttatagagctcggcgtaagcaattcgcggatattgcatacaactaccggcacgggcaaccaattcccagggtggaatacatggaagaagagaagaagacttgggggaccgtcttcaagacgctgaaatccttgtataaaacgcacgcgtgttacgaatacaaccacattttccccctgctggagaagtattgcgggtttcatgaggacaacatcccacagcttgaggatgtttcgcagtttctgcagacgtgcaccggctttcgactcaggccagtcgcgggtctcctcagttctagggacttcttgggagggctggccttccgggtctttcactgtacgcagtacatacgacacggctcaaaacccatgtatactccagagccagatatctgtcacgagctgttgggacacgtgcccctgtttagcgaccgaagcttcgctcagttttctcaagagattggattggcctcactcggggctcccgacgagtatatcgaaaaattggccactatctactggttcacagtggaattcggcctatgcaagcagggagattccattaaagcctacggggccggcctcttgagctcattcggcgagctccaatactgcctgtccgagaaacccaagttattgccgctggagctagaaaaaacagctatccagaattataccgtaactgaatttcagcccttgtactatgtggcagagtccttcaatgacgccaaggagaaagtccggaactttgccgcaacaatacctaggccatttagtgtgcgctatgatccatatacacagcggatcgaagtcctcgataacactcagcaactgaagattcttgccgattcaatcaattcagagatcgggatcctgtgttcggcgctccagaaaattaag

SEQ ID NO: 6011 - DNA, 1356 bp, Artificial Sequence
  derived and/or modified sequence
atgtctacggccgtcttagagaaccccgggctgggccgtaaactgtctgactttggacaagaaacatcttatatcgaggacaactgtaaccaaaacggcgcaatttcgcttattttttccctgaaggaggaagtgggagccctggcgaaggtcctgaggttgttcgaggaaaatgacgtgaatcttacccacatcgaatctcgcccttcacgcttgaagaaggatgagtatgaatttttcacccatctcgataaacggtctttgcctgccctcacaaatattattaagatcttgagacatgatataggcgccactgtgcatgagctatcacgggacaagaagaaagataccgtcccttggtttccacgaacaattcaagaactggaccggtttgccaatcagattctatcctatggagccgagttagatgccgaccacccgggattcaaggacccggtatatcgcgctcgccgaaaacagttcgccgatatcgcatataattaccgccatggtcaaccaatacccagagtcgagtacatggaggaggagaaaaagacctggggcaccgtgttcaagacacttaagagcttatataagacacatgcttgctatgaatacaatcatatctttcccttgctggagaaatattgcggcttccacgaggataatattccccaactggaagacgtgtcacagttcctgcagacatgcaccggttttagactgagaccagtggccggcctgttgtccagcagggattttctcggaggtctggcattcagagtgtttcactgcacccagtatatacggcatggaagtaagcctatgtacactcctgaacccgatatatgtcacgagctacttgggcacgttccactattctcggacaggtccttcgctcagttcagtcaagaaatcggtctggcatcactaggggcccccgatgagtatattgaaaaacttgccacaatatactggtttacagtcgagtttggtctgtgcaagcagggggactcaatcaaggcctatggagccggacttctgtccagcttcggcgagctgcagtactgccttagtgagaaacccaagttgctccctctggagctcgagaagactgccatccagaactacacagtaaccgaatttcaaccgctctattacgtggctgagtcattcaacgacgcgaaggaaaaagtgaggaactttgcagcgactattccacggcctttttcagtgcgttacgacccttacactcagcggatagaggtgctggacaatacacagcaactcaagattctggctgatagtattaactctgaaattggcatcctgtgtagcgctctgcaaaagatcaaa

SEQ ID NO: 6012 - DNA, 1356 bp, Artificial Sequence
  derived and/or modified sequence
atgtcgactgccgtattggagaatccaggacttggtcgtaagctgtctgattttggccaggagactagctacatcgaagacaactgcaatcagaatggtgcgattagcctgatattttcgctcaaggaagaagtgggtgcactcgcaaaggttttgaggctgttcgaggagaacgacgtgaacctcacccacattgagtcgcgaccatcaagacttaagaaagacgaatacgaattcttcactcatctcgataaacgctcgctaccagccttgacaaatattatcaagatcttgcggcatgacattggtgcgacagtgcatgagctgagccgagacaagaaaaaagataccgtcccttggtttccacgaacgatccaggaactggacaggtttgcgaaccagatcctaagctatggtgctgaacttgacgcggatcatcccggctttaaggacccggtgtaccgcgctcgcagaaagcagtttgccgacattgcatataattaccgccacggtcagcctatcccgcgggtcgagtacatggaagaagagaagaagacgtggggtaccgtcttcaagaccctgaagagtttgtataagacccatgcttgttatgagtataaccatatttttccacttctcgagaagtactgcggcttccacgaggataacattcctcagttggaagatgtttcgcaattccttcagacttgcactggtttcaggcttcgtccagtggccggacttttaagttctcgcgacttcctaggagggttagcttttcgagtcttccactgtacccagtacatacgtcatggctcgaagccgatgtacacaccggagccagacatttgccatgagttgcttggtcacgtcccgctattctccgataggtccttcgcccaattttcccaagagattggtttggcaagtctcggtgccccggacgagtatatcgaaaaactcgcaaccatttactggttcacagttgaattcggtctgtgcaagcaaggagattctataaaggcatacggcgcagggctactgtcttcatttggcgagcttcagtattgcctctcggaaaagcccaaactgttgccattagaactggaaaaaactgctatccagaattacaccgtgacagaattccagccgttgtactatgtggcggagagtttcaacgatgcaaaggagaaagtgcgaaatttcgctgcgactataccccgtcccttttccgtccgctatgacccttacacgcaacgaattgaggtcctggataacacccaacagctaaaaattctggctgatagcatcaactctgagatcggcattctttgctccgctttacagaagataaag

SEQ ID NO: 6013 - DNA, 1356 bp, Artificial Sequence
  derived and/or modified sequence
atgtcaaccgcagtgcttgagaaccccggtcttggccggaaacttagcgactttggtcaggagacttcttacattgaagataattgtaatcaaaacggagcaatttcgctgattttctcgctcaaggaagaagtgggagcgcttgcaaaagtgctgcggctctttgaagaaaacgacgtgaacctgactcacattgagtcgaggccgagccgactcaagaaggatgaatacgagtttttcacgcacctcgataagcgctcccttcctgctctcacgaacattatcaaaatcctcaggcatgatattggagctaccgtgcatgagctgagcagagacaagaagaaggatactgtgccttggtttcctcggaccatacaggaactcgataggttcgccaatcagatcttgtcgtacggcgcagaacttgacgcggatcaccccggctttaaggaccccgtctacagggcacggagaaagcaatttgcagacattgcgtacaactaccgacatggacaaccgattcctcgcgtggaatacatggaggaagaaaagaaaacttggggtactgtgttcaaaactcttaaatccctttacaagactcacgcatgttacgaatacaatcatatcttccctctcctggaaaagtactgtgggttccatgaagataacattcctcaactggaagatgtgtcgcaatttcttcaaacctgcaccgggtttagactgcgccctgtggcgggacttctttcatctcgggattttcttggagggctggcctttcgcgtttttcattgcactcagtacatacgccatggcagcaagcctatgtacacccctgagccggacatctgtcacgagctgctcggacatgtgccattgttttcggaccgctcttttgcacagttctcacaagagatcgggctggcatctctgggcgctcctgacgagtatatcgagaaacttgccaccatttactggtttaccgtggaatttggactgtgtaagcagggagattcgattaaagcatatggtgcgggcctcctctcatcctttggagagctccagtactgcctgagtgaaaagcccaagttgcttcccctggaactcgaaaagacggcaattcaaaactataccgtcaccgaatttcagccactgtactacgtagcggagtcctttaacgatgctaaggagaaggtgcgaaactttgcagcaaccatacctcgacctttctcagtcagatacgatccttatactcaaagaattgaagttcttgataacacccaacaactgaaaatcctggccgactcgatcaattccgagatcgggatcctttgttcagcactgcagaagattaaa

SEQ ID NO: 6014 - DNA, 1356 bp, Artificial Sequence
  derived and/or modified sequence
atgtctactgctgtcctggaaaacccaggcctggggagaaagctgtccgattttggccaggagacgagctatatcgaagacaattgcaatcagaatggtgccattagcctgatcttctcactgaaggaggaagttggcgctttggctaaagttctgcggttgttcgaggagaacgatgtaaatctgactcatattgagagtcgccctagtaggttaaaaaaggacgagtacgaatttttcactcacctcgataagcgtagcctccccgccctcacaaatattatcaaaattttaaggcacgatatcggagcaacagtccacgagctgtcgcgggacaaaaaaaaagacaccgttccttggtttccgcggaccattcaggagttggaccggtttgcaaatcagatccttagctatggcgctgaattggatgctgaccatccaggttttaaagatccggtctacagagcacggcgcaaacagttcgccgacatcgcttataattacaggcatggccagccaattccccgcgtcgaatacatggaggaggaaaaaaaaacgtggggcaccgtgtttaagactctgaagagtctgtacaagacccatgcctgttacgagtacaatcatatatttccactgttagagaaatactgcggtttccacgaggacaatatcccccagctggaggatgtgagtcagttcctgcagacctgtactggctttaggttgcgcccagtcgctggactgctctcctccagagatttcctgggaggactcgctttcagagtatttcactgtactcagtacataaggcacggctcgaagcctatgtatacacccgagcctgacatctgccacgagcttctcggtcacgtgcccctgttctccgacagatctttcgctcagttcagtcaggagattgggctagcctcccttggcgcaccagatgaatacatagaaaagctagccaccatctactggttcactgtcgagttcggtctttgcaagcagggagatagcataaaagcttacggcgctgggctgctgtcctcattcggagaactgcagtactgccttagcgagaagccaaagctgctgcctctggagctggaaaagactgcgattcaaaattacaccgtgactgaatttcagcctctgtactacgttgctgagtcatttaatgatgctaaggaaaaggtccgcaacttcgccgctacaatacccagacctttctccgtgcgatatgacccctacacgcaaaggatcgaagtgctcgataacacccaacagctgaaaattttggcagatagtatcaactcagaaatcgggatactgtgtagtgctctgcaaaagatcaag

SEQ ID NO: 6015 - DNA, 1356 bp, Artificial Sequence
  derived and/or modified sequence
atgagcacggcagtgctggagaacccgggactgggaaggaagctgtccgattttggtcaagagacttcctacatcgaggacaattgcaaccagaacggggcgatctcactcatcttcagcctcaaggaagaagtcggagctctggcgaaggtcctgcggctctttgaagaaaatgacgtgaacctgacgcacatcgagagccggccttcgcgcttgaagaaggacgagtatgaattcttcacccatctcgacaagcggtcgctgccagccctgacgaacattatcaaaatcctgaggcacgacatcggagcaactgtccatgaactgtcgagagataagaagaaggatacggtcccgtggttcccgcgtaccatccaggagcttgataggttcgccaaccagatcctgtcctacggcgcagaactggatgcggatcaccctgggtttaaggatccagtgtaccgcgcccgccgaaagcaattcgctgacatcgcatacaactacagacatggacagccgataccgcgcgtggagtacatggaagaagaaaagaaaacctggggcactgtgtttaagactctgaagagcctgtataagacccacgcatgctacgagtataatcacatcttcccgctgctggaaaagtattgtgggttccacgaagataacatcccacagctggaggatgtgagccagtttctgcagacctgtaccggctttcggctccggcccgttgctggtttgctgagctcgcgggacttcctcggaggcctcgcctttcgggtgttccattgcactcaatacatccggcacggatccaaacctatgtacactccagaaccggatatctgccacgaacttctgggccatgtcccgctcttctcagacagatccttcgcacagttctcccaagagatcggtttggcttcgctgggggctccggatgagtacattgagaaactcgcgaccatctattggttcaccgtggaattcggattgtgcaagcagggggatagcatcaaagcatacggggcaggattgctgtcatcgtttggtgaattgcagtactgcctgtcagaaaaaccaaaattgctcccactggaattggaaaagactgccatccagaattacaccgtcactgaattccaacctctgtactacgtcgctgaatcgtttaacgacgcgaaggagaaagtgcgcaactttgcggccaccatcccacggccgttctccgtgcggtatgatccgtatactcagaggatcgaggttctggacaacacccagcagctgaagatcctggccgacagcatcaatagcgagatcggcatcctctgcagcgctctccagaaaatcaag

SEQ ID NO: 6016 - DNA, 1356 bp, Artificial Sequence
  derived and/or modified sequence
atgagtacagctgtactggagaaccctgggctgggacgcaagttgtcagatttcgggcaggaaaccagctacattgaagacaattgcaatcaaaacggggccatcagtttgattttcagcctgaaagaggaggttggagctcttgcaaaggtgctccggctgtttgaagagaatgacgtgaacctgactcacattgaaagccgcccatcccggctgaagaaagacgagtacgagtttttcacccatctggacaagaggtcactgcctgctttgacgaatattatcaagatcctcaggcatgacatcggtgctaccgtgcatgagctttcccgggacaaaaagaaagacacagtgccctggttccctaggactatacaggagcttgatagattcgcaaaccagatactgtcctacggcgcagagctggacgccgaccatcctggattcaaagaccctgtgtacagagctcggcgaaagcagttcgccgacatcgcatacaattataggcacggccagcctattccccgggttgaatatatggaagaggagaagaaaacatggggcaccgtcttcaagacactgaaatctctgtacaagacacatgcatgctatgagtataatcacatcttccccctgctcgagaaatactgcgggttccacgaagacaatatccctcaactggaggacgtgagccaattcttgcaaacctgcaccggctttagactgcgcccagtcgctgggctgctgtcttctcgagatttcctcggcggtctcgctttccgggtcttccattgcacacagtacattaggcacgggtctaaacccatgtacactcctgaacctgatatttgtcacgagctgctcggacatgtgcccctgttttcagaccgcagtttcgctcaattctcacaggaaatcggactggcctcacttggagcccccgatgagtatattgagaagctggcgacgatctactggtttacagtcgaatttggcctgtgcaaacaaggggattccattaaggcctacggggctggcctgctgagctccttcggagagctgcagtactgtttgagcgagaaacctaagctgctccctcttgaactggaaaagaccgccatccagaactacacagtaaccgagttccagcccctgtattacgtggctgagtcttttaacgatgccaaagagaaggtgcggaatttcgctgccaccattccccggcctttttcagtccggtacgacccgtatacacagcggatcgaagtcctcgacaatacccagcagctcaagattctcgcagactccattaatagtgaaatcgggatactgtgcagcgctctgcagaagatcaag

SEQ ID NO: 6017 - DNA, 1356 bp, Artificial Sequence
  derived and/or modified sequence
atgtcgaccgctgtgctggagaatccaggactgggaagaaaacttagcgattttggtcaggaaacgtcatacatcgaagataactgtaatcagaacggagctatttcgttgatcttctctctgaaggaagaggtgggcgcactggcaaaggtcctgcgactcttcgaggagaacgacgtcaacctgactcatatcgaaagccggcctagcagattgaaaaaagatgaatacgaattctttacccatcttgataaaagatccctgccggcacttactaacataatcaagattttgcggcatgatataggagcaaccgtgcatgaactctcgcgggataagaagaaggataccgtaccgtggtttccacgcacgattcaagagcttgacaggttcgctaaccagatactttcctacggggccgaactggacgccgatcacccaggttttaaggaccccgtctaccgcgcacgcagaaagcaattcgctgacattgcatacaattacagacacggtcaacctataccgcgagtggagtacatggaggaagagaaaaagacttgggggaccgtctttaagactcttaagtcgctttacaagacccacgcgtgctacgagtacaatcacatttttccccttctcgaaaagtactgcggattccatgaggacaacatccctcaactggaagatgtgagccagtttctccaaacttgtacgggtttcagactgcgtcctgtggccggccttctgagctccagggattttcttggcggtctggcttttcgggtttttcattgtacgcagtacattcgtcatggatcaaagccaatgtatactcccgaaccagatatatgccatgagctgctcggccacgtacctctttttagcgatcgctccttcgcccaattttcccaagaaatcgggcttgcatcacttggcgcgcctgatgagtacatcgaaaaacttgcaaccatttactggttcacggtcgaattcggtctttgcaagcaaggcgactccatcaaggcgtacggcgccggattgctgagcagcttcggtgaattgcaatactgtctgtcggaaaagccaaaactgctccctctggagcttgaaaaaactgcaatacaaaactatactgtgaccgagtttcagcctctttactatgtggccgaatcctttaacgacgcgaaggaaaaggtgcgcaattttgcagcaactatcccccgccctttcagcgtgagatacgatccatacacccagcgcatagaagttttggataatacccagcagctgaagattctggccgatagcatcaactccgaaattggaatactctgttcagcacttcaaaagattaaa

SEQ ID NO: 6018 - DNA, 1356 bp, Artificial Sequence
  derived and/or modified sequence
atgagcacagccgtgctagaaaaccctggcctgggacgaaagctatccgactttggccaggagacatcctacatagaagataactgcaaccagaacggggcaatttccctgatattcagcctaaaggaggaggtgggcgctctagctaaagtcctgagactgttcgaggaaaatgatgtgaacttaacccacatcgaaagtcgtccttctaggctcaagaaggacgaatatgaattctttacacacctcgacaaaaggtctcttcctgcattgaccaatatcattaagatactcaggcatgatatcggagccacggtgcacgagctgagcagggataaaaagaaggatactgtgccctggttcccccgtaccattcaggagctggaccgtttcgccaaccagatcctttcttacggcgcagaactggacgccgaccaccctgggtttaaagaccctgtatatcgtgcccgaaggaaacagttcgcagatattgcttacaactaccggcatgggcagcccatcccccgcgtcgagtatatggaggaagagaagaagacctggggcaccgtgtttaaaacacttaaaagcctttacaagacacatgcctgctacgagtataatcatatcttccctctgctggagaaatattgtgggtttcacgaggacaacatcccccagctagaagacgtgagccagttccttcagacatgtaccggatttaggcttcgccctgtggcagggctgctgagcagccgggatttccttgggggtctggcctttagggtattccattgcactcagtatatacgacacggctctaaaccaatgtataccccagagccggacatttgccacgaattacttggccacgtacccttatttagcgaccggtccttcgcccagtttagccaggagatagggctggcctctctaggcgcccctgatgaatacattgaaaaacttgccaccatctattggttcaccgtggaatttgggctctgcaaacagggtgactccatcaaggcttatggggcagggcttttgagctcttttggggaattacagtattgtctctccgagaagcccaagctattacccctagagcttgaaaagactgcaatacagaactatacggtaaccgaattccagcccctgtactatgttgctgagagcttcaatgacgccaaagagaaggttcggaatttcgcagcaacaatccctcggccattcagcgtgaggtacgacccctacacccagagaatagaagtgctggataacacccagcagctgaaaattctggccgacagcattaactccgagataggtatcctttgcagcgcactccaaaagatcaaa

SEQ ID NO: 6019 - DNA, 1356 bp, Artificial Sequence
  derived and/or modified sequence
atgtccaccgcagtgcttgaaaatcccggactgggaagaaagctctcggattttggccaagagacttcctacatcgaagataactgtaatcagaatggagcaatctcgctcatctttagccttaaagaagaggtgggggcactggcaaaagtgttgcgcctgtttgaggaaaatgacgtgaatctcacccatattgaatccagaccatcgcggctgaagaaagatgaatacgagttcttcacccatctcgacaagcgctccttgcctgcgctgaccaacattatcaagatacttcggcacgatattggcgcaaccgtgcatgaattgtccagagacaagaaaaaggatactgtcccctggtttccgcgaaccatccaagaacttgatcgttttgccaaccagatcctttcgtacggtgcagagcttgatgcagaccatccaggatttaaggatcctgtgtatcgggcgaggaggaagcagttcgcagatattgcctacaactaccgacacggtcaacctatccctcgcgtggagtatatggaagaggagaaaaagacctgggggaccgtgttcaagactcttaagtcattgtacaaaacccacgcatgctacgaatacaatcacatctttcctctccttgaaaagtactgtggttttcatgaagataacattccacaactcgaggacgtgagccaattcctccagacgtgtacgggattccgcctcagacctgtggcaggattgctgtcatcaagagattttcttgggggactggcatttcgggtctttcactgcactcaatacattaggcatggttctaagcctatgtacacccccgagcccgatatttgtcatgagcttctcgggcatgtgccccttttctccgatagatcgtttgcacaattttcccaggagattggacttgcgagcctgggagctccagatgaatacattgagaaattggcaactatctactggtttaccgtggagttcggactgtgtaaacaaggagacagcatcaaggcatacggtgcaggcttgctcagctcctttggtgagcttcagtactgtctctcggaaaagccaaaactgcttccccttgaactcgaaaagaccgcaattcaaaactacaccgtcaccgaattccaacctctttactacgtggcagaatcctttaacgacgctaaagaaaaggtgagaaacttcgcagctaccatcccccggccttttagcgtgcgctacgacccatacactcaacgcattgaggtgcttgacaacactcaacaactgaagattttggcggattccattaactcagaaatcggaattctgtgttcggcactgcagaagattaag

SEQ ID NO: 6020 - DNA, 1356 bp, Artificial Sequence
  derived and/or modified sequence
atgtccaccgcagtgctcgagaaccccggattgggacgaaagctcagcgattttggccaagaaacttcctacatcgaggataactgtaaccagaatggagccatttccctcatcttttcgctgaaagaagaagtcggggcgcttgcaaaagtgttgcgactcttcgaggagaacgatgtgaacctgacccatatcgaatccagaccgtcgcggcttaagaaggacgaatacgagtttttcactcatctggataaacggtcgctgccagcactcactaacattatcaagatcctgcggcacgatattggtgccactgtgcatgagctcagccgggacaagaaaaaggacacggtcccgtggtttcctaggactattcaagaactggatcgcttcgccaaccagatccttagctacggcgcagaactggatgcagatcatcctggctttaaggatccagtctaccgggcgagacggaagcaatttgcagacattgcctacaattacagacacggacaacctattcctagagtggaatacatggaagaagaaaagaaaacctggggtactgtgttcaagacgcttaagtccctctataagacccacgcgtgttatgaatacaaccacatatttcctcttctggaaaagtactgcggttttcatgaggacaacatcccacagttggaggatgttagccagtttctccaaacctgtactggattcagactgcgccccgtggctggactcctcagctcacgcgattttcttggagggctggcatttagggttttccattgcacccaatacattcgccacggttcgaaaccaatgtacacccccgaacctgatatctgtcacgagcttctcggacatgtgcccttgttttccgatcgctccttcgcccagtttagccaggaaatcgggcttgcatcccttggagccccagatgaatacatagagaagctggcaaccatttactggtttaccgtggaattcggattgtgcaagcaaggcgactcaattaaggcatacggagccgggctcctgtcgtcgtttggagaacttcagtactgcctgagcgagaaaccaaaactccttccactcgaacttgagaaaactgcgatccagaattacaccgttaccgaattccaaccgctgtactacgtcgcggaatcctttaacgatgccaaggagaaggtgcgcaactttgcggcaaccatcccacgccctttttcggtgaggtacgatccatacacccaacggattgaagtgctggacaacactcaacagctgaagattcttgcagattcaattaacagcgagatcggaattctttgtagcgcactgcaaaagattaag

SEQ ID NO: 6021 - DNA, 1356 bp, Artificial Sequence
  derived and/or modified sequence
atgtcgactgctgtacttgaaaaccccggtctgggtaggaagttgtcagatttcgggcaggagacctcatacattgaagataactgtaatcagaacggagccatctctcttatcttctccctcaaggaagaggtgggggcactcgctaaggtcctcaggcttttcgaggaaaacgatgtcaaccttacccacatcgaaagcagacctagccggctcaaaaaagatgagtatgagttttttacacatctggacaagcgatcccttcctgctctcactaatatcattaaaattcttaggcatgacataggggctaccgttcacgagctctcacgggataaaaagaaagatactgtgccatggtttcctcgtacaattcaagagttggatcgattcgcaaaccaaattcttagttatggtgctgaactcgatgccgatcacccagggtttaaagatccggtgtatagggcaaggcgtaagcaattcgctgatattgcttacaattacaggcatggccaaccaattccacgtgttgaatatatggaggaagaaaagaaaacctggggtacggtatttaaaacactcaagtcactatacaagactcatgcttgctacgagtacaaccatatttttccattgctggaaaagtactgtggatttcatgaagataatatccctcaacttgaggacgtatctcagtttttgcaaacgtgtaccggctttaggcttagaccagtggcaggtttgctgagcagccgtgatttcctgggcggactcgccttcagagttttccattgtactcaatatatccgtcacggttcgaagccaatgtacacccctgaacctgatatctgccatgagcttttagggcatgtccccttattttcagatagatcttttgctcaatttagtcaggagattggtttagccagtttgggcgccccggatgagtacatcgaaaaattggccacaatctattggtttacagtcgagttcggactgtgcaagcagggtgattctattaaggcttatggggctggattgctttcttcctttggagagctccaatattgtctttctgagaaacctaaactgctccctctggagcttgagaaaactgccatccaaaactatacagtcactgagttccagcctctttactatgtggctgaaagtttcaatgatgccaaggaaaaggttagaaattttgcggcaacaattcctcgaccatttagcgtacgttatgatccttatacccaacgtatagaggtgctcgataacacgcaacagttgaagattctcgctgactccataaattctgagatcggcatattgtgttccgctcttcagaaaatcaag

SEQ ID NO: 6022 - DNA, 1356 bp, Artificial Sequence
  derived and/or modified sequence
atgtcgactgccgttctagagaaccctggcctaggtagaaaactaagcgacttcggacaggagacctcatatattgaggacaactgcaaccaaaacggcgcgatttcactgattttctccctgaaggaggaagtgggtgctttggccaaagtccttagactcttcgaggagaacgacgtgaacttgacccacattgaaagtaggccttctcggttgaagaaagacgagtatgagttcttcacccatctggacaagcggtccttacctgctctgactaatataataaagatacttcggcacgacataggtgccacagtccacgagctgagccgggacaagaagaaagacaccgtgccctggttcccgcgcactattcaggaactggaccgcttcgccaaccagattctgagttatggggccgagcttgacgctgaccatccggggttcaaggatccggtgtaccgtgcgcggcgcaagcagtttgcggatatcgcctataattatagacacggccagccgatccctagggtggagtacatggaagaagaaaagaaaacctggggtactgtattcaagaccctgaaatctctgtataaaacccatgcctgctacgaatacaatcacatcttccccttactagaaaagtactgcggtttccatgaagataacataccacagctggaggacgtgtcccaatttttacagacatgcactgggttcagactccgtcctgtggctgggctgctgagcagtagagacttccttggcggtcttgccttccgtgtatttcactgtacccagtacatccggcatggctcaaaacctatgtacacaccggaacctgacatctgtcacgagcttttgggccacgtccccttattctccgaccgcagcttcgcacaattctcacaggaaatcggtctggctagtctgggtgcccctgacgagtatattgaaaagctggctactatctattggttcactgttgagttcgggctctgcaaacagggggactcaatcaaagcttacggcgctggccttctctcctcatttggtgagctgcagtattgcctcagtgaaaagccaaaactactgcctctagaactggagaagaccgccatccagaattatacggtgacagagtttcagcctctgtactacgtggcagaatctttcaatgacgcaaaagagaaggttcgaaactttgccgcgacgattccgcgccctttttctgtaaggtacgacccgtatacccaacggatagaagtgcttgataacactcagcagctcaaaatccttgcagacagcatcaattccgagataggcatcctatgtagcgccctccaaaaaataaaa

SEQ ID NO: 6023 - DNA, 1356 bp, Artificial Sequence
  derived and/or modified sequence
atgagcaccgcagttttagagaatcctggtttaggccgtaaactttccgatttcggacaggagacgtcctacatcgaggataactgcaaccagaacggggccatatccctgatcttttctcttaaagaagaggtgggggcgctagccaaggttcttaggctctttgaggaaaatgatgtcaatctcactcacatcgaatccaggccatccagactcaagaaagacgaatacgaatttttcactcatctcgataagagatccctgccagcgttaactaacattatcaagatcctcagacacgatataggggcaaccgtacacgagttgagtagggacaaaaaaaaggacacagtgccttggtttccccgtactattcaagagttggaccgttttgctaaccaaatcctttcttacggtgccgagctcgacgccgaccaccctggatttaaggatcccgtctatagggcaagacgcaagcagttcgccgacatcgcctataattacagacacggccagcctatccctcgagtggagtatatggaagaggagaaaaagacgtggggtacagtgttcaaaaccctgaagtctttgtataagactcacgcctgctatgagtacaaccatatttttccacttctggagaagtactgtgggttccatgaggacaacatcccacagctggaggacgtgtctcagttcttgcagacctgtactgggttcagactgcgccccgttgccggcctactgagcagcagggattttcttggaggacttgcgttcagggtcttccattgtacgcagtatatccggcatggatcaaagccaatgtacacaccagagcctgacatctgccacgagctcctgggacatgtaccgctgttctccgacaggagctttgctcagttttcacaggaaatcgggctggcttctctgggagcgcctgatgagtacattgagaagctcgccaccatctactggttcacggtggagttcggactttgtaaacagggagattccattaaggcatacggtgctgggttgctgagctcctttggtgaactgcaatattgcctcagcgagaagccaaagcttctgcccctggagctggaaaaaactgctattcagaattacaccgtcacagagtttcagcctctgtactacgtcgctgagtctttcaacgatgccaaggagaaggtaaggaatttcgcagcaactatacctcgccccttctctgtccgttatgatccttatacccagagaatcgaggttctcgataacactcagcaactgaagatcctggccgactccatcaatagcgaaattggcattctttgtagcgctctgcagaagataaag

SEQ ID NO: 6024 - DNA, 1356 bp, Artificial Sequence
  derived and/or modified sequence
atgtcaactgcagtgttagaaaatccaggcttaggaaggaagctctcagacttcggacaagagacctcatatattgaggataattgcaatcaaaatggagcgatcagtcttatcttttcgcttaaggaagaagttggggcgctggctaaagtgctccgtctttttgaggaaaacgacgtcaatttaacacatattgaatcacgtccgtcacgactcaaaaaagatgagtacgagtttttcactcatttggacaagagaagcctgccggcgttgaccaacataatcaaaatcttacggcacgatataggagcgacggtgcatgaattgtctcgcgataaaaaaaaggacacagtaccttggtttccccgaaccattcaagagctggatcgatttgcgaatcagattttgtcttatggcgcggaactggacgctgatcatcctggttttaaggatcctgtgtaccgagcacgccggaaacaattcgcggatatcgcgtataattacaggcacggtcagccgattccacgcgtcgaatatatggaagaagaaaaaaaaacgtggggcaccgtctttaagacgttgaaatctctttataagacgcacgcgtgttatgagtacaaccatatctttccattgctggagaaatattgcggttttcacgaagataatattccgcaattagaggatgtatcccagttcttacagacgtgcaccggctttcgcttaagacctgtggccggactgttatcgagccgggactttcttggtggcttggcttttcgtgttttccactgcacacaatatatacggcatggctcaaaacctatgtacaccccggaaccggatatttgtcatgaacttcttggccatgtcccacttttttctgatcggtcttttgcgcagttttctcaagagatcggcctcgcgagccttggcgctccagatgagtatattgagaaactggccacaatctactggttcactgttgaattcggattatgtaaacaaggagattccattaaagcgtatggagcaggcctcctgtcatcttttggggaactacaatattgcttatcagagaagccgaagctgctgccgttagaattagagaaaacagccattcagaattacaccgtgactgaattccaaccgctctactatgtcgcagaatctttcaacgatgctaaagaaaaagtgcggaatttcgcggccacaatcccgcggccgttctcggtacgttacgatccatatactcagcgcatcgaagtgcttgataatacgcagcaattaaaaattctggccgattctatcaactcagaaatcgggattctctgcagcgcattacaaaaaatcaaa

SEQ ID NO: 6025 - DNA, 1356 bp, Artificial Sequence
  derived and/or modified sequence
atgtcgactgcagtgctggaaaaccccgggttgggtcgtaagctcagcgatttcggccaagaaacctcttacattgaagataactgcaatcagaacggcgcaattagcctgatctttagccttaaggaagaggtgggagcccttgcaaaagtgctgcgcctttttgaagagaacgacgtgaaccttactcacattgaatcaaggccatcaaggctgaagaaggatgaatacgagttctttactcatcttgataagaggtccctcccagcactgaccaacataatcaaaatcttgaggcacgatatcggagcaaccgtgcatgaactctcgagagacaagaagaaggacactgtcccttggttcccgagaaccatacaagagctggatcgctttgcaaatcagattctgtcatacggcgcagaacttgatgcagaccatcctggattcaaggatcctgtgtaccgcgcaagacggaaacagtttgccgatatcgcatacaattacagacatggccaaccgattccaagagtggaatacatggaagaggagaaaaagacgtggggtaccgtctttaagactctgaagtccctgtacaaaactcatgcgtgttacgagtacaatcatatctttcctctgctcgaaaagtactgtggatttcatgaagataacattccgcaattggaggatgtgtcacagtttcttcagacttgtaccggcttccgactgcgaccagtggcaggtctgctgtcatcgcgggactttcttgggggactggcattcagggtgtttcattgtactcaatacattcgacatggctccaagcccatgtacacccctgaaccagacatttgccacgaactcctcggacatgtgccactgttctcggataggagctttgcacaattttcccaagagatcggactcgcgtccttgggtgccccagatgagtacattgaaaaactggccacgatttactggttcaccgtcgaatttgggctgtgcaaacagggcgacagcattaaagcctacggggcaggcctgctctcatcattcggagagcttcagtactgtcttagcgaaaagccaaaacttcttccacttgaactggagaaaaccgcaattcagaactacacggtcacggaatttcagcctctctactacgttgcagaatcgtttaatgacgcaaaggagaaggtgcgcaattttgcagcaactatccctaggccgttttcagtcaggtacgatccttacacccagcggatagaggtgctggacaacacccaacaacttaagatacttgcagattcaatcaactccgagattgggattctgtgttcggcgctgcaaaagatcaag

SEQ ID NO: 6026 - DNA, 1356 bp, Artificial Sequence
  derived and/or modified sequence
atgagcaccgctgtgctggaaaatcctggcctgggaagaaaattgagtgactttggacaggagacctcttatatcgaagataactgtaaccaaaacggggcaatctctcttattttctcattgaaagaagaggtgggagctctggctaaggtcctgcggctattcgaggagaacgacgtgaatctgactcacattgagagtagaccaagtcgactcaaaaaagacgaatatgagttcttcacccaccttgacaaacggtctctgccggctctgacaaacataatcaagatcctgaggcacgatataggcgcgacggtccatgaactttctagggacaaaaaaaaagacaccgtgccttggttccctcgaacaatacaggaactcgataggttcgcaaaccagattctgagctacggcgccgagctggacgcagaccatcctgggtttaaagaccctgtctacagagcacgcagaaaacagtttgctgatatagcttacaattacaggcacgggcagccaattccaagggtcgaatacatggaagaggaaaagaaaacttgggggactgttttcaaaaccctcaaaagcttatataaaacccatgcttgctatgaatacaatcacatctttccacttctggaaaaatactgcggatttcatgaggacaacattcctcaacttgaagacgttagccagttccttcagacctgcaccgggtttcggctcagaccagtcgcgggcctactttcctcgagggattttctgggaggcctggcattcagggtcttccactgcacccagtacatcaggcacggtagtaaacccatgtacaccccagagcctgacatctgccatgagctcctgggccacgttccgcttttcagcgatcgttcatttgcccagttttcccaggaaattggactggctagcctgggagctcctgatgaatatatcgagaagttagcgaccatttactggttcacagtcgagtttggcctctgtaagcagggtgatagcataaaggcttacggagctggactgctgtcaagttttggagaacttcagtattgtctcagcgaaaagcctaaactactgcctctggaactggagaagacagctattcagaactacacggtgaccgaatttcagccgctctattacgttgccgagtcttttaatgatgccaaagagaaggtcaggaatttcgccgccacaataccaaggcctttctcagtcagatatgatccatacacccaaagaatcgaagtactggacaacacacaacagcttaagatcctggctgacagcatcaatagtgaaatcgggattctgtgctctgctttacaaaaaatcaag

SEQ ID NO: 6027 - DNA, 1356 bp, Artificial Sequence
  derived and/or modified sequence
atgtcgacggcagttcttgaaaatccgggacttggtagaaagctgagcgactttggacaggagacttcctacatcgaagataattgcaaccagaacggagcaatctccctgatcttttccctgaaagaggaagtgggtgcgcttgcaaaggtgctcagacttttcgaagaaaacgatgtgaatttgacccatattgagtcacgtccgtcgcgcctgaaaaaggatgaatacgaattctttacgcatctggacaaaagaagccttcccgcactgaccaatatcattaagatcctgagacatgatatcggtgccactgtgcatgagctttcaagagacaagaagaaggacactgtcccgtggttcccaaggactatccaggagctggaccgttttgcaaatcaaattctgtcatacggagcagagcttgatgcagaccacccaggcttcaaggatcccgtgtatcgggctcgccgaaagcagtttgccgatatcgcctacaactacagacatgggcaaccaattcctagggtcgagtacatggaagaagagaaaaagacgtggggaaccgttttcaaaactcttaagagcttgtacaagacccacgcttgttacgagtacaaccatatctttccccttcttgagaaatactgtggattccatgaagataacatcccgcaactcgaagatgtgtcgcaatttctgcaaacctgtactggctttagacttagacctgtggccgggctcctctcgagccgagatttccttggaggtctggcatttcgcgtgttccactgtacccagtacattagacatgggagcaagccaatgtacacccccgaacctgatatctgtcatgaactgcttggacacgtcccactgttttcggaccggtcattcgcccaattttcgcaggaaattggacttgcgtccctcggagccccagatgagtacatagaaaaacttgctaccatttactggttcactgtggaattcggactttgcaagcagggcgactcgattaaggcatacggcgcagggctcctctcttccttcggggagcttcaatactgtctgtcggaaaaaccaaagctcctgccccttgaacttgaaaagactgccatccaaaactacaccgtgaccgagtttcagccactctattacgtggccgagtcgtttaacgacgcgaaggagaaagtccgtaatttcgcagcgactattcctcgtccattttccgtgcgctacgacccttacactcagagaattgaagttcttgacaacactcagcagcttaagattctcgccgactccattaactcggaaatcgggattctgtgtagcgctcttcaaaagattaag

SEQ ID NO: 6028 - DNA, 1356 bp, Artificial Sequence
  derived and/or modified sequence
atgagcactgctgtactggaaaacccaggactgggccgcaaattatcagactttggccaggagactagttatattgaggacaattgcaaccagaatggtgccatttccctcattttcagcctcaaagaagaggtcggggctttggcgaaggtgttgcgactgttcgaggaaaatgacgttaacctgactcacatagaatccaggccatccagacttaaaaaagacgagtacgaattttttacccatcttgataagcggtcactccccgcactgaccaacatcatcaagatattaaggcatgacattggagcaacagtgcatgaactgtccagagacaaaaagaaggataccgtgccctggtttcctcgcactatccaggagctcgacagattcgccaaccaaatcctgagttatggtgccgaattggatgctgatcatccaggtttcaaagacccggtgtatagggctcgacgaaagcagttcgctgatatcgcctacaactataggcatggccagccaatcccgcgagtggagtatatggaagaggagaaaaagacatggggtacagtgtttaaaacactgaaaagtctgtacaaaactcatgcttgttacgagtacaaccacatcttccctctattggagaagtattgcggctttcatgaagacaatatcccacaactggaagatgtgtcacaattcctacaaacttgtaccggcttcagactcaggcccgtggcaggcctgctctcaagcagagacttcctaggaggcttagccttccgagtgtttcattgcacacagtacattagacacgggagcaagccaatgtatacgcccgagccagatatctgtcatgaactgttggggcacgtgcccctttttagtgatcgatccttcgcacagttcagtcaggaaattggactcgcctcactcggggctccagacgaatacattgaaaaattggcaaccatttattggtttacagtggagtttggtctctgcaagcaaggggactcaataaaagcgtatggggcgggtctcctttcatcatttggcgaacttcaatactgcctctcagaaaagcccaaactgctacctctggagttggagaagactgcgatccagaattacaccgtgacagaattccagcctctttactatgtggccgaaagctttaacgacgctaaggaaaaagtaaggaactttgctgcaacgattcctcggcctttttccgtcagatacgatccctacacccagaggattgaagtcctagacaatacccaacagctgaagatcctggccgattcaataaactccgagatcggaatattgtgttccgctctccagaaaatcaag

SEQ ID NO: 6029 - DNA, 1356 bp, Artificial Sequence
  derived and/or modified sequence
atgagtactgccgttctagagaatcctggcctgggaagaaagctgagcgattttggccaagaaacgtcttatatcgaggataactgcaatcaaaatggggccatctccctgatcttctccctaaaggaggaggtgggcgcactggccaaggtcctgcggctttttgaggaaaacgacgttaatctcacccatatcgagtctagaccctcccgattgaagaaggacgaatacgagtttttcactcacctggataagagaagtctgccggctctgactaatatcatcaagatcttaaggcacgatattggtgcgaccgtccacgagctgagcagagacaaaaaaaaggacacggtgccttggtttccccgcaccattcaagaattggaccgatttgcgaaccagatactttcctatggtgccgaattggacgcggaccacccggggttcaaggatcctgtgtacagggcaaggcggaagcagttcgcagacatcgcgtacaactatcggcacgggcagccgatccctagagtggaatacatggaggaagagaagaagacttggggcaccgtgttcaagacccttaagtccctctacaagacccacgcttgttacgaatataaccatatctttccattgcttgagaagtattgcggctttcacgaagataacattccccagctggaagacgtttcccagtttctgcagacgtgtaccggatttcggctgagacctgtggcgggcttgctgtcttctagggatttccttggcggtcttgcatttagggtttttcattgcactcagtatattcgccacggttccaagccgatgtacacacctgagcccgatatctgtcatgagctgcttgggcacgtgccacttttttcagatagatccttcgcccagtttagccaggaaatcgggctggcttccctgggggctcccgacgaatatatcgagaagctggccaccatatattggtttacagtggagttcggactttgcaaacaaggcgacagcattaaagcttacggggcgggcttgttatcatctttcggagaactacagtattgtctttcggagaaacccaagctgctccctctcgaactcgaaaagaccgcgatacagaactatacagtaactgagtttcagccactctactatgtagctgagagcttcaatgatgcgaaagagaaggtgagaaacttcgctgctaccatccctcgtcctttttcggtgcgctatgatccatacactcagagaattgaagtgctcgataacacccagcagctgaagatccttgctgacagcatcaactcagagattggaatattgtgcagcgcgctgcagaagatcaaa

SEQ ID NO: 6030 - DNA, 1356 bp, Artificial Sequence
  derived and/or modified sequence
atgtcaacagcagtgttagaaaaccccggcttgggcaggaagttgagcgacttcgggcaggagacatcctatatcgaagataactgcaatcaaaacggtgcaataagcctaatcttcagccttaaagaagaggttggagcattagcaaaggtcttgcgtctgttcgaagagaatgacgttaacttgactcacattgagtcaaggccatcacgactgaaaaaagacgagtacgaattctttacacatctggacaagcggagcctgccagcacttacaaatattatcaaaatcctgagacacgatatcggtgccaccgtgcacgaactgagtagagacaagaaaaaagatacagtgccatggtttccacggacaatacaagagttggacaggtttgctaatcaaatcttgagctacggggccgagctagacgcggatcatcctgggttcaaggacccagtttaccgcgccagaaggaagcaatttgctgatatcgcttataattatcgtcacgggcagccaatcccccgggtcgaatacatggaggaggaaaaaaaaacttggggtacagtgttcaaaacactgaagtcactctacaaaacgcacgcctgctatgagtacaaccacatattccccctgcttgagaaatactgtgggttccacgaagacaacataccacagctggaggacgtttcacagttcctgcagacttgcacgggctttaggctccggcctgtggccggcctcctctccagccgagatttcctggggggtctggccttccgcgtatttcactgcacacagtacattcgacatgggtccaaacccatgtacacacctgaaccagatatctgccacgaactgctaggacatgtgccactgttctcggataggtccttcgctcagttctcgcaggaaatcggccttgcttcgttaggggctcctgatgaatatatcgaaaagctcgctaccatctactggtttacggtcgagttcggcctgtgtaaacagggcgatagtatcaaagcatatggtgctggtttgctgtccagttttggcgaacttcagtactgtctgtcggaaaagcctaagcttctgcctcttgagctagaaaaaacagccatacagaactataccgtgacagagttccaaccactttactacgtagccgaatccttcaacgatgcaaaagagaaagtcagaaatttcgctgcaacaattcctagacctttctctgtgcgatatgatccgtacacacagagaattgaggtgcttgataatactcagcagttgaagatactcgccgattccataaattccgaaatcggaattttgtgcagcgccctgcagaaaataaag

SEQ ID NO: 6031 - DNA, 1356 bp, Artificial Sequence
  derived and/or modified sequence
atgtccacagcggtgttggagaatcctggtcttggacggaagctgtctgacttcggccaggagacttcatacattgaggataactgcaatcagaacggcgcaattagcctcatattttccctgaaagaggaagtcggcgccctggctaaagtactaaggctgtttgaggaaaacgatgtcaacctgacacatatagaaagccgaccatccaggctgaagaaagacgaatacgagttcttcactcacctcgataagcggagtcttccagcactgactaatataattaagatcctgagacacgatattggggccacagtacacgagctaagtcgcgacaaaaagaaggacactgtgccctggtttccccgcacaattcaggaactggatagatttgccaatcaaattctttcctatggggccgaactggacgccgaccatccaggattcaaggacccagtgtaccgcgctcggcgcaaacagttcgccgacattgcctacaactaccgccacggacagcctatacccagagttgaatacatggaagaggagaaaaagacctgggggaccgtattcaagacactaaaaagtctctataaaacgcacgcttgctatgagtataaccatatattccctctcctggagaaatactgcggattccatgaggataatatcccacagctggaggatgtgagtcaattcctgcaaacgtgtaccggctttaggttacgaccagtcgccggcctactgtcttctagggatttcctagggggcctggctttccgggtattccattgcacccagtacatccgacacgggtctaaacccatgtataccccagagcccgacatctgccatgaactgttgggacatgtacctctgtttagcgatcgaagttttgcccagttctcccaggaaatcggactcgcttccctcggtgcccccgatgagtacattgaaaagcttgctaccatctattggtttaccgtcgagttcggcctctgcaaacaaggggattcgataaaggcatatggagccggcttgttgagttcatttggtgaacttcaatattgcctctctgaaaagccaaaactcttgccccttgagctcgagaaaaccgccattcagaactacactgtgacagagttccaacctctgtactatgtggccgaatcattcaacgacgccaaggagaaggttcggaactttgcggccaccatcccccgcccgttctccgtcagatacgacccctacacacaaagaattgaggtcctcgacaatacgcaacagcttaaaatactggcggattccatcaattccgagattggcatcttatgcagcgccctccagaagatcaag

SEQ ID NO: 6032 - DNA, 1356 bp, Artificial Sequence
  derived and/or modified sequence
atgtccactgccgtgctggaaaacccgggcttgggtcgaaagttgtcagatttcggacaggagacttcctacatcgaggacaattgtaatcaaaacggcgccatcagcctgatctttagcctgaaagaggaagtcggagccctggcaaaggtgcttagattgtttgaagaaaacgacgtgaatttgacccatatcgaatcacgcccgagccgcctgaaaaaagatgaatacgagttcttcacccacctggataagaggtcactcccggccctgaccaacatcatcaagattcttaggcatgatatcggagccaccgtgcatgaactttcgagagataagaaaaaggataccgtgccttggttcccacgcacgatccaagagctcgaccgtttcgcaaatcaaatcctttcctacggtgccgaactcgatgcagaccatcccgggttcaaggacccggtgtaccgggcccggcggaagcagttcgcagacatcgcgtataactaccgccacggacagccaatcccgagggtggagtacatggaggaggagaagaaaacgtgggggacggtctttaagaccttgaagagcttgtacaagacccacgcgtgctacgagtacaaccacatttttcccttgttggagaagtactgcgggttccacgaggataacatcccacagctggaagatgtgtcgcaatttctccagacctgcactggattccggctgcgcccagttgcgggcctgctctccagccgggacttcctgggaggtctggcatttagagtgtttcattgcactcaatacatccggcacggatcgaagccgatgtacacgccggaacccgacatttgtcacgagctcctgggacacgtgccgttgttctcggaccgatcgttcgctcaattcagccaagaaatcggactggcatcgctcggagcgccggatgaatacattgaaaaactggccactatctactggtttactgtcgagttcggtttgtgcaaacagggagacagcatcaaggcgtacggcgcgggactgctctcctccttcggggaactgcagtactgtctctcagaaaaaccaaaactgctcccactggagctggaaaagaccgcaatacagaattacactgtcacggaatttcagcccctgtactacgtggccgagagcttcaacgatgcgaaggaaaaagtccggaacttcgcggccaccatcccgcgacccttctcagtgagatacgacccgtacacccagcggatcgaagtccttgacaacacgcagcagcttaagatactcgccgactcaatcaattctgaaatcggaatcctgtgctcggcgttgcagaagatcaaa

SEQ ID NO: 6033 - DNA, 1356 bp, Artificial Sequence
  derived and/or modified sequence
atgagcaccgcagtgctcgaaaatcccggcctgggaaggaagttgagcgacttcggacaggaaaccagctacattgaagacaattgtaaccaaaacggggccattagtttgattttctccttgaaggaggaggttggggctctggctaaggtcctccgacttttcgaagagaatgatgtgaatctcacccatatcgagtctagaccgtcaaggttgaagaaggacgagtatgaattttttacccacctggataaaagaagccttcccgcccttacaaacatcattaagatccttaggcacgacattggagcaactgtgcatgagctgtctcgtgataagaaaaaggacacggttccatggttcccaaggacaatccaagaactcgacagattcgctaatcagatcctctcctacggagcagaactcgatgccgatcaccccggattcaaagaccccgtttatagggctcgccgtaaacagtttgccgatattgcatacaactacagacatggtcagcccatcccacgcgtcgaatatatggaggaggagaaaaagacatggggcaccgtattcaagacgcttaaaagtctctataagacgcacgcatgctacgagtataaccacattttcccgttgttggagaaatactgtggctttcacgaagataatattccacaactagaagacgtgagtcaatttcttcaaacctgcacaggttttagactgagacccgtcgctggcctcctcagctctcgtgacttccttggcggcttggcctttcgcgtgtttcattgcacacagtatatccgtcacgggtccaagccaatgtacacccctgaacctgatatatgccatgagcttctaggtcacgtgcccctgttctctgatcggtctttcgcgcagtttagccaggagatcggactagccagcctcggagctcccgatgaatacatcgagaaactggcaaccatttattggttcactgtggaattcgggctctgcaagcagggcgattccatcaaagcttatggggccggcctgctatcgtccttcggagagctgcagtactgtctgagtgagaagcctaaacttctccctttagagctcgagaaaacagccatccagaactacactgtaacagaattccagcctctctactacgttgctgaaagcttcaacgacgccaaggaaaaggtgcggaattttgccgcaaccattccgcggcccttttcagtgaggtacgacccgtacacacagcgaatcgaagtgttggacaacacacagcagcttaagattcttgctgacagcataaactcagaaatcggcatcctgtgctcagccctccagaaaattaag

SEQ ID NO: 6034 - DNA, 1356 bp, Artificial Sequence
  derived and/or modified sequence
atgtcaacggcagttctggaaaatccgggacttggccgtaaacttagcgactttgggcaggaaaccagctatattgaggacaactgtaatcaaaacggagcaatatcgctgattttcagtctgaaggaagaggtgggggcactggccaaagtcctgcgtctttttgaggagaacgacgtgaatctcacccatatcgaatcaagaccatcgagattgaagaaagatgagtacgaattctttacgcatctcgataagcgctcgctcccggcactcactaacattatcaagattcttcggcacgacattggagcaaccgtgcacgaactttctcgagataagaaaaaggacactgtcccgtggtttccaagaaccattcaggaactggatcgctttgcaaatcaaatactgagctacggcgcagagctggatgcagatcatcccggctttaaggaccccgtgtaccgagctcgccgcaagcaattcgcagacattgcatacaattacagacacgggcaacctatcccgcgcgtcgaatacatggaggaagagaagaaaacctggggtaccgtctttaagacgctcaaatcgctgtacaagactcatgcctgctacgaatacaaccacatcttccccctgctggagaagtactgtggctttcatgaggacaacatcccacaactcgaggacgtgagccagttcctgcaaacctgtactggcttcagactccggcctgtcgcaggattgctgagctcccgagactttcttgggggcttggcttttagggtgttccactgtacccagtacataaggcacggttcaaagcctatgtatactccggaaccggacatctgccatgaactgcttggccacgtcccactgttttcggataggtcgtttgctcagttctcccaggaaattggactggcatcattgggagcgcctgacgaatacattgaaaagttggccaccatatactggtttacggtggaattcggactctgcaaacagggtgactccatcaaggcatacggcgcaggccttctgtcgtcatttggcgagcttcagtactgtctcagcgagaagcccaagctccttcctctcgagctggaaaagactgccatccagaactataccgtgaccgaatttcaaccactttactacgtggcggaatcgttcaacgacgcgaaagagaaggttaggaattttgctgccacgattccccgcccattctcggtgagatatgatccttacactcaacggatcgaagtgttggataacactcaacagctgaagattcttgctgactcgattaactccgaaattgggatcctttgctccgcactgcaaaagataaag

SEQ ID NO: 6035 - DNA, 1356 bp, Artificial Sequence
  derived and/or modified sequence
atgagtaccgctgtgctggaaaaccccggacttggacgtaaattgagcgatttcggacaggaaactagttatatcgaggacaactgtaatcagaacggcgccatctcacttatcttttccctgaaagaggaggtgggggccctcgctaaggtcctgcgcctgtttgaagagaacgacgtgaatctaacacatatagagagtcgcccttcccgtctgaaaaaagacgaatacgagttctttacccacctcgacaagagatctctacctgctctcaccaacatcataaaaatcttgagacacgatataggtgccactgttcatgagctgtcccgcgacaagaaaaaagataccgtgccttggtttccaaggaccatccaagagctggatagattcgccaaccagatactgtcctatggggctgaactggatgccgatcaccccggctttaaagacccagtgtatagggccagacgaaagcagttcgccgacattgcatacaactacagacacgggcagcccataccccgtgtcgagtacatggaggaagaaaagaaaacctgggggaccgtttttaaaactctaaaatctctatacaaaacacatgcttgttacgagtataatcatatattccccctgcttgaaaaatactgtggtttccacgaggataatatcccacagttagaagacgtctcacagttcctgcagacctgcactggcttcaggcttcgcccagtggctggactcctaagctcacgggacttcttaggaggcctggcattcagggtgtttcactgtacccagtacatccggcacggctccaagcctatgtatacacccgaacctgatatctgccacgaactcttagggcatgttccactgttcagtgaccgatcattcgcacagttttcccaggagataggtctggccagcctaggcgctccagacgaatacattgagaagctagccaccatttattggtttaccgtggagttcgggctgtgtaagcagggcgatagcataaaggcctatggcgccggtctgttaagctctttcggcgagctgcaatactgtctaagcgagaaacctaagctgctgcccttagaactagaaaaaaccgcaatacagaattacaccgtgaccgagttccagccactgtactacgtcgccgaaagctttaacgacgccaaggagaaggttcgtaactttgccgcaaccattccaaggcccttctctgtgaggtacgatccatatacacagcgcattgaggtgctggataatacccagcagctgaagattctagccgattctatcaatagcgaaattggcatattatgctccgcccttcagaaaataaag

SEQ ID NO: 6036 - DNA, 1356 bp, Artificial Sequence
  derived and/or modified sequence
atgtcaaccgccgtcctcgagaatccaggactaggtaggaaactgagtgacttcggtcaggagacctcgtacatcgaggacaattgtaaccaaaacggagccatctccctcatattttctctgaaggaggaggtgggggcccttgccaaggtccttaggctgttcgaagagaacgacgtgaatctcacgcacattgagtccaggccatcacggctcaagaaggacgagtacgaattcttcactcacttggataaacgctcattgccagctctcactaacatcattaagattctcagacacgatatcggggctacggtgcacgagctctcaagggataagaagaaggacacggttccttggtttcctaggacgatccaggagctagacagattcgcaaatcagatccttagttacggagcggaactcgacgcagaccaccccggcttcaaagaccccgtgtaccgtgccagaaggaaacagttcgctgacattgcctacaactataggcatggccaaccgatcccccgtgtagagtacatggaggaagaaaagaaaacttggggcactgtctttaaaacattgaagagtctgtataagacccatgcttgttacgaatacaatcacatctttccactgctcgagaaatactgtggcttccatgaggacaacatacctcagttggaagacgtttcacaattcctccagacctgtacaggctttcggctcagaccagtggcgggccttctctcaagccgggacttcctcggcggactcgcgtttcgggtctttcattgcactcagtacatacggcacggttccaaacctatgtacactccagaaccagatatttgccacgaattgttgggacatgttcctctgttttctgacagatccttcgcacagttctcccaggagatcggtctggccagcctgggagcgccagacgagtatatagagaagctggctactatctattggtttaccgtggaattcggcctgtgtaaacagggggactcaatcaaagcttatggagctggcctcctgagttcctttggcgagctgcagtactgcctgtcggaaaagcccaaacttttgcccctcgaactagagaaaacggccatacagaactatacagtaaccgaatttcaacccctgtattacgtggctgaatccttcaacgatgcgaaagagaaagtgagaaatttcgcagctacgattcctaggcctttttcagttaggtacgacccatatacccaaaggatagaagtattggacaacacacagcaactgaagatcctggccgactccatcaattctgaaattggtatcctgtgctccgctctgcagaagattaag

SEQ ID NO: 6037 - DNA, 1359 bp, Artificial Sequence
  derived and/or modified sequence
atgagcaccgccgtgctggagaaccccggcctgggcagaaagctgagcgacttcggccaggagaccagctacatcgaggacaactgcaaccagaacggcgccatcagcctgatcttcagcctgaaggaggaggtgggcgccctggccaaggtgctgagactgttcgaggagaacgacgtgaacctgacccacatcgagagcagacccagcagactgaagaaggacgagtacgagttcttcacccacctggacaagagaagcctgcccgccctgaccaacatcatcaagatcctgagacacgacatcggcgccaccgtgcacgagctgagcagagacaagaagaaggacaccgtgccctggttccccagaaccatccaggagctggacagattcgccaaccagatcctgagctacggcgccgagctggacgccgaccaccccggcttcaaggaccccgtgtacagagccagaagaaagcagttcgccgacatcgcctacaactacagacacggccagcccatccccagagtggagtacatggaggaggagaagaagacctggggcaccgtgttcaagaccctgaagagcctgtacaagacccacgcctgctacgagtacaaccacatcttccccctgctggagaagtactgcggcttccacgaggacaacatcccccagctggaggacgtgagccagttcctgcagacctgcaccggcttcagactgagacccgtggccggcctgctgagcagcagagacttcctgggcggcctggccttcagagtgttccactgcacccagtacatcagacacggcagcaagcccatgtacacccccgagcccgacatctgccacgagctgctgggccacgtgcccctgttcagcgacagaagcttcgcccagttcagccaggagatcggcctggccagcctgggcgcccccgacgagtacatcgagaagctggccaccatctactggttcaccgtggagttcggcctgtgcaagcagggcgacagcatcaaggcctacggcgccggcctgctgagcagcttcggcgagctgcagtactgcctgagcgagaagcccaagctgctgcccctggagctggagaagaccgccatccagaactacaccgtgaccgagttccagcccctgtactacgtggccgagagcttcaacgacgccaaggagaaggtgagaaacttcgccgccaccatccccagacccttcagcgtgagatacgacccctacacccagagaatcgaggtgctggacaacacccagcagctgaagatcctggccgacagcatcaacagcgagatcggcatcctgtgcagcgccctgcagaagatcaagtag

SEQ ID NO: 6038 - DNA, 1359 bp, Artificial Sequence
  derived and/or modified sequence
atgagtaccgctgtgcttgaaaatcccggacttgggaggaagctctccgacttcggtcaagaaaccagttatatagaggacaattgtaaccagaacggggcaatctccttaatcttcagccttaaggaggaggtgggagctctggccaaggtcctgcggctgttcgaggaaaatgatgtaaacttgacccatattgagtctcgaccaagcaggttaaagaaggatgaatatgaattctttacacatctggataagcggagtctccccgctttaaccaacataatcaaaatattacggcatgatataggagctaccgtgcacgaactttctcgtgacaaaaaaaaggataccgttccttggtttccaagaaccattcaggagctggatcgcttcgcaaatcagattttgtcatacggtgccgagctcgacgcagaccaccccgggtttaaagatccagtttatagagccagacgaaagcaattcgctgacatcgcttataattaccggcacggacagccgattcccagagtcgagtatatggaggaggagaagaagacctggggaaccgttttcaagactctaaagagcttgtacaaaacccacgcttgctacgaatataatcacatcttccccctgttggagaagtactgcggtttccacgaggataatatcccccagttagaagacgtgagtcagtttctgcagacttgtacgggtttccgcctgcgccctgtagctggactgctgtcatctagggacttcctcggaggccttgcgtttcgtgtctttcactgtacccagtatatcagacatggcagcaagcccatgtacactccagaacccgacatctgccacgaactcctcggccatgtacccctgttctctgatagatcattcgcgcagtttagccaggaaattggtctggcttcactgggggccccggacgaatatattgagaagctggcgacaatctactggttcactgtggaattcggcctgtgcaaacagggcgattcaattaaggcctatggcgccggccttctttcttctttcggggaactgcagtattgcctcagtgagaagcccaaattgctcccattggagctggaaaagactgccatccagaattacactgtgactgagttccagccgctgtattatgtggcagagtcattcaatgatgctaaagagaaggttcggaacttcgccgcaacaattcctagaccttttagtgtgagatatgacccttacactcaacggatcgaagttttggacaacacccagcagctgaagatcctcgccgacagtattaactcggagattggcatcctctgctctgccctgcagaaaatcaaatag

SEQ ID NO: 6039 - DNA, 1359 bp, Artificial Sequence
  derived and/or modified sequence
atgagcacagctgtgctggagaaccctggcctgggcaggaagctgagtgactttggccaggagaccagctacatcgaggacaactgcaaccagaatggagccatcagcctcatcttcagcctgaaggaggaggtgggcgccctggccaaggtgctgcggctgtttgaagaaaatgatgtgaacctgacccacatcgagagccggcccagccggctgaagaaggatgaatatgagttcttcacccacctggacaagaggagcctgcctgccctgaccaacatcatcaagatcctgcggcatgacatcggggccaccgtgcatgagctgagccgggacaagaagaaggacacagtgccctggttccccaggaccatccaggagctggacagatttgccaaccagatcctgtcctatggagctgagctggatgctgaccaccctggcttcaaggaccctgtgtaccgggcccggaggaagcagtttgctgacatcgcctacaactaccgccacggccagcccatcccccgggtggagtacatggaggaggagaagaagacctggggcaccgtcttcaagaccctgaagagcctgtacaagacccacgcctgctatgagtacaaccacatcttccccctgctggagaagtactgcggcttccacgaggacaacatcccccagctggaggatgtgtcccagttcctgcagacctgcaccggcttccggctgcggcctgtggccggcctgctgagcagccgggacttcctgggcggcctggccttccgggtcttccactgcacccagtacatcagacatggcagcaagcccatgtacaccccagagccagacatctgccacgagctgctgggccacgtgcccctcttcagtgacaggagctttgcccagttcagccaggagatcggcctggccagcctgggcgccccagatgagtacatcgagaagctggccaccatctactggttcaccgtggagtttggcctgtgcaagcagggcgacagcatcaaggcctatggagctggcctgctgagcagctttggagagctgcagtactgcctgtctgagaagcccaagctgctgcccctggagctggagaagacagccatccagaactacacagtgacagagttccagcccctgtactacgtggccgagagcttcaatgatgccaaggagaaggtgaggaactttgctgccaccatcccccggcccttctctgtgcgctatgacccctacacccagagaattgaggtgctggacaacacccagcagctgaagatcctggccgacagcatcaacagcgagatcggcatcctgtgcagcgccctgcagaagatcaagtag

SEQ ID NO: 6040 - DNA, 1359 bp, Artificial Sequence
  derived and/or modified sequence
atgagcaccgccgtgctggagaaccccggcctgggccggaagctgagtgattttggacaggagacgtcttatattgaagacaattgtaatcagaacggagcaataagtctgatattttccctcaaggaggaggtaggtgcccttgcaaaggtacttcgattattcgaggagaacgacgtaaacttgacacatattgagagccgcccctcccgcctaaagaaggatgagtacgaatttttcactcacctggacaaacgttcactgcctgccctcacaaatattatcaagattcttcggcacgatattggagctacagtgcacgagctctcccgcgacaagaagaaggataccgtcccctggttccctcgtacaatccaggaactggacaggttcgctaatcagattctatcctatggtgccgaactggacgctgaccaccctgggttcaaagaccctgtgtatcgggccaggagaaagcagttcgctgatattgcttataactaccgccatgggcagcccattccaagagttgagtacatggaggaagagaaaaagacttggggcacggtcttcaaaacacttaagagcctgtataaaacccatgcctgttatgaatacaatcacattttccccctgctcgagaagtattgcggattccacgaggacaacatcccccaactggaggatgtgtcacagtttctccagacatgtaccggcttcaggttgagacccgtggccggactcctgtcaagccgggattttcttgggggcctggccttcagggtctttcattgtacgcaatatattaggcatggcagcaaacccatgtacacgcccgagcccgacatctgccacgagctgctaggacatgtgccccttttctcagacaggagcttcgcccaattcagccaggagattggacttgcctctctgggggcacccgacgaatatatcgagaaactggctaccatctactggtttaccgttgaattcggcctatgtaagcaaggtgactccatcaaggcatacggcgccgggctgctgagctcgttcggagagttacagtattgcttgtctgagaaacccaagctattgcccctggaacttgaaaaaaccgcaatccagaactacaccgtcactgaattccaacccctctactacgtggcagaatcttttaatgatgcaaaagaaaaagtcaggaacttcgctgccaccattccccgcccctttagcgtgagatacgacccatacacgcagcgaattgaggtcttggacaatacccaacaacttaaaatcctggcagactctatcaactctgaaattggcattctgtgttctgccctgcagaagatcaagtag

SEQ ID NO: 6041 - DNA, 1359 bp, Artificial Sequence
  derived and/or modified sequence
atgtctacagccgtgctggagaaccctggtcttggcaggaagctgagtgacttcggacaggagacttcttacatcgaagataattgtaatcagaacggcgcaatctccttgattttctcacttaaggaggaggtgggcgcactggcaaaagtgctacgactttttgaggaaaacgatgtcaatcttacacatattgagagtaggccatctcggcttaaaaaagacgaatacgagtttttcacccatctggataaacgctctttaccagcccttaccaacataattaagatcctgagacatgacattggcgctacggtgcacgagctatctcgtgacaaaaagaaggacacagtgccatggtttccccgaactattcaagaattggaccgcttcgccaatcaaattctgagctacggtgcagagttggacgctgaccatcccggtttcaaagatccagtttaccgagccagaagaaaacaatttgccgacattgcctacaattaccgacacgggcagcccatccctagggtcgagtacatggaggaagagaagaagacttggggtacagtctttaaaaccctcaagagtctctataagacacacgcctgttatgagtataaccatatcttcccccttcttgaaaagtactgtggcttccatgaggacaacataccccagttggaggacgttagccaattcctccaaacctgtacggggttcagattaagacccgtagctggtctgcttagctcacgcgactttttgggcggtcttgcattccgggtgttccactgcacacagtacatccgtcacgggagcaagcccatgtacactcccgaacccgacatctgtcacgaactgctcgggcacgtgcccctcttctcggaccggtcctttgcccagttcagccaagaaatcggcctcgcctccctcggagccccagacgaatacatcgagaagttggccacgatctactggttcactgtggaattcggcctttgcaagcagggagactcaattaaggcctacggcgcaggcttattgtcctctttcggtgagcttcagtattgcctaagtgagaaacccaagctcctcccactcgagctggagaaaacagctatccagaactacacagtgactgagtttcagccactgtattacgtggcagagtctttcaacgatgcaaaggagaaagtaagaaactttgccgctaccatcccacgcccttttagtgtgcggtacgatccctatacgcaaaggattgaggtccttgataatactcagcaactaaagattctcgcggacagcataaatagtgaaattggcatactatgcagtgccttgcagaaaatcaagtag

SEQ ID NO: 6042 - DNA, 1359 bp, Artificial Sequence
  derived and/or modified sequence
atgtccactgcagtcctcgaaaatccaggacttgggcggaagctgtctgatttcggacaagagacttcctatattgaggataattgtaaccagaacggggccatcagcttgatattctcattaaaggaagaggtcggtgccttggctaaagtattacgattgttcgaggagaatgacgtgaaccttactcatattgaatccagacccagccgactgaagaaggatgagtacgaattcttcacacacctcgacaaaaggagcctccccgccctgaccaacatcatcaaaattctccgccatgacatcggcgctaccgtccatgagctgagtcgcgacaagaaaaaggacaccgtgccctggttcccgcgcactattcaagagttagataggtttgccaaccaaatcttatcctacggagccgaactggatgcagatcatccaggttttaaagatccggtttatagagccaggagaaagcaatttgctgatatcgcatacaattatagacacggtcagcctattccacgggtggagtacatggaagaagagaaaaagacctgggggactgtgtttaagactctaaaaagcttatataagactcacgcatgttatgaatataaccatatcttcccactgttggagaagtactgtggttttcacgaagataatattccacagctcgaggatgtgtctcaatttctccagacctgcacaggctttcgcctccgcccagttgccgggctgctctcttccagggacttcctgggaggactcgcatttagagtgtttcattgcacacaatatatacgccatggatcaaaaccaatgtacactccagagcctgacatttgccatgagctgcttgggcacgtgccactgttctctgatcggtcattcgcacagtttagccaggagattgggttggccagtctgggagcccctgacgaatatatcgagaaacttgctacaatctattggtttacagtcgaattcggcctctgtaaacagggagacagcataaaagcctatggagccgggctgctcagttcgttcggggagctacagtattgcttatctgaaaagccaaagctcttgccccttgagcttgagaaaaccgccatccaaaattataccgtgactgagtttcaacccttatattacgttgctgagagctttaacgatgccaaggaaaaggtgagaaattttgcagccacaattccccggccattttccgtcaggtatgacccttacactcaacggattgaagtgctggacaacacacagcaattgaagatcctggcagattccatcaattccgagataggaattctatgctctgccttgcagaagatcaaatag

SEQ ID NO: 6043 - DNA, 1359 bp, Artificial Sequence
  derived and/or modified sequence
atgtctaccgccgtattagaaaatccaggactcggaagaaaactgtccgattttggtcaagaaacatcttacatagaggacaactgcaaccaaaacggagcaatttcgcttatcttttctctgaaggaagaggtgggtgccctggcgaaggtgcttcgtctgtttgaagaaaatgacgtaaatctcacacatattgagtcccggccctcacgcctcaagaaagacgaatacgaattctttactcatctggacaagcgtagccttcctgccctgacaaatattatcaagatcctgagacacgacattggagcaaccgtgcacgaattatcaagagacaaaaagaaggatacagttccttggtttcctagaacaattcaggagttggatcgatttgcaaaccaaatcctttcttacggcgctgagcttgacgccgaccaccccggattcaaggacccagtgtaccgggctcgcagaaagcagttcgccgatatcgcttacaactaccgacatggtcagcctatccctcgtgtcgaatatatggaggaggaaaaaaagacttggggcactgtttttaaaacattgaaatccctttataagacccacgcgtgctatgagtacaatcacatctttcctctgctcgaaaagtattgcggatttcatgaagataatatcccgcagctagaagacgtgagccagtttctgcaaacatgtacaggatttagactgagacctgtcgccggcctactcagctccagagacttcttgggcggcctggcatttagagtgttccactgtactcagtacatcagacatggcagcaagcccatgtacacaccagaaccagacatatgccacgagctactcggccatgtgcccctattcagtgatcgctcttttgcccagttctcccaagagattggacttgcctctctcggggcccctgacgaatacattgagaagcttgcaacaatttattggttcactgttgaattcggcctctgcaaacagggagattctatcaaagcatacggggccggccttctctctagctttggagaacttcagtattgcttgagtgaaaagccaaaactgctccctctagagttagaaaaaacagcaattcagaactatactgtcactgaatttcaaccactctactatgttgccgaatcttttaacgatgcgaaagaaaaagtgcgcaactttgcagcaaccatccctcgtcccttcagtgtccgatacgacccttatacacagagaatagaagtcttggacaacacacagcagcttaaaatactggcagattccataaatagtgagattggtatcctctgttccgcactacagaaaattaaatag

SEQ ID NO: 6044 - DNA, 4122 bp, Artificial Sequence
  derived and/or modified sequence
cagctgggggtaaggggggcggattattcatataattgttataccagacggtcgcaggcttagtccaattgcagagaactcgcttcccaggcttctgagagtcccggaagtgcctaaacctgtctaatcgacggggcttgggtggcccgtcgctccctggcttcttccctttacccagggcgggcagcgaagtggtgcctcctgcgtcccccacaccctccctcagcccctcccctccggcccgtcctgggcaggtgacctggagcatccggcaggctgccctggcctcctgcgtcaggacaacgcccacgaggggcgttactgtgcggagatgcaccacgcaagagacaccctttgtaactctcttctcctccctagtgcgaggttaaaaccttcagccccacgtgctgtttgcaaacctgcctgtacctgaggccctaaaaagccagagacctcactcccggggagccagcatgtccactgcggtcctggaaaacccaggcttgggcaggaaactctctgactttggacaggaaacaagctatattgaagacaactgcaatcaaaatggtgccatatcactgatcttctcactcaaagaagaagttggtgcattggccaaagtattgcgcttatttgaggagaatgatgtaaacctgacccacattgaatctagaccttctcgtttaaagaaagatgagtatgaatttttcacccatttggataaacgtagcctgcctgctctgacaaacatcatcaagatcttgaggcatgacattggtgccactgtccatgagctttcacgagataagaagaaagacacagtgccctggttcccaagaaccattcaagagctggacagatttgccaatcagattctcagctatggagcggaactggatgctgaccaccctggttttaaagatcctgtgtaccgtgcaagacggaagcagtttgctgacattgcctacaactaccgccatgggcagcccatccctcgagtggaatacatggaggaagaaaagaaaacatggggcacagtgttcaagactctgaagtccttgtataaaacccatgcttgctatgagtacaatcacatttttccacttcttgaaaagtactgtggcttccatgaagataacattccccagctggaagacgtttctcagttcctgcagacttgcactggtttccgcctccgacctgtggctggcctgctttcctctcgggatttcttgggtggcctggccttccgagtcttccactgcacacagtacatcagacatggatccaagcccatgtatacccccgaacctgacatctgccatgagctgttgggacatgtgcccttgttttcagatcgcagctttgcccagttttcccaggaaattggccttgcctctctgggtgcacctgatgaatacattgaaaagctcgccacaatttactggtttactgtggagtttgggctctgcaaacaaggagactccataaaggcatatggtgctgggctcctgtcatcctttggtgaattacagtactgcttatcagagaagccaaagcttctccccctggagctggagaagacagccatccaaaattacactgtcacggagttccagcccctctattacgtggcagagagttttaatgatgccaaggagaaagtaaggaactttgctgccacaatacctcggcccttctcagttcgctacgacccatacacccaaaggattgaggtcttggacaatacccagcagcttaagattttggctgattccattaacagtgaaattggaatcctttgcagtgccctccagaaaataaagtaaagccatggacagaatgtggtctgtcagctgtgaatctgttgatggagatccaactatttctttcatcagaaaaagtccgaaaagcaaaccttaatttgaaataacagccttaaatcctttacaagatggagaaacaacaaataagtcaaaataatctgaaatgacaggatatgagtacatactcaagagcataatggtaaatcttttggggtcatctttgatttagagatgataatcccatactctcaattgagttaaatcagtaatctgtcgcatttcatcaagattaattaaaatttgggacctgcttcattcaagcttcatatatgctttgcagagaactcataaaggagcatataaggctaaatgtaaaacacaagactgtcattagaattgaattattgggcttaatataaatcgtaacctatgaagtttattttctattttagttaactatgattccaattactactttgttattgtacctaagtaaattttctttaagtcagaagcccattaaaatagttacaagcattgaacttctttagtattatattaatataaaaacatttttgtatgttttattgtaatcataaatactgctgtataaggtaataaaactctgcacctaatccccataacttccagtatcattttccaattaattatcaagtctgttttgggaaacactttgaggacatttatgatgcagcagatgttgactaaaggcttggttggtagatattcaggaaatgttcactgaataaataagtaaatacattattgaaaagcaaatctgtataaatgtgaaatttttatttgtattagtaataaaacattagtagtttaaacaatttcactgtttcagttatttcctggaatgaaatattcctctcactgccttagaaatacattagctagatagttttgtaacatgagaaaatggccagaggctcatatctccaaccctttgcaggggctccttgtgacactcaaagtcatgcctggacagtcaacggactttgacttttgttgattgtgtgtttgccatgaaaacatgaatatctgagaagcagtggggagaaaaaaaacaatatctttgtagctatgatttgaaattctcatactactttacattttattttggaaatagttaagtcttaaagaatttgcatagtgtttctttgagtttagttctcagaacagctgtagtatcatcaacagcaaattctgggtaccttcccagctccacccaatttgaatctctgaagataaggcccagagacctgtatttttaagtaccccatttttttaattattcatagccaaattctatcaggtacattcagtttgagaaaacctgatttgtggtggtcagtctgccactgccaatgatgtcaatgtggataagctgtttcccttctttagacctcagtgtcactctaacaatgagggagttaaactttataaaccaaggtccattgcagccttgaaatatgattcaagtgttcatatgtgtctttatatagctatgcctgatccactgatggggtgttacaatacctgcttatatatgccagctgggaggaaagaggaatttactgaatgtgtctgaagtttcattgttttgaagttggaattttatgcctgtatctatgtttatgcctttgtaaaacccactgattttaaaagtgaaaaaggacttttttctctgcttttactctaaacaccaaacaatccctgcaaagggattattctgatgtttcttcatttcacatgaaaagttaattattgactctggaacttaaatattagataatatttttgacaatattgaagagtgagttttagtccagtaaagatgttttaatgagcttgaaggtaaagtttcggttaagttatgattttcacaggaagttacatactgaatgaaagataatatttgtatttttggtaatgtgctactcagttcttagctcttttttatccagatataaaagcccagtctatagctatgggatttaataaatttccaatatgtaagtgtttttatttgtttaatttctagtaaatgagcaatattttagaaacagtatcagtctttactgacagatgatcttgctgagtacaatcaaaataaatacataaaaaattctaagcatgtggcattgatgtttaataagtttctgaaagtaggaatctgaattttaactgtaggtttctaagttatataatttagttgtgtttcaaaaaatccaccaataaaatgtcagctttataaaaacagaaa

SEQ ID NO: 6045 - RNA, 1502 nt, Artificial Sequence
  derived and/or modified sequence
gggaaauaagagagaaaagaagaguaagaagaaauauaagagccaccauguccaccgcagugcuugaaaauccgggguugggccggaagcucuccgacuucggacaggaaacgucguauaucgaggauaauugcaaccagaauggggccaucucgcucaucuucucacugaaagaagaggugggagccuuggcuaaagucuugagacuguucgaagagaacgaugugaaucucacgcacaucgaaagccgcccaagcagauugaaaaaggacgaguacgaguucuuuacacauuuggacaaaaggucgcugccugcgcucacaaauaucauuaagauucuccgccaugauaucggagcaacaguccacgaacuuucgagggacaagaagaaagauacggugcccugguucccgagaaccauccaagagcucgaccgauuugcgaaccagauucuuucguauggagcggaacucgacgccgaucauccaggguuuaaggacccgguguacagggcacgacgcaagcaguucgccgauauugccuauaacuaucgccauggucaaccgauuccacggguagaauacauggaagaggagaaaaagacuugggggacuguguucaagacguugaagucgcucuauaagacgcacgcaugcuaugaauacaaccauaucuucccucugcucgagaaguauuguggauuccacgaggauaacauuccccagcucgaggacguaagccaguuccuucagacaugcacgggguuuagacuuaggcccgucgcgggacuucuuuccucgagagauuuccucggggguuuggcauuucgagucuuucacuguacccaguauauucggcacgguuccaaaccuauguacacccccgagccggauaucugccaugaauugcugggacacguaccacuguuuagcgaccggagcuuugcucaguuuagccaggagaucggauuggcaucauugggugcgcccgacgaguacauugagaaacuggcgacuaucuacugguuuacgguggaauuuggccugugcaagcaaggcgauucaaucaaggcguacggugcgggguugcucucgucguucggggaacugcaauacugucuuucggagaaaccgaaacuccuuccccucgaguuggaaaagacggcuauccagaauuacacuguaacggaguuccagcccuuguauuacgucgccgaguccuuuaaugacgccaaagagaaagugagaaacuucgcggcgacaaucccccgaccauuuucgguccgguacgauccuuauacacagcgcauugagguccuugacaauacucaacagcugaagauccucgccgauucaauuaacucagagaucggaauucucuguucagcgcuccagaagaucaagugauaagcugccuucugcggggcuugccuucuggccaugcccuucuucucucccuugcaccuguaccucuuggucuuugaauaaagccugaguaggaag

SEQ ID NO: 6046 - RNA, 1359 nt, Artificial Sequence
  derived and/or modified sequence
auguccacugcaguccucgaaaauccaggacuugggcggaagcugucugauuucggacaagagacuuccuauauugaggauaauuguaaccagaacggggccaucagcuugauauucucauuaaaggaagaggucggugccuuggcuaaaguauuacgauuguucgaggagaaugacgugaaccuuacucauauugaauccagacccagccgacugaagaaggaugaguacgaauucuucacacaccucgacaaaaggagccuccccgcccugaccaacaucaucaaaauucuccgccaugacaucggcgcuaccguccaugagcugagucgcgacaagaaaaaggacaccgugcccugguucccgcgcacuauucaagaguuagauagguuugccaaccaaaucuuauccuacggagccgaacuggaugcagaucauccagguuuuaaagauccgguuuauagagccaggagaaagcaauuugcugauaucgcauacaauuauagacacggucagccuauuccacggguggaguacauggaagaagagaaaaagaccugggggacuguguuuaagacucuaaaaagcuuauauaagacucacgcauguuaugaauauaaccauaucuucccacuguuggagaaguacugugguuuucacgaagauaauauuccacagcucgaggaugugucucaauuucuccagaccugcacaggcuuucgccuccgcccaguugccgggcugcucucuuccagggacuuccugggaggacucgcauuuagaguguuucauugcacacaauauauacgccauggaucaaaaccaauguacacuccagagccugacauuugccaugagcugcuugggcacgugccacuguucucugaucggucauucgcacaguuuagccaggagauuggguuggccagucugggagccccugacgaauauaucgagaaacuugcuacaaucuauugguuuacagucgaauucggccucuguaaacagggagacagcauaaaagccuauggagccgggcugcucaguucguucggggagcuacaguauugcuuaucugaaaagccaaagcucuugccccuugagcuugagaaaaccgccauccaaaauuauaccgugacugaguuucaacccuuauauuacguugcugagagcuuuaacgaugccaaggaaaaggugagaaauuuugcagccacaauuccccggccauuuuccgucagguaugacccuuacacucaacggauugaagugcuggacaacacacagcaauugaagauccuggcagauuccaucaauuccgagauaggaauucuaugcucugccuugcagaagaucaaauag

SEQ ID NO: 6047 - RNA, 1359 nt, Artificial Sequence
  derived and/or modified sequence
augucuaccgccguauuagaaaauccaggacucggaagaaaacuguccgauuuuggucaagaaacaucuuacauagaggacaacugcaaccaaaacggagcaauuucgcuuaucuuuucucugaaggaagaggugggugcccuggcgaaggugcuucgucuguuugaagaaaaugacguaaaucucacacauauugagucccggcccucacgccucaagaaagacgaauacgaauucuuuacucaucuggacaagcguagccuuccugcccugacaaauauuaucaagauccugagacacgacauuggagcaaccgugcacgaauuaucaagagacaaaaagaaggauacaguuccuugguuuccuagaacaauucaggaguuggaucgauuugcaaaccaaauccuuucuuacggcgcugagcuugacgccgaccaccccggauucaaggacccaguguaccgggcucgcagaaagcaguucgccgauaucgcuuacaacuaccgacauggucagccuaucccucgugucgaauauauggaggaggaaaaaaagacuuggggcacuguuuuuaaaacauugaaaucccuuuauaagacccacgcgugcuaugaguacaaucacaucuuuccucugcucgaaaaguauugcggauuucaugaagauaauaucccgcagcuagaagacgugagccaguuucugcaaacauguacaggauuuagacugagaccugucgccggccuacucagcuccagagacuucuugggcggccuggcauuuagaguguuccacuguacucaguacaucagacauggcagcaagcccauguacacaccagaaccagacauaugccacgagcuacucggccaugugccccuauucagugaucgcucuuuugcccaguucucccaagagauuggacuugccucucucggggccccugacgaauacauugagaagcuugcaacaauuuauugguucacuguugaauucggccucugcaaacagggagauucuaucaaagcauacggggccggccuucucucuagcuuuggagaacuucaguauugcuugagugaaaagccaaaacugcucccucuagaguuagaaaaaacagcaauucagaacuauacugucacugaauuucaaccacucuacuauguugccgaaucuuuuaacgaugcgaaagaaaaagugcgcaacuuugcagcaaccaucccucgucccuucaguguccgauacgacccuuauacacagagaauagaagucuuggacaacacacagcagcuuaaaauacuggcagauuccauaaauagugagauugguauccucuguuccgcacuacagaaaauuaaauag

SEQ ID NO: 6048 - DNA, 1185 bp, Artificial Sequence
  derived and/or modified sequence
atggacatgcattgcaaggccgatcccttctcagcaatgcatcctgggcacggtggagtcaaccagctaggaggagtgttcgtgaacggcaggcctctccccgatgttgtaaggcagcgtatcgtggagctggcgcaccaaggagtgagaccctgcgacatcagcaggcagcttagagtgagtcacggatgcgtctctaaaattcttggcagatactatgagactggatctattaaacctggagtcataggcggctctaagcctaaagtagcaactcccaaagtggtggacaaaatcgccgagtataagcggcaaaatcccaccatgtttgcttgggaaatcagggaccgactgctcgctgaaggcatctgcgataacgatacagtgccatctgtatcttccattaaccgcatcatccgcaccaaagttcagcagccatttcatcctactcccgacggcgccggcaccggtgtaactgcccccgggcacacgatcgtcccgagtaccgcctctcccccggtgagttccgcctccaatgaccctgtgggtagttacagcatcaatgggatcctgggaatcccacgaagtaatggagaaaaaagaaaaagggacgaggacgtgtcggaggggagcgtgccgaatggcgattcacagtctggggtggattccttgcggaagcatttgagggctgacacttttactcagcagcagttggaggcactggacagggtcttcgagcgtccctcatacccagacgtttttcaagcctccgagcacataaaatctgagcaagggaacgagtactccttgcccgctctcacacccggcctggatgaggtgaaaagctcccttagcgcttccactaacccagaattagggagcaacgtctctggtacacagacctaccccgtcgtgacaggcagggatatggcttcaacgacccttccgggatatccgcctcacgtaccccctaccggacagggctcctacccaacttcaacactcgccggaatggtgcctggcagcgagtttagcggcaacccatacagccaccctcagtacaccgcctacaacgaagcctggagattcagcaaccccgcccttctgtcatcaccttactactactcagcagccccccggggaagcgccccagccgctgccgccgcagcctacgacagacactag

SEQ ID NO: 6049 - DNA, 1185 bp, Artificial Sequence
  derived and/or modified sequence
atggacatgcactgcaaggctgaccccttcagcgccatgcaccctggccatggaggagtgaaccagctgggcggcgtgtttgtgaatggccggcccctgcctgatgtggtgcggcagagaattgtggagctggcccaccagggcgtgcggccctgtgacatcagccggcagctgcgggtgagccacggctgtgtgtccaagatcctgggccgctactatgaaacaggcagcatcaagccaggagtgattggaggcagcaagcccaaggtggccacccccaaggtggtggacaagattgctgagtacaagaggcagaaccccaccatgtttgcctgggagatccgggaccggctgctggccgagggcatctgtgacaatgacacagtgcccagcgtgagcagcatcaaccgcatcatccgcaccaaggtgcagcagcccttccaccccaccccagatggagctggcaccggggtgacagcccctggccacaccatcgtgcccagcacagccagcccccctgtgagcagcgccagcaatgaccctgtgggcagctacagcatcaatggcatcctgggcatccccaggagcaatggagagaagaggaagagagatgaagatgtgtctgagggctctgtgcccaacggggacagccagagcggcgtggacagcctgaggaagcacctgcgggctgacaccttcacccagcagcagctggaggccctggacagagtgtttgagcggcccagctacccagatgtgttccaggccagcgagcacatcaagtctgagcagggcaatgagtacagcctgcctgccctgaccccaggcctggatgaggtgaagagcagcctgagcgccagcaccaaccctgagctgggcagcaatgtgtctggcacccagacctaccctgtggtgacaggccgggacatggccagcaccaccctgcccggctacccacctcatgtgcccccaacaggccagggcagctaccccaccagcaccctggccggcatggtgcccggcagcgagttcagcggcaacccctacagccacccccagtacacagcctacaatgaggcctggaggttcagcaacccagccctgctgagcagcccctactactacagcgctgccccccggggcagcgccccagctgctgctgctgctgcctatgacagacactag

SEQ ID NO: 6050 - DNA, 1185 bp, Artificial Sequence
  derived and/or modified sequence
atggacatgcactgcaaggccgaccccttcagcgccatgcaccccggccacggcggcgtaaatcagttaggcggcgtgttcgtaaacggccgcccactgccagacgtagtccgtcaaagaattgtggagttggcacatcagggggtgagaccctgtgacatctccaggcagctgcgcgtttcccatggctgcgtctcgaagatccttgggagatactacgaaaccgggagtataaaacccggagtgattggcggtagcaaacctaaagtggctactcccaaggttgttgacaagattgctgaatataagcgccagaatcccactatgttcgcatgggaaattcgggatcgcctcctggccgagggtatttgcgacaacgataccgtccccagtgtgtccagcatcaaccgcatcatcaggactaaggtccagcaacctttccaccccactccagacggtgctggcaccggagtgaccgcccctggccataccattgtaccctcaactgcgagcccaccagtatccagtgcgtcaaacgaccccgtgggcagctacagtataaatggcatactagggattccacgttccaacggcgagaagaggaaaagggatgaagacgtgtcggagggatcagtgccaaacggcgattctcagtcgggtgttgatagcctgaggaaacacctccgagcggacaccttcactcagcaacagttggaggcccttgatcgcgtgttcgagagacctagttatcccgacgtgttccaggcctcagaacacatcaaaagtgagcagggcaatgagtattccctgcccgccctaaccccaggccttgatgaagtgaagagtagtctgagcgcctccactaatccagaacttggaagtaacgtttcgggcacacagacctatccagtggttacggggagagatatggctagtactacactccctggatatcctcctcacgtcccgcccaccggccaaggctcctaccccacgtctacgctagctggcatggtgcccggcagcgagttttctggcaatccttacagccacccccaatacaccgcgtacaatgaggcttggcggttcagcaacccagccctgctgtcttctccttattactactcggctgcaccacgaggatctgcacccgccgccgccgcagccgcatacgacaggcattag

SEQ ID NO: 6051 - DNA, 1185 bp, Artificial Sequence
  derived and/or modified sequence
atggatatgcactgcaaggccgatcctttttctgccatgcatcctggtcatggcggtgtgaatcaactgggcggtgtgttcgtaaatggcaggccgcttcccgacgtggttcgacagcgaattgttgagctggcacaccagggagtgcggccatgcgacatcagcagacaactcagagtttcacacggttgcgtgtcaaagattttgggaagatattacgagaccggatcgatcaagcccggagttatcgggggttctaagcccaaggttgcaacgcccaaagtagtggataagatcgctgaatataagcgccaaaatcccaccatgtttgcttgggaaattagggaccggttactggccgaaggcatctgcgacaatgacaccgtgcccagcgtgagtagcatcaacaggatcattcggactaaagtccagcaacctttccacccgacacccgatggggcaggaactggcgtgacagctccaggccacacaattgtgccctctacagcgtctcccccagtgtcgagtgcttcaaacgatccagtgggaagttactccatcaacgggattctgggaatccccaggtcaaatggagaaaagagaaaaagggacgaggacgtatctgaaggttcagtgccgaacggagatagccagtccggggttgattccctgcgcaagcatctgcgggcagacacgttcacccagcagcagctggaagccctggaccgcgtgttcgagcgcccttcgtaccctgacgtgtttcaggctagtgagcacattaaaagtgaacaaggtaatgagtactccctgccagcacttacccccggtctggacgaggtcaagagctccctgtctgccagcaccaatcccgagcttggcagtaatgtgagtgggacacagacctacccggtcgtgacggggagggacatggcatccacaaccctgcccggatatcccccacacgtcccgccaacaggccagggtagctaccccaccagtacattagctggtatggttccagggagcgagttctccggcaacccctattctcatccccaatacacagcgtacaacgaggcgtggagattctcaaatccggctttgctgagcagtccatactactactcagctgcccctaggggatctgcaccggctgctgccgctgcagcatatgaccggcattag

SEQ ID NO: 6052 - DNA, 1185 bp, Artificial Sequence
  derived and/or modified sequence
atggacatgcactgcaaggccgaccccttcagcgccatgcaccccggccacggcggcgtgaaccagctgggcggcgtgttcgtgaacggcagacccctgcccgacgtggtgagacagagaatcgtggagctggcccaccagggcgtgagaccctgcgacatcagcagacagctgagagtgagccacggctgcgtgagcaagatcctgggcagatactacgagaccggcagcatcaagcccggcgtgatcggcggcagcaagcccaaggtggccacccccaaggtggtggacaagatcgccgagtacaagagacagaaccccaccatgttcgcctgggagatcagagacagactgctggccgagggcatctgcgacaacgacaccgtgcccagcgtgagcagcatcaacagaatcatcagaaccaaggtgcagcagcccttccaccccacccccgacggcgccggcaccggcgtgaccgcccccggccacaccatcgtgcccagcaccgccagcccccccgtgagcagcgccagcaacgaccccgtgggcagctacagcatcaacggcatcctgggcatccccagaagcaacggcgagaagagaaagagagacgaggacgtgagcgagggcagcgtgcccaacggcgacagccagagcggcgtggacagcctgagaaagcacctgagagccgacaccttcacccagcagcagctggaggccctggacagagtgttcgagagacccagctaccccgacgtgttccaggccagcgagcacatcaagagcgagcagggcaacgagtacagcctgcccgccctgacccccggcctggacgaggtgaagagcagcctgagcgccagcaccaaccccgagctgggcagcaacgtgagcggcacccagacctaccccgtggtgaccggcagagacatggccagcaccaccctgcccggctaccccccccacgtgccccccaccggccagggcagctaccccaccagcaccctggccggcatggtgcccggcagcgagttcagcggcaacccctacagccacccccagtacaccgcctacaacgaggcctggagattcagcaaccccgccctgctgagcagcccctactactacagcgccgcccccagaggcagcgcccccgccgccgccgccgccgcctacgacagacactag

SEQ ID NO: 6053 - protein, 104 aa, Artificial Sequence
  derived and/or modified sequence
MAGKAHRLSAEERDQLLPNLRAVGWNELEGRDAIFKQFHFKDFNRAFGFMTRVALQAEKLDHHPEWFNVYNKVHITLSTHECAGLSERDINLASFIEQVAVSMT

SEQ ID NO: 6054 - DNA, 315 bp, Artificial Sequence
  derived and/or modified sequence
atggccggcaaggcacaccgactgtccgccgaggagcgagaccagctgctgccaaacctgcgcgccgttgggtggaatgaactggagggacgggacgccatctttaagcaatttcacttcaaagatttcaaccgcgctttcgggtttatgactagagtggctctgcaggctgaaaagctagaccaccacccagagtggtttaatgtgtacaacaaggtccatatcacactgagcacccacgaatgtgccggcctctccgagcgggatattaatttggcctccttcatcgagcaggtggctgtgtcaatgacctag

SEQ ID NO: 6055 - DNA, 315 bp, Artificial Sequence
  derived and/or modified sequence
atggccggcaaggcccaccggctgtctgctgaggagcgggaccagctgctgcccaacctgcgggctgtgggctggaatgagctggagggcagagatgccatcttcaagcagttccacttcaaggacttcaacagagccttcggcttcatgaccagggtggccctgcaggccgagaagctggaccaccaccctgagtggttcaacgtgtacaacaaggtgcacatcaccctgagcacccatgaatgtgccggcctgtctgagcgggacatcaacctggccagcttcatcgagcaggtggccgtgtccatgacctag

SEQ ID NO: 6056 - DNA, 315 bp, Artificial Sequence
  derived and/or modified sequence
atggccggcaaggcccaccggctgagcgccgaggagcgggaccagcttctgccgaatctgcgagcagtaggctggaatgagctcgagggtcgagatgcaatctttaaacagtttcatttcaaagactttaatagggcattcgggttcatgactagagtagctctgcaggcggagaagctagaccaccacccagaatggttcaatgtgtacaataaggtgcacatcacccttagcactcacgagtgcgccggactctccgaacgggacatcaatctggcctcctttatcgaacaggtggccgtcagtatgacctag

SEQ ID NO: 6057 - DNA, 315 bp, Artificial Sequence
  derived and/or modified sequence
atggccggaaaagctcatcgcctgtccgcagaggagagggatcagttgcttccaaacctccgggcagtgggttggaatgagctagaagggcgtgacgcaatatttaaacaatttcattttaaggactttaatagggctttcgggtttatgacacgagtggcacttcaagcagagaaattggaccatcatcccgagtggttcaacgtctacaataaggtgcacattactctgtcaactcacgagtgcgctgggctcagcgagagagacatcaacctcgcttcatttattgaacaggtggcagtgtctatgacctag

SEQ ID NO: 6058 - DNA, 1006 bp, Artificial Sequence
  derived and/or modified sequence
cggggtgggattccaacccagaagcgggcatttggagccctcatgcttcaccctagctccctgaaacaagcacggaggatggctctgagcagcgaggaaagtgctggaagcaagcaggccgagcgcgtccctggctggggacgttaatcattaccggagggcggcccgagcgcggccccgccccgggacggcagcctgcgcgcccggccgccgcctgccctctccgctggccacctgctgccgcccgcgccatggctggcaaagcacacaggctgagcgctgaggagagggaccagctgctgccaaacctgagggctgtggggtggaatgagctggaaggccgtgatgccatcttcaagcagtttcatttcaaagacttcaacagggcctttgggttcatgacaagagtggccctgcaggctgagaaactggaccaccatcctgaatggtttaacgtgtacaacaaggtccacatcacgctgagcacccatgagtgtgccggcctttcagaacgggacataaacctggccagcttcatcgaacaagtagcagtgtccatgacatagaccctgcccttcctctttgaattcttccgggggaaggggtgactgaactgggagtccagggagggagctgaggagcccttaccctcccaccactcccctcccaagacccagccgccgccgttgagggctgagtccttgctgtgggatgtgccagtgtccccaccaacaccaggaatttagaccttttccctgcaccactctcttcatcctgggggctctgttacactaatttgaataaactctcccctttctttgcaacttcccagcaacaataatgattttcttgccaggccgtctcttgctccctaattcatttcccaggaagctgtgatacagggtgaaataaagtcttgtcttagaaaccaggaccctaaaccccacactatgtaatagaaacacatgtgtttttatgtctcaaataaaactattatatcacttgg

SEQ ID NO: 6059 - DNA, 315 bp, Artificial Sequence
  derived and/or modified sequence
atggccggcaaggcccacagactgagcgccgaggagagagaccagctgctgcccaacctgagagccgtgggctggaacgagctggagggcagagacgccatcttcaagcagttccacttcaaggacttcaacagagccttcggcttcatgaccagagtggccctgcaggccgagaagctggaccaccaccccgagtggttcaacgtgtacaacaaggtgcacatcaccctgagcacccacgagtgcgccggcctgagcgagagagacatcaacctggccagcttcatcgagcaggtggccgtgagcatgacctag

SEQ ID NO: 6060 - protein, 728 aa, Artificial Sequence
  derived and/or modified sequence
MAGFWVGTAPLVAAGRRGRWPPQQLMLSAALRTLKHVLYYSRQCLMVSRNLGSVGYDPNEKTFDKILVANRGEIACRVIRTCKKMGIKTVAIHSDVDASSVHVKMADEAVCVGPAPTSKSYLNMDAIMEAIKKTRAQAVHPGYGFLSENKEFARCLAAEDVVFIGPDTHAIQAMGDKIESKLLAKKAEVNTIPGFDGVVKDAEEAVRIAREIGYPVMIKASAGGGGKGMRIAWDDEETRDGFRLSSQEAASSFGDDRLLIEKFIDNPRHIEIQVLGDKHGNALWLNERECSIQRRNQKVVEEAPSIFLDAETRRAMGEQAVALARAVKYSSAGTVEFLVDSKKNFYFLEMNTRLQVEHPVTECITGLDLVQEMIRVAKGYPLRHKQADIRINGWAVECRVYAEDPYKSFGLPSIGRLSQYQEPLHLPGVRVDSGIQPGSDISIYYDPMISKLITYGSDRTEALKRMADALDNYVIRGVTHNIALLREVIINSRFVKGDISTKFLSDVYPDGFKGHMLTKSEKNQLLAIASSLFVAFQLRAQHFQENSRMPVIKPDIANWELSVKLHDKVHTVVASNNGSVFSVEVDGSKLNVTSTWNLASPLLSVSVDGTQRTVQCLSREAGGNMSIQFLGTVYKVNILTRLAAELNKFMLEKVTEDTSSVLRSPMPGVVVAVSVKPGDAVAEGQEICVIEAMKMQNSMTAGKTGTVKSVHCQAGDTVGEGDLLVELE

SEQ ID NO: 6061 - DNA, 2187 bp, Artificial Sequence
  derived and/or modified sequence
atggccggtttttgggtgggaacagctcctcttgtggccgccggtaggcgaggccgttggccaccccagcagctcatgttatctgctgccctcagaactcttaagcacgtcctctattatagcaggcaatgcctgatggtgtccaggaacttggggtctgtgggctacgaccctaatgaaaagactttcgataagattctggtggcaaacaggggcgaaatcgcctgtcgggtcatcagaacctgcaagaagatggggatcaaaaccgtagccattcactctgacgtggacgcatcctcggtacacgttaagatggccgacgaggctgtctgcgtgggcccagcaccaacctctaaaagctacctgaacatggatgccatcatggaggccatcaaaaagacccgcgcacaggccgttcatccagggtatggttttctctccgagaataaggaatttgccaggtgtttagctgcagaagacgtcgtatttatcgggccagacactcacgctattcaagccatgggagataagatcgagtccaaactgctggcaaagaaggctgaagtgaacacaattccggggttcgacggagtggtaaaggacgcagaggaggcggttcgcatagctagggagatcgggtatcccgtgatgattaaggcctcagcaggaggaggaggcaaaggaatgcggattgcctgggacgatgaggaaactcgggatggattccggttgtcctcacaggaggccgctagtagtttcggtgatgaccgtctgctgatcgagaaattcattgataatccacgccatattgagatccaagttcttggtgacaagcacggaaacgcactgtggctcaacgagagagagtgctccatccagcgaaggaaccaaaaggtcgtggaagaggctcctagtatattcctagatgccgaaacacgtcgggcaatgggtgagcaggctgtcgctttagcccgagctgttaagtactccagcgcagggacggtggaattcctggtagactcgaaaaagaatttttactttttggagatgaacacacgcttgcaggttgagcaccccgtgaccgaatgcataaccggcttggatctggtgcaggaaatgataagggtagccaagggctatcctctgcgacacaaacaggctgacatcaggattaacggttgggccgtagagtgtcgtgtctacgccgaagatccatataagagctttgggttgccatctattggacgcctatcccagtatcaggagccccttcacctaccaggggttcgcgtcgactccggaatacagcccgggagtgatatatcaatttattacgaccctatgatctcaaagcttatcacgtacggctccgatcgcacagaagctctcaagcgaatggcagacgccctggacaactatgtgatcagaggagtcacacataatatcgcactacttagggaggtgatcataaatagtagattcgtgaaaggtgacattagcaccaaattcctcagcgatgtctaccctgatggatttaagggccacatgttgaccaagtctgagaaaaatcagctgctcgcaatagcaagctctctctttgtcgcattccagctgagagcacagcactttcaggagaattcacgcatgcctgttatcaagcccgatattgccaactgggaattgagcgtcaaacttcatgataaggttcataccgtcgtggccagcaataatggctccgtgttctctgtggaagtggatggatctaaactcaatgtcaccagtacatggaacctcgccagccccctcctctcagtgtccgtggatgggacgcagaggaccgttcagtgcctgtcacgggaggccggaggtaatatgtctatccaatttttaggtaccgtttataaagtgaatatcctcacccgcctggcagcggagctgaataagttcatgcttgagaaggtcactgaggatactagttccgttttgaggtcccccatgccgggggtggttgtggccgtctctgtgaaaccgggggatgctgtcgcagagggccaagagatctgtgttatcgaggccatgaagatgcaaaattcaatgacagccgggaaaaccgggacagtgaagagtgtgcactgccaggcaggcgacacagtcggcgagggagacttactggtggagctggagtag

SEQ ID NO: 6062 - DNA, 2187 bp, Artificial Sequence
  derived and/or modified sequence
atggccggcttctgggtgggcacagcccccctggtggccgccggccggcggggccgctggccaccccagcagctgatgctgtctgctgccctgcggaccctgaagcacgtgctgtactacagccggcagtgcctgatggtgtccaggaacctgggctctgtgggctatgaccccaatgagaagacctttgacaagatcctggtggccaacagaggagagatcgcctgcagggtcatccgcacctgcaagaagatgggcatcaagacagtggccatccacagtgatgtggatgccagctctgtgcacgtgaagatggctgatgaagctgtgtgtgtgggccctgcccccaccagcaagagctacctgaacatggatgccatcatggaggccatcaagaagacccgggcccaggccgtgcaccctggctacggcttcctgtctgagaacaaggagtttgcccgctgcctggccgcagaagatgtggtgttcatcggccctgacacccacgccatccaggccatgggagacaagattgagagcaagctgctggccaagaaggccgaggtgaacaccatccctggctttgatggagtggtgaaggatgctgaggaggccgtgcgcatcgcccgggagatcggctaccctgtgatgatcaaggccagcgctgggggcggcggcaagggcatgagaattgcctgggatgatgaggagaccagagatggcttccggctgagcagccaggaggccgccagcagctttggagatgaccggctgctgattgagaagttcatcgacaaccccaggcacatcgagatccaggtgctgggggacaagcatggaaatgccctgtggctgaatgaaagagaatgttccatccagaggaggaaccagaaggtggtggaggaggcccccagcatcttcctggatgctgagacccggcgggccatgggagagcaggccgtggccctggcccgggctgtgaagtacagcagcgctggcaccgtggagttcctggtggacagcaagaagaacttctacttcctggagatgaacacccggctgcaggtggagcaccctgtgacagagtgcatcaccggcctggacctggtgcaggagatgatccgggtggccaagggctaccccctgcggcacaagcaggccgacatccgcatcaatggctgggccgtggagtgccgggtgtatgcagaggacccctacaagagctttggcctgcccagcatcggccgcctgagccagtaccaggagcccctgcacctgcccggggtgcgggtggacagcggcatccagcccggcagtgacatcagcatctactatgaccccatgatcagcaagctgatcacctacggcagtgacagaacagaggccctgaagaggatggctgatgccctggacaactacgtgatccggggcgtgacccacaacatcgccctgctgcgggaggtgatcatcaacagcagatttgtgaagggggacatcagcaccaagttcctgagtgatgtgtacccagatggcttcaagggccacatgctgaccaagtctgagaagaaccagctgctggccatcgccagcagcctgtttgtggccttccagctgcgggcccagcacttccaggagaacagcaggatgcctgtgatcaagccagacatcgccaactgggagctgtctgtgaagctgcatgacaaggtgcacacagtggtggccagcaacaatggatctgtgttttctgtggaggtggatggcagcaagctgaatgtgaccagcacctggaacctggccagccccctgctgtctgtgtctgtggatggcacccagaggacagtgcagtgcctgagccgggaggccggcggcaacatgagcatccagttcctgggcaccgtgtacaaggtgaacatcctgacccggctggccgctgagctgaacaagttcatgctggagaaggtgacagaggacaccagctctgtgctgcggagccccatgcctggggtggtggtggccgtgtctgtgaagccaggagatgctgtggccgagggccaggagatctgtgtgattgaggccatgaagatgcagaacagcatgacagctgggaagacaggcaccgtgaagtctgtgcactgccaggccggggacacagtgggggagggggacctgctggtggagctggagtag

SEQ ID NO: 6063 - DNA, 2187 bp, Artificial Sequence
  derived and/or modified sequence
atggccggcttctgggtgggcaccgcccccctggtggccgccggccggcgtggccggtggccaccacagcagcttatgctgtccgcagcactgagaactttaaagcacgtgctgtattacagtcgccaatgcctcatggtgtcacgcaacctggggtccgttggctatgatcctaacgagaagacatttgacaagatcctggtggcaaatcgtggagagatcgcatgccgggtgattcgtacatgcaagaaaatgggcattaaaaccgtggcaatccactctgacgttgatgctagcagcgtgcacgtgaagatggctgatgaagccgtttgtgtgggccctgcccccactagcaagagctatctcaacatggacgctatcatggaggcgattaaaaagactagggcccaggccgtgcaccccggttacggattcctgtcagagaacaaggagtttgcccgatgtctggcggccgaagacgtcgtgttcatcggaccggacactcatgccattcaagctatgggtgacaagatcgagagtaaacttctggcaaagaaagccgaagtcaatactatccccggcttcgatggcgtggtaaaagacgctgaagaggcagtgcggatcgctagagagatcggctatccggtgatgattaaagcatctgccggtggcgggggtaaggggatgcgaattgcctgggacgatgaggaaacccgagacggttttcggctcagtagtcaagaggctgcatcatccttcggggacgacaggctgctaatagagaagtttattgataacccacgtcacatagaaatccaggttctcggcgataagcatggcaatgccctgtggctgaatgagagagaatgtagcatacagaggcggaaccagaaggtggtcgaagaagcgccctctatcttcctggacgccgaaacacgccgcgccatgggcgaacaagctgtggccctggcgcgtgctgtaaaatacagctccgcggggacagtggaatttctagtagacagcaaaaagaacttttatttcctggaaatgaataccagactgcaggtggaacaccccgtaacagagtgcataaccggcttggacctggtgcaggaaatgatccgcgtggcaaagggttatcccctgcgccacaaacaagccgatattaggataaacggctgggcagtcgagtgccgagtttacgccgaagacccctacaagagctttgggcttccttcaattggccggttgtcacagtaccaagagcccttacacctgcctggcgttcgcgtggatagtggaattcaacccggttccgacatcagcatctattacgacccaatgatctctaaactgataacgtacggatcggataggactgaggcactgaagcggatggccgatgccttggataattatgttatacgcggagtgacacataatattgccctgctcagagaagtgattatcaacagcagattcgtgaaaggcgatatctccaccaagtttttatccgacgtgtaccccgacggttttaagggccatatgcttacaaaatctgagaagaatcaattactcgccattgcatccagtctctttgtagctttccagttgcgtgctcagcacttccaggaaaactcccgaatgcccgtgatcaaaccagacatcgctaattgggagctctccgtcaagctgcacgacaaggtgcataccgtggtcgccagcaataacggaagcgtcttttccgttgaagttgatgggagtaagttgaacgtgacgagtacgtggaatcttgctagtccattgctctccgtatccgtggatggcacccagaggacagtgcagtgcctttccagagaagcggggggtaatatgagcatccaatttctgggcaccgtgtacaaagtgaatattctaaccaggctcgccgccgagctcaataaattcatgctggaaaaggtaacagaggatacatctagcgtgctcaggtcacccatgcctggagttgtggtggcagtctccgtaaagccgggcgacgcggtagccgaaggacaggagatatgcgttatagaggctatgaaaatgcagaactccatgaccgctggcaaaaccggcacggttaagtctgtgcattgtcaagccggagacacagtgggagaaggagatctgcttgtggaactagagtag

SEQ ID NO: 6064 - DNA, 2187 bp, Artificial Sequence
  derived and/or modified sequence
atggccggtttctgggtaggcactgcccctctcgtggcagcaggtagacggggacgctggccacctcagcagttaatgctctctgctgccctgagaacattaaagcacgtgctatattactccagacagtgcttgatggtgtcacgcaatctgggaagtgtgggctatgatccaaatgagaaaactttcgacaagattctggtggcaaatagaggcgaaatcgcttgtcgggtcatccggacctgtaaaaaaatgggtatcaaaaccgtagccattcattctgacgttgatgcttcctccgtgcacgtgaagatggccgatgaggctgtctgcgtaggccctgcgcctacatctaagagctacctcaatatggacgccattatggaggccataaaaaagacgagagcccaggcagtgcatcctgggtacgggttcctaagtgaaaacaaggagtttgcacggtgtttggccgctgaagacgttgttttcatcggacctgacacgcacgctatccaggccatgggcgacaagattgagagcaagctcctggcaaagaaagcagaagtgaatacaatccctgggttcgacggagtggtgaaggatgctgaggaagctgttaggattgcgagagagataggctacccggttatgattaaggcttctgccggtggtggaggcaaaggaatgcgcatcgcctgggatgacgaagagacgcgggacggcttccggctgtcctctcaggaggcggcatcgagcttcggcgatgacaggctgctgatagaaaagtttattgataacccaagacacattgagattcaggtcctcggtgacaaacatgggaacgcactatggctgaatgaacgagagtgttctatccaaagacgcaaccagaaggtggtggaagaggctccctcgatctttttagacgccgagacacgtcgagccatgggggagcaggccgtggccctggccagagcggtgaagtattcttctgcaggcaccgtggagtttctcgttgactccaagaagaatttctactttctcgagatgaacactagactgcaggtggaacacccagtgactgaatgcataactggtctggatctcgtgcaagaaatgattagggtggcaaagggctacccattacggcataagcaggccgatattaggatcaacgggtgggccgtagaatgccgtgtgtacgccgaggatccttacaagtcatttggactgccctccattgggcgtctgagccagtatcaggagccgcttcacttacctggggtgcgcgtggactccggcatccagcccggtagcgatatctctatttactatgaccctatgatctccaagttaattacatacggatctgaccggactgaggctttgaagcgtatggccgacgctctggacaactacgtaatcaggggagtgacccacaatatagccctcctgcgtgaagtaattattaatagtaggtttgtgaagggtgatatttcaactaaatttctcagtgatgtgtacccagatggttttaaggggcacatgttaacgaagagcgagaagaatcagctgttggccatcgccagtagtctgtttgtggcgttccagctgagagcacagcacttccaggagaactctaggatgcccgtgatcaaacccgacattgcaaactgggaactcagcgtgaagctgcatgacaaagtgcacaccgttgtggcctcaaacaacggttctgtattttctgtcgaggtggatggttccaaattgaacgtgactagtacctggaacctcgccagtcctctcttatcagtcagcgtggatggaactcaaaggaccgtgcagtgtctaagccgcgaagcaggtggaaacatgtctatacaattcctgggaaccgtgtacaaggtgaacatcctcactcgactagccgcagagctgaataagtttatgctcgaaaaggtcacagaagacaccagctccgtgctgcggagtccaatgcctggggtggtggtggctgtgtcagtgaagccgggagacgccgtcgccgagggccaggaaatttgcgtgatcgaggcgatgaagatgcagaattccatgactgctggtaaaaccgggacagtgaagtccgtccattgccaggccggagataccgtgggagaaggcgatctgctggtagagttagagtag

SEQ ID NO: 6065 - DNA, 2507 bp, Artificial Sequence
  derived and/or modified sequence
acaacaatggcggggttctgggtcgggacagcaccgctggtcgctgccggacggcgtgggcggtggccgccgcagcagctgatgctgagcgcggcgctgcggaccctgaagcatgttctgtactattcaagacagtgcttaatggtgtcccgtaatcttggttcagtgggatatgatcctaatgaaaaaacttttgataaaattcttgttgctaatagaggagaaattgcatgtcgggttattagaacttgcaagaagatgggcattaagacagttgccatccacagtgatgttgatgctagttctgttcatgtgaaaatggcggatgaggctgtctgtgttggcccagctcccaccagtaaaagctacctcaacatggatgccatcatggaagccattaagaaaaccagggcccaagctgtacatccaggttatggattcctttcagaaaacaaagaatttgccagatgtttggcagcagaagatgtcgttttcattggacctgacacacatgctattcaagccatgggcgacaagattgaaagcaaattattagctaagaaagcagaggttaatacaatccctggctttgatggagtagtcaaggatgcagaagaagctgtcagaattgcaagggaaattggctaccctgtcatgatcaaggcctcagcaggtggtggtgggaaaggcatgcgcattgcttgggatgatgaagagaccagggatggttttagattgtcatctcaagaagctgcttctagttttggcgatgatagactactaatagaaaaatttattgataatcctcgtcatatagaaatccaggttctaggtgataaacatgggaatgctttatggcttaatgaaagagagtgctcaattcagagaagaaatcagaaggtggtggaggaagcaccaagcatttttttggatgcggagactcgaagagcgatgggagaacaagctgtagctcttgccagagcagtaaaatattcctctgctgggaccgtggagttccttgtggactctaagaagaatttttatttcttggaaatgaatacaagactccaggttgagcatcctgtcacagaatgcattactggcctggacctagtccaggaaatgatccgtgttgctaagggctaccctctcaggcacaaacaagctgatattcgcatcaacggctgggcagttgaatgtcgggtttatgctgaggacccctacaagtcttttggtttaccatctattgggagattgtctcagtaccaagaaccgttacatctacctggtgtccgagtggacagtggcatccaaccaggaagtgatattagcatttattatgatcctatgatttcaaaactaatcacatatggctctgatagaactgaggcactgaagagaatggcagatgcactggataactatgttattcgaggtgttacacataatattgcattacttcgagaggtgataatcaactcacgctttgtaaaaggagacatcagcactaaatttctctccgatgtgtatcctgatggcttcaaaggacacatgctaaccaagagtgagaagaaccagttattggcaatagcatcatcattgtttgtggcattccagttaagagcacaacattttcaagaaaattcaagaatgcctgttattaaaccagacatagccaactgggagctctcagtaaaattgcatgataaagttcataccgtagtagcatcaaacaatgggtcagtgttctcggtggaagttgatgggtcgaaactaaatgtgaccagcacgtggaacctggcttcgcccttattgtctgtcagcgttgatggcactcagaggactgtccagtgtctttctcgagaagcaggtggaaacatgagcattcagtttcttggtacagtgtacaaggtgaatatcttaaccagacttgccgcagaattgaacaaatttatgctggaaaaagtgactgaggacacaagcagtgttctgcgttccccgatgcccggagtggtggtggccgtctctgtcaagcctggagacgcggcaacctcgagtctgtctgtagagatctgcctattctggacatttcaggtagcagaaggtcaagaaatttgtgtgattgaagccatgaaaatgcagaatagtatgacagctgggaaaactggcacggtgaaatctgtgcactgtcaagctggagacacagttggagaaggggatctgctcgtggagctggaatgaaggatttataacctttcagtcatcacccaatttaattagccatttgcatgatgctttcacacacaattgattcaagcattatacaggaacacccctgtgcagctacgtttacgtcgtcatttattccacagagtcaagaccaatattctgccaaaaaatcaccaatggaaattttcattgatataaatacttgtacatatgatttgtacttctgctgtgagattccctagtgtcaaaattaaatcaataaaactgagcatttgtct

SEQ ID NO: 6066 - DNA, 2491 bp, Artificial Sequence
  derived and/or modified sequence
gtgagaggtcagcagaggggcggtctgcggggacaacaatggcggggttctgggtcgggacagcaccgctggtcgctgccggacggcgtgggcggtggccgccgcagcagctgatgctgagcgcggcgctgcggaccctgaagcatgttctgtactattcaagacagtgcttaatggtgtcccgtaatcttggttcagtgggatatgatcctaatgaaaaaacttttgataaaattcttgttgctaatagaggagaaattgcatgtcgggttattagaacttgcaagaagatgggcattaagacagttgccatccacagtgatgttgatgctagttctgttcatgtgaaaatggcggatgaggctgtctgtgttggcccagctcccaccagtaaaagctacctcaacatggatgccatcatggaagccattaagaaaaccagggcccaagctgtacatccaggttatggattcctttcagaaaacaaagaatttgccagatgtttggcagcagaagatgtcgttttcattggacctgacacacatgctattcaagccatgggcgacaagattgaaagcaaattattagctaagaaagcagaggttaatacaatccctggctttgatggagtagtcaaggatgcagaagaagctgtcagaattgcaagggaaattggctaccctgtcatgatcaaggcctcagcaggtggtggtgggaaaggcatgcgcattgcttgggatgatgaagagaccagggatggttttagattgtcatctcaagaagctgcttctagttttggcgatgatagactactaatagaaaaatttattgataatcctcgtcatatagaaatccaggttctaggtgataaacatgggaatgctttatggcttaatgaaagagagtgctcaattcagagaagaaatcagaaggtggtggaggaagcaccaagcatttttttggatgcggagactcgaagagcgatgggagaacaagctgtagctcttgccagagcagtaaaatattcctctgctgggaccgtggagttccttgtggactctaagaagaatttttatttcttggaaatgaatacaagactccaggttgagcatcctgtcacagaatgcattactggcctggacctagtccaggaaatgatccgtgttgctaagggctaccctctcaggcacaaacaagctgatattcgcatcaacggctgggcagttgaatgtcgggtttatgctgaggacccctacaagtcttttggtttaccatctattgggagattgtctcagtaccaagaaccgttacatctacctggtgtccgagtggacagtggcatccaaccaggaagtgatattagcatttattatgatcctatgatttcaaaactaatcacatatggctctgatagaactgaggcactgaagagaatggcagatgcactggataactatgttattcgaggtgttacacataatattgcattacttcgagaggtgataatcaactcacgctttgtaaaaggagacatcagcactaaatttctctccgatgtgtatcctgatggcttcaaaggacacatgctaaccaagagtgagaagaaccagttattggcaatagcatcatcattgtttgtggcattccagttaagagcacaacattttcaagaaaattcaagaatgcctgttattaaaccagacatagccaactgggagctctcagtaaaattgcatgataaagttcataccgtagtagcatcaaacaatgggtcagtgttctcggtggaagttgatgggtcgaaactaaatgtgaccagcacgtggaacctggcttcgcccttattgtctgtcagcgttgatggcactcagaggactgtccagtgtctttctcgagaagcaggtggaaacatgagcattcagtttcttggtacagtgtacaaggtgaatatcttaaccagacttgccgcagaattgaacaaatttatgctggaaaaagtgactgaggacacaagcagtgttctgcgttccccgatgcccggagtggtggtggccgtctctgtcaagcctggagacgcggtagcagaaggtcaagaaatttgtgtgattgaagccatgaaaatgcagaatagtatgacagctgggaaaactggcacggtgaaatctgtgcactgtcaagctggagacacagttggagaaggggatctgctcgtggagctggaatgaaggatttataacctttcagtcatcacccaatttaattagccatttgcatgatgctttcacacacaattgattcaagcattatacaggaacacccctgtgcagctacgtttacgtcgtcatttattccacagagtcaagaccaatattctgccaaaaaatcaccaatggaaattttcattgatataaatacttgtacatatgatttgtacttctgctgtgagattccctagtgtcaaaattaaatcaataaaactgagcatttgtct

SEQ ID NO: 6067 - DNA, 939 bp, Artificial Sequence
  derived and/or modified sequence
tccgatgtgtatcctgatggcttcaaaggacacatgctaaccaagagtgagaagaaccagttattggcaatagcatcatcattgtttgtggcattccagttaagagcacaacattttcaagaaaattcaagaatgcctgttattaaaccagacatagccaactgggagctctcagtaaaattgcatgataaagttcataccgtagtagcatcaaacaatgggtcagtgttctcggtggaagttgatgggtcgaaactaaatgtgaccagcacgtggaacctgttcgcccttattgtctgtcagcgttgatggcactcagaggactgtccagtgtctttctcgagaagcaggtggaaacatgagcattcagtttcttggtacagtgtacaaggtgaatatcttaaccagacttgccgcagaattgaacaaatttatgctggaaaaagtgactgaggacacaagcagtgttctgcgttccccgatgcccggagtggtggtggccgtctctgtcaagcctggagacgcggtagcagaaggtcaagaaatttgtgtgattgaagccatgaaaatgcagaatagtatgacagctgggaaaactggcacggtgaaatctgtgcactgtcaagctggagacacagttggagaaggggatctgctcgtggagctggaatgaaggatttataacctttcagtcatcacccaatttaattagccatttgcatgatgctttcacacacaattgattcaagcattatacaggaacacccctgtgcagctacgtttacgtcgtcatttattccacagagtcaagaccaatattctgccaaaaaatcaccaatggaaattttcattgatataaatacttgtacatatgatttgtacttctgctgtgagattccctagtgtcaaaattaaatcaataaaactgagcatttgtct

SEQ ID NO: 6068 - DNA, 2187 bp, Artificial Sequence
  derived and/or modified sequence
atggccggattctgggtggggaccgctcccctcgtggcagcagggagaaggggtaggtggccacctcagcagttgatgcttagcgcagctctgagaaccctaaagcacgtcttgtattactcaagacagtgtcttatggtctctaggaatctgggttcagtcgggtacgatcccaacgagaagacattcgacaaaatcctggttgcaaatcggggcgagatcgcttgtagagtcatcagaacgtgcaaaaagatggggataaagaccgtggcaattcacagcgacgttgacgcttccagtgtccacgtaaagatggccgacgaggcggtgtgtgtagggcccgcgccgacatctaagagttacttgaacatggacgcgattatggaggccattaagaaaaccagagcgcaggccgtgcatccaggctacgggttcttgtcggaaaacaaggagttcgccaggtgtctagccgctgaagatgtagtgttcattggacccgacactcacgccattcaggcaatgggagataaaatcgagagcaagctgttggcaaagaaggcggaggtcaatacaatccccgggttcgatggggtggtgaaagatgcagaggaggcggttaggattgcgcgggaaatcggatatcccgttatgatcaaagcaagcgccggtgggggcggcaagggtatgagaattgcttgggacgacgaggaaaccagagacggttttagacttagctctcaggaggctgcaagcagttttggcgatgacagattgttaatcgaaaagtttattgacaacccccggcatatcgaaatccaggtgttaggagacaaacacggcaacgcgctctggctgaacgagcgagagtgtagtatccagaggaggaaccagaaagtggtcgaggaggctccttctatatttctggacgcggagacaagacgtgctatgggcgaacaggcagtagcgctggcgcgggcggtcaaatactccagcgccggaaccgtggagtttctggttgactcaaagaaaaatttttacttcctcgagatgaacacacggctccaggtggaacacccagtgacggaatgtataactggactggacctcgtgcaagaaatgatacgagttgccaaaggctatcccctccgccacaaacaggccgatatacggataaacggctgggcagttgagtgtagagtgtacgcggaagatccgtacaagagctttggcctaccatcaatcggcaggttgtctcaatatcaggaacccttgcatctgccgggcgtgagggttgatagcggcatacaaccaggatcagacattagcatctactacgacccgatgatttctaagctaattacctacggctcggatagaaccgaagccctgaagcgaatggccgatgccttggacaattacgttattaggggggtcacacataacatcgctctcctacgcgaggtaatcatcaatagccgattcgtgaaaggcgatatctctaccaagttcctgagcgacgtataccctgatggttttaagggtcatatgctcactaagtctgagaaaaatcaattactggccattgcgtcctccctctttgtcgcatttcagctgagggcccagcactttcaggagaattccaggatgcctgtgatcaagcccgatatcgccaattgggaactatccgtgaagctacacgacaaagtgcacacagtggtggcttcgaacaacgggtctgtttttagtgttgaggtcgacggctccaaacttaacgtcacctccacctggaatttggctagtcccctgttgagcgtctcagtggatgggactcagaggacagttcagtgcctgtccagggaggccggcggaaatatgtctattcaattcttgggaaccgtgtacaaggttaacatactgacccggctggcagccgaactgaataaattcatgctggaaaaggtaactgaagatacctcatcagtacttagatcccccatgcctggggtggtggtcgcagttagcgtgaagcccggggatgctgtagccgaggggcaggaaatctgtgttatcgaagcgatgaagatgcagaattcgatgacagccggaaaaacgggaacagtaaaatccgtccattgccaggccggtgacacagtcggcgaaggagaccttttggtcgaattggaatag

SEQ ID NO: 6069 - DNA, 2187 bp, Artificial Sequence
  derived and/or modified sequence
atggcaggattctgggtggggaccgccccactggtggcggccggtcgacggggtagatggccaccccagcaactcatgctaagtgcagctttacggacattgaagcacgtgctctactattcaaggcagtgcctgatggtatcacgaaacctcggcagtgtaggatatgatcccaacgaaaaaacatttgataaaatcttggtggcaaacagaggagagatcgcctgcagggtcatccgaacttgtaagaagatgggcatcaaaactgtcgccatacactctgatgttgatgccagcagcgttcacgttaaaatggccgacgaagcagtgtgcgtgggacccgctccaacctccaagagttacctgaatatggacgctatcatggaggccataaaaaaaacaagagctcaggccgtacaccccggatatggttttctcagcgagaataaggagtttgcgaggtgcctggccgccgaagatgtcgtgtttattggtccagatactcatgccatccaggccatgggagataaaattgagtctaagttattagctaaaaaagccgaggttaacaccatcccgggcttcgacggggtagtaaaagacgccgaagaagctgtgagaatagcaagggagattggctatcctgtgatgatcaaagcctcagctggaggcggcggcaagggtatgcgaattgcatgggacgacgaagaaacaagggacgggttcagactaagtagtcaggaggcagcctcatcctttggcgatgaccgtctgcttattgagaagttcatcgataatccccgacatatcgaaatacaggtactgggcgacaaacatggaaatgccttatggcttaacgaacgcgagtgtagcatacagcgtaggaatcagaaagttgtggaagaggccccatcaatctttctcgatgctgagactcgccgagctatgggggagcaggccgtggcccttgcccgagcagtcaagtattcgagtgccggaaccgtggagttcctcgtggattcaaaaaaaaacttctactttctggaaatgaatacacgcctgcaagtcgagcaccccgtcaccgagtgtattactgggttggatctggttcaggaaatgattagagtggcaaaagggtaccccctcagacacaaacaggctgacatcaggattaacggatgggcagttgaatgtagggtatacgccgaagatccatacaagagtttcgggctgccatctataggacgtctttctcaataccaagagcccctgcacctgcctggcgtacgggtcgacagtggaatccagcctggctccgacatctccatttactatgatccaatgattagcaaattgatcacttacgggtcggacaggaccgaagcattaaagagaatggccgatgcccttgataactacgtcatcagaggcgtgacacacaacattgctttgcttagagaggtgataatcaatagtcgttttgtgaagggggacatctccaccaaatttcttagtgatgtgtatccggacggattcaagggccatatgctgaccaagagcgagaaaaatcaactccttgcaatcgcttcatccctgtttgtggcttttcagctccgcgctcagcatttccaggaaaacagtagaatgccagttatcaagcccgacatcgcaaactgggaattgtctgtcaaactgcatgataaggtgcacaccgtggttgcttctaataatggttctgtattctccgtggaggttgacgggtctaaactcaatgtcacatctacatggaacctagcttcccctttactgagcgtgtctgtggacggaacacagaggactgtgcaatgccttagcagagaggcagggggaaacatgagtatccagtttctgggcactgtgtacaaagtcaacattcttacacgtctggccgctgagctgaataagtttatgttagagaaagtcaccgaggatacgtcatctgtcctgaggtccccaatgcctggcgtggtcgttgccgtaagtgttaagcccggagatgcagtggcagaagggcaggagatttgtgtgatagaagccatgaagatgcagaatagtatgacagcgggaaagacgggaacagtgaaatctgtgcattgccaggcaggcgatacagttggtgaaggggatctcttggtagagcttgagtag

SEQ ID NO: 6070 - DNA, 2187 bp, Artificial Sequence
  derived and/or modified sequence
atggccggcttctgggtgggcaccgcccccctggtggccgccggcagaagaggcagatggcccccccagcagctgatgctgagcgccgccctgagaaccctgaagcacgtgctgtactacagcagacagtgcctgatggtgagcagaaacctgggcagcgtgggctacgaccccaacgagaagaccttcgacaagatcctggtggccaacagaggcgagatcgcctgcagagtgatcagaacctgcaagaagatgggcatcaagaccgtggccatccacagcgacgtggacgccagcagcgtgcacgtgaagatggccgacgaggccgtgtgcgtgggccccgcccccaccagcaagagctacctgaacatggacgccatcatggaggccatcaagaagaccagagcccaggccgtgcaccccggctacggcttcctgagcgagaacaaggagttcgccagatgcctggccgccgaggacgtggtgttcatcggccccgacacccacgccatccaggccatgggcgacaagatcgagagcaagctgctggccaagaaggccgaggtgaacaccatccccggcttcgacggcgtggtgaaggacgccgaggaggccgtgagaatcgccagagagatcggctaccccgtgatgatcaaggccagcgccggcggcggcggcaagggcatgagaatcgcctgggacgacgaggagaccagagacggcttcagactgagcagccaggaggccgccagcagcttcggcgacgacagactgctgatcgagaagttcatcgacaaccccagacacatcgagatccaggtgctgggcgacaagcacggcaacgccctgtggctgaacgagagagagtgcagcatccagagaagaaaccagaaggtggtggaggaggcccccagcatcttcctggacgccgagaccagaagagccatgggcgagcaggccgtggccctggccagagccgtgaagtacagcagcgccggcaccgtggagttcctggtggacagcaagaagaacttctacttcctggagatgaacaccagactgcaggtggagcaccccgtgaccgagtgcatcaccggcctggacctggtgcaggagatgatcagagtggccaagggctaccccctgagacacaagcaggccgacatcagaatcaacggctgggccgtggagtgcagagtgtacgccgaggacccctacaagagcttcggcctgcccagcatcggcagactgagccagtaccaggagcccctgcacctgcccggcgtgagagtggacagcggcatccagcccggcagcgacatcagcatctactacgaccccatgatcagcaagctgatcacctacggcagcgacagaaccgaggccctgaagagaatggccgacgccctggacaactacgtgatcagaggcgtgacccacaacatcgccctgctgagagaggtgatcatcaacagcagattcgtgaagggcgacatcagcaccaagttcctgagcgacgtgtaccccgacggcttcaagggccacatgctgaccaagagcgagaagaaccagctgctggccatcgccagcagcctgttcgtggccttccagctgagagcccagcacttccaggagaacagcagaatgcccgtgatcaagcccgacatcgccaactgggagctgagcgtgaagctgcacgacaaggtgcacaccgtggtggccagcaacaacggcagcgtgttcagcgtggaggtggacggcagcaagctgaacgtgaccagcacctggaacctggccagccccctgctgagcgtgagcgtggacggcacccagagaaccgtgcagtgcctgagcagagaggccggcggcaacatgagcatccagttcctgggcaccgtgtacaaggtgaacatcctgaccagactggccgccgagctgaacaagttcatgctggagaaggtgaccgaggacaccagcagcgtgctgagaagccccatgcccggcgtggtggtggccgtgagcgtgaagcccggcgacgccgtggccgagggccaggagatctgcgtgatcgaggccatgaagatgcagaacagcatgaccgccggcaagaccggcaccgtgaagagcgtgcactgccaggccggcgacaccgtgggcgagggcgacctgctggtggagctggagtag

SEQ ID NO: 6071 - protein, 575 aa, Artificial Sequence
  derived and/or modified sequence
MTKEKEFFDVWSVLMGESQPYSGPRTPDGREIVFYKVIDYVLHGKEEIKVIPTPSADHWALASGLPSYVAESGFICNIMNASADEMFKFQEGALDDSGWLIKNVLSMPIVNKKEEIVGVATFYNRKDGKPFDEQDEVLMESLTQFLGWSVMNTDTYDKMNKLENRKDIAQDMVLYHVKCDRDEIQLILPTRARLGKEPADCDEDELGEILKEELPGPTTFDIYEFHFSDLECTELDLVKCGIQMYYELGVVRKFQIPQEVLVRFLFSISKGYRRITYHNWRHGFNVAQTMFTLLMTGKLKSYYTDLEAFAMVTAGLCHDIDHRGTNNLYQMKSQNPLAKLHGSSILERHHLEFGKFLLSEETLNIYQNLNRRQHEHVIHLMDIAIIATDLALYFKKRAMFQKIVDESKNYQDKKSWVEYLSLETTRKEIVMAMMMTACDLSAITKPWEVQSKVALLVAAEFWEQGDLERTVLDQQPIPMMDRNKAAELPKLQVGFIDFVCTFVYKEFSRFHEEILPMFDRLQNNRKEWKALADEYEAKVKALEEKEEEERVAAKKVGTEICNGGPAPKSSTCCIL

SEQ ID NO: 6072 - protein, 180 aa, Artificial Sequence
  derived and/or modified sequence
MRKMLAAVSRVLSGASQKPASRVLVASRNFANDATFEIKKCDLHRLEEGPPVTTVLTREDGLKYYRMMQTVRRMELKADQLYKQKIIRGFCHLCDGQEACCVGLEAGINPTDHLITAYRAHGFTFTRGLSVREILAELTGRKGGCAKGKGGSMHMYAKNFYGGNGIVGAQVVKDEDCVLL

SEQ ID NO: 6073 - protein, 390 aa, Artificial Sequence
  derived and/or modified sequence
MRKMLAAVSRVLSGASQKPASRVLVASRNFANDATFEIKKCDLHRLEEGPPVTTVLTREDGLKYYRMMQTVRRMELKADQLYKQKIIRGFCHLCDGQEACCVGLEAGINPTDHLITAYRAHGFTFTRGLSVREILAELTGRKGGCAKGKGGSMHMYAKNFYGGNGIVGAQVPLGAGIALACKYNGKDEVCLTLYGDGAANQGQIFEAYNMAALWKLPCIFICENNRYGMGTSVERAAASTDYYKRGDFIPGLRVDGMDILCVREATRFAAAYCRSGKGPILMELQTYRYHGHSMSDPGVSYRTREEIQEVRSKSDPIMLLKDRMVNSNLASVEELKEIDVEVRKEIEDAAQFATADPEPPLEELGYHIYSSDPPFEVRGANQWIKFKSVS

SEQ ID NO: 6074 - DNA, 543 bp, Artificial Sequence
  derived and/or modified sequence
atgagaaagatgctagctgctgtctcaagagtgttgagtggcgcaagccagaagccagcctcaagagtgttagtcgcctctcgaaattttgcaaatgatgctacgtttgagataaaaaaatgtgatctgcacaggctcgaggaaggcccacccgtgacaacggtactgacgagggaggacggcctgaagtattatcggatgatgcagacggtcaggaggatggagctaaaggcagatcagctgtataagcagaagattataagaggattctgccacttatgcgacggacaagaggcatgctgcgtggggctcgaggctggaatcaatccaaccgatcatcttataaccgcctaccgtgcacatggctttacatttacaaggggtctcagtgtgagggagattctggccgagctcacggggagaaaagggggatgtgctaagggaaaggggggctctatgcacatgtacgccaaaaatttttacggagggaacggaattgtgggcgcccaggtcgtcaaggacgaagactgcgtgctcctgtag

SEQ ID NO: 6075 - DNA, 1173 bp, Artificial Sequence
  derived and/or modified sequence
atgaggaaaatgttggcggccgtgtcacgggtcctgtcaggagcgtcgcaaaaaccagcctctagggtcctggttgcatcaagaaatttcgctaatgatgcaacattcgaaatcaaaaaatgcgaccttcatcgcctggaagagggccccccggttactacggtactgactcgcgaggatggacttaagtattatcgtatgatgcagacagttcgaagaatggaactgaaagccgaccaattgtataaacagaaaataatcaggggcttctgtcacctttgcgacgggcaggaggcttgctgcgtaggactggaggcagggatcaaccccaccgaccatctgattacagcttacagagctcacgggttcacatttaccagggggctttcagtgcgggagattttggccgagctgactggcagaaagggggggtgtgccaaggggaaaggcgggtcaatgcacatgtacgcaaaaaacttttacggtggcaatgggatcgtgggcgcccaagttcccctcggagccggcatcgccctggcctgtaagtataacggcaaagatgaggtctgcttaacactttacggagatggggctgccaaccaggggcagatctttgaggcatataacatggctgcattgtggaaactcccctgtatctttatttgtgagaataatcgctatgggatggggacgagcgtggagcgggccgcagcttcgactgattactacaaaaggggtgactttatccccggccttcgggtcgacggcatggacatcttgtgtgtgagagaggccacgcgattcgctgccgcctactgccggtcaggcaagggacctatcctgatggagctgcagacctatagatatcacggccacagcatgagtgatccgggagtctcctacagaacccgcgaggagattcaggaagtgcgctcgaagtctgacccaattatgctactcaaagaccgcatggtgaattccaatctggcttccgtagaagagctcaaggagattgatgtcgaggtgcgcaaagagattgaagacgcagcccagtttgccacggccgaccctgagccacccctcgaggagttagggtatcacatctacagttccgatccaccattcgaggttcggggagctaaccagtggattaagttcaaatcagtttcatag

SEQ ID NO: 6076 - DNA, 543 bp, Artificial Sequence
  derived and/or modified sequence
atgaggaagatgctggccgctgtgtcccgggtgctgagcggggccagccagaagccagccagccgggtgctggtggccagcaggaactttgccaatgatgccacctttgagatcaagaagtgtgacctgcaccggctggaggagggcccccctgtgaccaccgtgctgaccagagaagatggcctgaagtactacaggatgatgcagacagtgcggaggatggagctgaaggctgaccagctgtacaagcagaagatcatccggggcttctgccacctgtgtgatggccaggaggcctgctgcgtgggcctggaggccggcatcaaccccacagaccacctgatcacagcctaccgggcccacggcttcaccttcacccggggcctgtctgtgcgggagatcctggccgagctgactggaaggaagggcggctgtgccaagggcaaaggaggctccatgcacatgtatgccaagaacttctatggaggaaatggcatcgtgggcgcccaggtggtgaaggatgaggactgtgtgctgctgtag

SEQ ID NO: 6077 - DNA, 1173 bp, Artificial Sequence
  derived and/or modified sequence
atgaggaagatgctggccgctgtgtcccgggtgctgagcggggccagccagaagccagccagccgggtgctggtggccagcaggaactttgccaatgatgccacctttgagatcaagaagtgtgacctgcaccggctggaggagggcccccctgtgaccaccgtgctgaccagagaagatggcctgaagtactacaggatgatgcagacagtgcggaggatggagctgaaggctgaccagctgtacaagcagaagatcatccggggcttctgccacctgtgtgatggccaggaggcctgctgcgtgggcctggaggccggcatcaaccccacagaccacctgatcacagcctaccgggcccacggcttcaccttcacccggggcctgtctgtgcgggagatcctggccgagctgactggaaggaagggcggctgtgccaagggcaaaggaggctccatgcacatgtatgccaagaacttctatggaggaaatggcatcgtgggcgcccaggtgcccctgggcgccggcatcgccctggcctgcaagtacaacgggaaggatgaggtgtgcctgaccctgtatggagatggagctgccaaccagggccagatctttgaggcctacaacatggccgccctgtggaagctgccctgcatcttcatctgtgagaacaacagatatggcatgggcacctctgtggagagagctgctgccagcacagactactacaagagaggagacttcatccctggcctgcgggtggatggcatggacatcctgtgtgtgcgggaggccaccaggtttgctgctgcctactgccgcagcggcaagggccccatcctgatggagctgcagacctaccgctaccacggccacagcatgtctgaccccggggtgtcctaccgcacccgggaggagatccaggaggtgcgcagcaagagtgaccccatcatgctgctgaaggacaggatggtgaacagcaacctggcctctgtggaggagctgaaggagattgatgtggaggtgaggaaggagattgaagatgctgcccagtttgccacagctgaccctgagccccccctggaggagctgggctaccacatctacagcagtgaccccccatttgaggtgcggggggccaaccagtggatcaagttcaagtctgtgtcctag

SEQ ID NO: 6078 - DNA, 543 bp, Artificial Sequence
  derived and/or modified sequence
atgcggaagatgctggccgccgtgagccgggtgctgagcggcgcctcccagaaacccgcctcgcgagtcttggtggcttcaagaaactttgctaacgatgccacctttgagattaaaaagtgcgacctgcacagactggaggaggggcccccggtgacaacagtgttgacacgagaggatggactcaaatactatcgaatgatgcagacagttcgccgaatggagctcaaggccgaccaattgtacaagcagaaaataataagaggcttctgccacctgtgtgatggccaggaggcgtgctgtgtcggactcgaagccggcatcaatccgactgaccatctgatcacagcatatagagcccatggcttcacatttacaagaggcctgagtgtgcgcgagattctggccgaacttacaggtcgaaaaggcggctgtgccaaaggcaagggcggcagcatgcacatgtacgctaaaaatttctatggtgggaatggcattgtgggggctcaggttgtgaaagatgaggattgcgtgctcctttag

SEQ ID NO: 6079 - DNA, 1173 bp, Artificial Sequence
  derived and/or modified sequence
atgcggaagatgctggccgccgtgagccgggtgctgagcggcgccagccaaaagccagcctctcgcgtcttagtagcttcacggaatttcgccaacgatgccacgtttgagatcaagaaatgcgatttacacaggctggaagaaggcccgccagttactactgttctgaccagagaggacgggctgaagtattacagaatgatgcagacagtccgtcggatggagttaaaggccgatcagctctataagcagaaaattattcggggtttttgccatttgtgcgacggacaagaagcttgctgtgtcggccttgaggctggaatcaaccctaccgaccatctcattacagcctatcgtgcccacgggtttacattcacgcggggcctttctgtgcgggaaatcttggccgagcttacagggaggaaggggggctgcgcaaaaggaaagggcgggagcatgcacatgtatgccaaaaacttttatgggggcaacggtatcgtcggtgctcaggtgccactgggcgcaggcatcgctttggcctgtaagtacaacggtaaagatgaggtctgtctaaccctgtatggagacggagccgcaaaccagggtcagattttcgaagcctataatatggccgctctgtggaaattgccttgcattttcatatgtgaaaacaaccggtacgggatgggaacctccgtcgagcgtgcagctgccagtactgattactacaagagaggagacttcatccccggccttcgtgttgacgggatggacatactgtgtgttcgggaagcaacacgttttgcagctgcgtactgcagatccgggaagggccctatattgatggaactccagacctacagatatcacggacactctatgtcagacccaggtgtctcctacagaacccgcgaggagatccaggaggttcgatcgaagagcgacccaatcatgctgctcaaggacagaatggtgaactccaacctggcaagcgtggaggaactcaaggagatagatgtcgaagtgcgaaaagaaattgaggatgcagctcagttcgcaaccgccgatccagagcctcccttagaggaattgggctatcatatctatagcagcgaccctccttttgaggtgagaggggccaatcagtggatcaagtttaagagcgtttcatag

SEQ ID NO: 6080 - DNA, 543 bp, Artificial Sequence
  derived and/or modified sequence
atgcggaaaatgctcgctgctgtgagcagggtgctctcaggagcgtcccaaaagccagcatcacgggtgctagtagcctctagaaactttgccaacgatgcgaccttcgaaatcaaaaaatgcgatctccatcggttagaagaggggccacccgttactacagtgcttaccagagaggacggcctcaagtactatcggatgatgcagacagtccgcagaatggagctaaaggcagaccaattgtataagcaaaaaatcatccgcggtttctgtcacctctgtgacggacaagaagcatgttgcgttggtctagaggccggtataaacccaacagatcacctgattacagcttatcgggcacatggattcactttcacccggggacttagcgtacgggagatcctcgcagaattaactggacgcaaggggggatgtgccaagggcaaaggaggctctatgcatatgtatgctaaaaacttctacggtgggaacgggatcgtaggcgcacaagtggtcaaggacgaggactgtgtcttattatag

SEQ ID NO: 6081 - DNA, 1173 bp, Artificial Sequence
  derived and/or modified sequence
atgaggaagatgctggcagcggtcagcagagtgctgtcaggtgcttcacaaaaaccagccagtagagtcctcgtggcgtcccggaatttcgcgaacgacgcgacttttgagataaagaaatgtgacctgcatcggctggaggagggtcctcccgtaactaccgtgttgacacgggaggatgggctaaagtactatcgaatgatgcaaacggttcggaggatggaactgaaagccgaccaattgtacaaacaaaagattatcaggggtttctgccacttgtgcgatggccaggaagcgtgctgtgtcggcctggaggctggtattaatccaaccgaccacttgattaccgcctatcgtgcccatggattcactttcacgcgcggacttagcgtgagagaaatcctggccgagctcactgggagaaaggggggatgcgccaagggcaagggtgggagcatgcacatgtatgcaaagaacttttacggtggaaacggcatcgtgggggctcaggttcctctgggcgcaggcattgctctggcgtgcaaatataacgggaaggacgaggtgtgcctgaccctctatggcgacggcgcagccaatcagggccaaatatttgaggcctacaacatggctgcactgtggaagttgccctgtatcttcatctgcgaaaacaatcgctatggcatgggcactagtgtggaaagagctgccgctagcacggactattacaagcgcggagacttcattcctggactgcgcgtagatgggatggacatcctgtgcgtgcgcgaggctacacggtttgctgccgcttactgtaggagtggcaaaggtcctattctgatggagcttcaaacatataggtaccacgggcattcaatgtccgatccgggtgtgtcttatagaactcgcgaggagatccaggaggtgaggagcaaatctgatcctattatgttactcaaagacaggatggtgaattctaatttggcgagcgtagaggaactcaaagaaatcgatgtcgaggttcgcaaggagatagaggacgccgctcagttcgccaccgcagatccagagccgcctctagaggagctcgggtaccacatttattctagtgacccccctttcgaggtgcgcggagccaatcagtggattaagtttaaaagcgtttcctag

SEQ ID NO: 6082 - DNA, 734 bp, Artificial Sequence
  derived and/or modified sequence
gacttgggggcacccgcgtcgtgcctcctgggttgtgaggagtcgccgctgccgccactgcctgtgcttcatgaggaagatgctcgccgccgtctcccgcgtgctgtctggcgcttctcagaagccggcaagcagagtgctggtagcatcccgtaattttgcaaatgatgctacatttgaaattaagaaatgtgaccttcaccggctggaagaaggccctcctgtcacaacagtgctcaccagggaggatgggctcaaatactacaggatgatgcagactgtacgccgaatggagttgaaagcagatcagctgtataaacagaaaattattcgtggtttctgtcacttgtgtgatggtcaggaagcttgctgtgtgggcctggaggccggcatcaaccccacagaccatctcatcacagcctaccgggctcacggctttactttcacccggggcctttccgtccgagaaattctcgcagagcttacaggacgaaaaggaggttgtgctaaagggaaaggaggatcgatgcacatgtatgccaagaacttctacgggggcaatggcatcgtgggagcgcaggtagtcaaggacgaggattgtgtgctgctttagatttggccctggactttgtcttcaaaaactttcacagccccagacaacttttcctgaagtagtacagccatgtgctgcacagtgacgctttggtcaatgtcgcatatatgatgttggaccc

SEQ ID NO: 6083 - DNA, 3310 bp, Artificial Sequence
  derived and/or modified sequence
actgaggcgtggcgtctgctggggcacctgaaggagacttgggggcacccgcgtcgtgcctcctgggttgtgaggagtcgccgctgccgccactgcctgtgcttcatgaggaagatgctcgccgccgtctcccgcgtgctgtctggcgcttctcagaagccggcaagcagagtgctggtagcatcccgtaattttgcaaatgatgctacatttgaaattaagaaatgtgaccttcaccggctggaagaaggccctcctgtcacaacagtgctcaccagggaggatgggctcaaatactacaggatgatgcagactgtacgccgaatggagttgaaagcagatcagctgtataaacagaaaattattcgtggtttctgtcacttgtgtgatggtcaggaagcttgctgtgtgggcctggaggccggcatcaaccccacagaccatctcatcacagcctaccgggctcacggctttactttcacccggggcctttccgtccgagaaattctcgcagagcttacaggacgaaaaggaggttgtgctaaagggaaaggaggatcgatgcacatgtatgccaagaacttctacgggggcaatggcatcgtgggagcgcaggtgcccctgggcgctgggattgctctagcctgtaagtataatggaaaagatgaggtctgcctgactttatatggcgatggtgctgctaaccagggccagatattcgaagcttacaacatggcagctttgtggaaattaccttgtattttcatctgtgagaataatcgctatggaatgggaacgtctgttgagagagcggcagccagcactgattactacaagagaggcgatttcattcctgggctgagagtggatggaatggatatcctgtgcgtccgagaggcaacaaggtttgctgctgcctattgtagatctgggaaggggcccatcctgatggagctgcagacttaccgttaccacggacacagtatgagtgaccctggagtcagttaccgtacacgagaagaaattcaggaagtaagaagtaagagtgaccctattatgcttctcaaggacaggatggtgaacagcaatcttgccagtgtggaagaactaaaggaaattgatgtggaagtgaggaaggagattgaggatgctgcccagtttgccacggccgatcctgagccacctttggaagagctgggctaccacatctactccagcgacccaccttttgaagttcgtggtgccaatcagtggatcaagtttaagtcagtcagttaaggggaggagaaggagaggttataccttcagggggctaccagacagtgttctcaacttggttaaggaggaagaaaacccagtcaatgaaattcaatgaaattcttggaaacttccattaagtgtgtagattgagcaggtagtaattgcatgcagtttgtacattagtgcattaaaagatgaattattgagtgcttaaagattatttttgacttaaaatagtatactttgaacaaatactctaattatgaaaaggaagaacaattccttgtatgcctgtttcccctgcccccagccacctttttgggaggagaccattatggcggggcccctcacagcattctaccaaccatagcacccaccccgagcagcgctggtgctgcagcctgttcgcgctgaccatttctctacaagatacaatatttattatcaggcaagaggacagttccattttaaaataagacttttgtaatcattccaattttgtaatcatttcaaaggccacataacttagttttctctacttacacattcagtataaatatgaagctattttctgttcatatcaaacattaactacaaggcacattcgtatcagttttgtgtttctcaaattgaagtaccataccagttctgaggcagtgtcccagcttccatgtttgttaaataccccttgtttgtttcaccattccagcaagtgctgaagggtgtactttttttgagacagggtcgggctctgttgcccaggctggagtgcagtggtgtgatcatggctcactgcagcctccacacctcctgggctcaagcaatcctcccacctcagcctcctgcatagctgggactacaagtgaatttcctaatattccgggaggtcaaaaccaaggctcactgttttcacaatacacacagttctatgtttataaataacaggtttcaaaagaaactcaggacagtatttaaaacaagttcttaaactattaattgaacaatggcatttttaaatatgtaaacacagcggaattcgtgtatacactaacagaagctttaacaaaacatgtagcgtggtgggacactctgccacagcttagctgattggtatcaagccttgtctttggtttctgaggcctcctgagcccttctgtactgggagaccgcactccagagtctgcagaggagaccacccctgggaaacaaacacagctgtcttcagagtcagtgcttcaagccaacagagcttaaaactgcagtccctaatttaaaaacctaatgaaaataaaaacattctcctcacatatggaggtgacgctcgtgtcccagcagtagtaggacatggccttagaggtacgtacctgcagagagctggctatttcaaatgactcgggaacaagaaggcaggctgcagtttaaagaagggggtgggtccagcgtgcaggcacgcttgccatgtgcctccacccactcccagccaggcattaatggcaggagattggccagctcttctctgtcacattcctatttctgacttctgcctggctttcagtttctgccccaccttggctttttcccagcttgaacctaatagaactccagagtttggggggaggcccagccctttgttttctgctcttgaagcatattcacacataaaaagttgtattctcttatacaaactgttttgaggctcttaccgtagtcgaaggtatcttagatcttccttagtgatctcattaagaatatccgaaagtgtataaccctcttcaacaatctgaaacaaagatcagatccttaagagctgagcagctgtgtaacaacagcataagaatttctttgttgtaaatttaccttttcaattgtctttgcatcagctccttgcagccgcaaccagtctataagctctttatctgttctctgcccgtaggggcctgctgggttctctgtaatacctgtaacgattggcaatttgttatatattagtctaaccataaaactcttcaaaagtaaccagttggattaataaatgattccagaatgtaaa

SEQ ID NO: 6084 - DNA, 543 bp, Artificial Sequence
  derived and/or modified sequence
atgagaaagatgctggccgccgtgagcagagtgctgagcggcgccagccagaagcccgccagcagagtgctggtggccagcagaaacttcgccaacgacgccaccttcgagatcaagaagtgcgacctgcacagactggaggagggcccccccgtgaccaccgtgctgaccagagaggacggcctgaagtactacagaatgatgcagaccgtgagaagaatggagctgaaggccgaccagctgtacaagcagaagatcatcagaggcttctgccacctgtgcgacggccaggaggcctgctgcgtgggcctggaggccggcatcaaccccaccgaccacctgatcaccgcctacagagcccacggcttcaccttcaccagaggcctgagcgtgagagagatcctggccgagctgaccggcagaaagggcggctgcgccaagggcaagggcggcagcatgcacatgtacgccaagaacttctacggcggcaacggcatcgtgggcgcccaggtggtgaaggacgaggactgcgtgctgctgtag

SEQ ID NO: 6085 - DNA, 1173 bp, Artificial Sequence
  derived and/or modified sequence
atgagaaagatgctggccgccgtgagcagagtgctgagcggcgccagccagaagcccgccagcagagtgctggtggccagcagaaacttcgccaacgacgccaccttcgagatcaagaagtgcgacctgcacagactggaggagggcccccccgtgaccaccgtgctgaccagagaggacggcctgaagtactacagaatgatgcagaccgtgagaagaatggagctgaaggccgaccagctgtacaagcagaagatcatcagaggcttctgccacctgtgcgacggccaggaggcctgctgcgtgggcctggaggccggcatcaaccccaccgaccacctgatcaccgcctacagagcccacggcttcaccttcaccagaggcctgagcgtgagagagatcctggccgagctgaccggcagaaagggcggctgcgccaagggcaagggcggcagcatgcacatgtacgccaagaacttctacggcggcaacggcatcgtgggcgcccaggtgcccctgggcgccggcatcgccctggcctgcaagtacaacggcaaggacgaggtgtgcctgaccctgtacggcgacggcgccgccaaccagggccagatcttcgaggcctacaacatggccgccctgtggaagctgccctgcatcttcatctgcgagaacaacagatacggcatgggcaccagcgtggagagagccgccgccagcaccgactactacaagagaggcgacttcatccccggcctgagagtggacggcatggacatcctgtgcgtgagagaggccaccagattcgccgccgcctactgcagaagcggcaagggccccatcctgatggagctgcagacctacagataccacggccacagcatgagcgaccccggcgtgagctacagaaccagagaggagatccaggaggtgagaagcaagagcgaccccatcatgctgctgaaggacagaatggtgaacagcaacctggccagcgtggaggagctgaaggagatcgacgtggaggtgagaaaggagatcgaggacgccgcccagttcgccaccgccgaccccgagccccccctggaggagctgggctaccacatctacagcagcgacccccccttcgaggtgagaggcgccaaccagtggatcaagttcaagagcgtgagctag

SEQ ID NO: 6086 - protein, 493 aa, Artificial Sequence
  derived and/or modified sequence
MAAATGPSFWLGNETLKVPLALFALNRQRLCERLRKNPAVQAGSIVVLQGGEETQRYCTDTGVLFRQESFFHWAFGVTEPGCYGVIDVDTGKSTLFVPRLPASHATWMGKIHSKEHFKEKYAVDDVQYVDEIASVLTSQKPSVLLTLRGVNTDSGSVCREASFDGISKFEVNNTILHPEIVECRVFKTDMELEVLRYTNKISSEAHREVMKAVKVGMKEYELESLFEHYCYSRGGMRHSSYTCICGSGENSAVLHYGHAGAPNDRTIQNGDMCLFDMGGEYYCFASDITCSFPANGKFTADQKAVYEAVLRSSRAVMGAMKPGVWWPDMHRLADRIHLEELAHMGILSGSVDAMVQAHLGAVFMPHGLGHFLGIDVHDVGGYPEGVERIDEPGLRSLRTARHLQPGMVLTVEPGIYFIDHLLDEALADPARASFLNREVLQRFRGFGGVRIEEDVVVTDSGIELLTCVPRTVEEIEACMAGCDKAFTPFSGPK

SEQ ID NO: 6087 - DNA, 1482 bp, Artificial Sequence
  derived and/or modified sequence
atggccgctgcaactggcccgagcttttggctgggcaatgagacgcttaaggtacccctcgcactcttcgctctcaacaggcagcgcttatgtgagaggctgcgaaaaaaccctgctgttcaggcagggagcatagtagtccttcagggcggagaggagactcagcgatattgtactgatacgggcgtgcttttccgccaagagagcttctttcattgggcctttggtgtaacagagcctgggtgctatggcgttattgatgtggatactgggaagtccactctgttcgttccgaggcttcctgcatctcacgccacatggatgggcaagattcacagtaaggagcatttcaaagagaagtacgctgttgacgatgtgcagtacgttgacgaaatagccagcgtgttaacatctcagaagccctcggttctgcttacgctgcgcggagtgaacacagacagcgggagcgtgtgcagggaggcctctttcgatggtatttcaaagttcgaggtgaataatacaattctccatccagaaatagtagagtgcagggtcttcaagacagacatggagttggaggtcctacgatatactaacaaaatatctagtgaagcgcaccgggaggttatgaaggctgtgaaggtgggcatgaaagagtatgagctcgaaagcctcttcgaacattattgctactctcgaggcggcatgagacactcatcatacacatgcatctgcggctccggggagaatagcgccgtgctacattacggtcacgccggcgccccaaatgaccgcacgatacagaatggcgatatgtgtttgtttgatatgggtggcgagtactactgcttcgccagcgacatcacctgttctttcccagccaacgggaagtttacagccgaccagaaagctgtgtatgaggccgtgttacgctcctcacgcgcagtgatgggcgcaatgaagcccggggtgtggtggcccgacatgcacagacttgctgaccggattcacttagaggagctggcccacatggggattctctccggaagcgtggacgctatggtgcaggcacatctcggggctgtgtttatgccccacggcctgggacacttcctgggcatcgatgtgcatgacgtaggaggttaccctgagggggtggagaggatcgatgaacctggcttgagaagcctgcgaacggctcggcatcttcagccaggcatggttttgacagtcgagccgggcatatattttatcgatcacctcctggacgaagcgcttgctgaccccgccagagcatcatttcttaatcgcgaggtgctgcagagatttaggggcttcggaggtgtgagaatagaagaagacgtcgttgtgacagattccggcattgagttactaacatgtgtgcccagaaccgtcgaggagatcgaagcgtgcatggccggttgtgacaaggcattcactccgttttccggaccaaagtag

SEQ ID NO: 6088 - DNA, 1482 bp, Artificial Sequence
  derived and/or modified sequence
atggctgctgccaccggccccagcttctggctgggcaatgagaccctgaaggtgcccctggccctgtttgccctgaaccggcagaggctgtgtgagcggctgaggaagaacccagctgtgcaggccggcagcatcgtggtgctgcagggcggggaggagacccagcgctactgcacagacacaggagtgctcttccggcaggagagcttcttccactgggcctttggagtgacagagcccggctgctatggagtgattgatgtggacaccgggaagagcaccctgtttgtgccccggctgcctgccagccacgccacctggatgggcaagatccacagcaaggagcacttcaaggagaagtatgctgtggatgatgtgcagtatgtggatgagatcgcctctgtgctgaccagccagaagcccagcgtgctgctgaccctgcggggcgtgaacacagacagcggctctgtgtgccgggaggccagctttgatggcatcagcaagtttgaggtgaacaacaccatcctgcaccctgagatcgtggagtgcagggtcttcaagacagacatggagctggaggtgctgcgctacaccaacaagatcagcagcgaggcccaccgggaggtgatgaaggctgtgaaggtgggcatgaaggagtatgagctggagagcctgtttgagcactactgctacagccggggcggcatgaggcacagcagctacacctgcatctgtggcagcggagaaaattctgctgtgctgcactacggccatgctggggccccaaatgacaggaccatccagaatggagacatgtgcctgtttgacatgggcggggagtactactgctttgccagtgacatcacctgcagcttccctgccaacgggaagttcaccgctgaccagaaggctgtgtatgaggccgtgctgcggagcagcagagctgtgatgggcgccatgaagccaggagtgtggtggccagacatgcaccggctggccgaccgcatccacctggaggagctggcccacatgggcatcctgagcggctctgtggatgccatggtgcaggcccacctgggcgctgtgttcatgccccacggcctgggccacttcctgggcattgatgtgcatgatgtgggcggctacccagagggcgtggagagaattgatgagcccggcctgcggagcctgaggacagcccggcacctgcagcccggcatggtgctgactgtggagcccggcatctacttcatcgaccacctgctggatgaggccctggccgaccctgcccgggccagcttcctgaaccgggaggtgctgcagcgcttccggggctttggaggagtgagaattgaagaagatgtggtggtgacagacagcggcatcgagctgctgacctgtgtgcccaggacagtggaggagattgaggcctgcatggccggctgtgacaaggccttcacccccttcagcggccccaagtag

SEQ ID NO: 6089 - DNA, 1482 bp, Artificial Sequence
  derived and/or modified sequence
atggccgccgccaccggccccagcttctggctgggcaacgagaccctgaaggtcccgctggccctcttcgcattgaatcggcagcggctgtgtgagcgactgaggaaaaatcctgctgtgcaggccgggtcgatcgttgttctgcagggtggtgaggagactcagcgctactgtaccgataccggggttcttttcagacaggagtccttttttcactgggccttcggcgtgaccgagccaggctgctacggcgtcattgatgtggatactggaaaaagcacgttatttgttccaaggctgcccgccagccacgctacatggatggggaagatccactccaaggaacacttcaaggaaaagtatgctgtggatgacgtccaatacgtcgacgaaatcgccagcgttcttacgagccagaaacctagcgtgctgcttactctgcgcggagtcaatacggattcgggatccgtgtgtcgagaggcctcattcgatgggatttcaaaattcgaggtgaataataccatcttacatcctgagatcgtcgagtgcagagtcttcaagactgatatggaattggaagtgctgcggtacaccaacaagatatcaagtgaagcccatcgtgaggtgatgaaggcagttaaggtcggtatgaaagagtacgaactagagtccctgttcgaacactactgctattccaggggtggcatgagacactcgtcttacacctgcatctgcggaagtggggaaaatagcgcagtcctgcactacggacacgctggcgctcccaacgaccggaccatccaaaatggcgatatgtgcctattcgatatgggaggtgaatattactgttttgcaagtgacattacatgttctttcccggccaacgggaagtttaccgctgaccagaaagctgtgtacgaggcggtcctgcgttcctcccgggctgtcatgggcgcgatgaagccaggagtttggtggccagacatgcatcgtctggcagaccggatccacctagaggagctggcccacatgggtatactgagcggctcagtggacgccatggtccaggctcatctgggggcagtgttcatgccccacggcttgggccatttcctggggatcgacgttcacgacgttgggggctatcccgaaggggtcgagcgaattgacgagcccggactcaggtctctgcggacagcccggcacctacagccaggcatggtgctgactgtggaaccggggatatacttcatcgatcacctcttggatgaagccctggccgaccccgcgagagcttcctttctcaatcgtgaagtgttgcagagattccgcgggttcggcggagtgcggattgaagaggatgtcgtcgtcaccgattccggaattgagctgttgacttgtgtgcctcgcaccgtggaagagatagaggcttgtatggctggatgcgacaaggcttttacccctttttctggaccaaagtag

SEQ ID NO: 6090 - DNA, 2010 bp, Artificial Sequence
  derived and/or modified sequence
atttggctctggaggaggtgggtcaaggactccatgccccgccccctgccccgcccttaccccgccccatgcattggcacccggaggggctcagctgacgccgcacttcacgtgacgccggtgccgggcgaacatggcggcggccaccggaccctcgttttggctggggaatgaaaccctgaaggtgccgctggcgctctttgccttgaaccggcagcgcctgtgtgagcggctgcggaagaaccctgctgtgcaggccggctccatcgtggtcctgcagggcggggaggagactcagcgctactgcaccgacaccggggtcctcttccgccaggagtccttctttcactgggcgttcggtgtcactgagccaggctgctatggtgtcatcgatgttgacactgggaagtcgaccctgtttgtgcccaggcttcctgccagccatgccacctggatgggaaagatccattccaaggagcacttcaaggagaagtatgccgtggacgacgtccagtacgtagatgagattgccagcgtcctgacgtcacagaagccctctgtcctcctcactttgcgtggcgtcaacacggacagcggcagtgtctgcagggaggcctcctttgacggcatcagcaagttcgaagtcaacaataccattcttcacccagagatcgttgagtgccgagtgtttaagacggatatggagctggaggttctgcgctataccaataaaatctccagcgaggcccaccgtgaggtaatgaaggctgtaaaagtgggaatgaaagaatatgagttggaaagcctcttcgagcactactgctactcccggggcggcatgcgccacagctcctacacctgcatctgcggcagtggtgagaactcagccgtgctacactacggacacgccggagctcccaacgaccgaacgatccagaatggggatatgtgcctgttcgacatgggcggtgagtattactgcttcgcttccgacatcacctgctcctttcccgccaacggcaagttcactgcagaccagaaggccgtctatgaggcagtgctgcggagctcccgtgccgtcatgggtgccatgaagccaggtgtctggtggcctgacatgcaccgcctggctgaccgcatccacctggaggagctggcccacatgggcatcctgagcggcagcgtggacgccatggtccaggctcacctgggggccgtgtttatgcctcacgggcttggccacttcctgggcattgacgtgcacgacgtgggaggctacccagagggcgtggagcgcatcgacgagcccggcctgcggagcctgcgcactgcacggcacctgcagccaggcatggtgctcaccgtggagccgggcatctacttcatcgaccacctcctggatgaggccctggcggacccggcccgcgcctccttccttaaccgcgaggtcctgcagcgctttcgcggttttggcggggtccgcatcgaggaggacgtcgtggtgactgacagcggcatagagctgctgacctgcgtgccccgcactgtggaagagattgaagcatgcatggcaggctgtgacaaggcctttacccccttctctggccccaagtagagccagccagaaatcccagcgcacctgggggcctggccttgcaacctcttttcgtgatgggcagcctgctggtcagcactccagtagcgagagacggcacccagaatcagatcccagcttcggcatttgatcagaccaaacagtgctgtttcccggggaggaaacacttttttaattacccttttgcaggctcccacctttaatctgttttataccttgcttattaaatgagcgacttaaaatgattgaaaataatgctgttctttagtagcaactaaaatgtgtcttgctgtcatttatattccttttcccaggaaagaagcatttctgatactttctgtcaaaaatcaatatgcagaatggcatttgcaataaaaggtttcctaaaatggtcc

SEQ ID NO: 6091 - DNA, 1482 bp, Artificial Sequence
  derived and/or modified sequence
atggccgctgcaaccgggccatctttttggctcgggaatgagacactgaaggtgccgctcgctttgttcgctcttaaccggcagagactgtgtgagaggctgcgtaaaaaccctgccgtacaggccggttctattgtcgtcctgcagggcggtgaagagacgcaacggtactgtacggatacaggggtactgtttcgacaggagtcctttttccactgggcctttggtgtgacagagcccggatgttacggagtgatagatgttgacaccggtaaaagtacactgttcgtgccgagactacctgctagccacgccacctggatgggaaagatccactctaaagagcatttcaaagagaagtacgctgtggatgatgttcagtatgtggatgaaatcgctagcgtgctgacgtcgcaaaaaccatccgtgctgctaaccctacggggagtaaataccgactccggatcagtctgcagagaagcctcctttgacgggatcagtaagtttgaggtcaataatacaattctgcatcctgaaattgtggagtgtcgcgttttcaagactgatatggaattggaggtattgcgttataccaacaaaatctccagcgaggcacaccgcgaggtcatgaaagccgtcaaagtgggcatgaaagagtacgagctggagtccctatttgaacactactgttacagccgaggcggaatgaggcatagctcttatacttgcatatgcggctccggagaaaattctgccgtactccactacggacacgctggcgcacctaacgataggactatccagaacggggatatgtgcctgtttgatatgggcggtgaatattactgcttcgcttccgatatcacttgttcatttcctgccaacgggaagttcaccgccgaccagaaagccgtgtatgaggccgtgctgagatccagcagggctgtgatgggggctatgaagcccggagtgtggtggcctgatatgcaccggctcgcagaccgcattcacctggaggagcttgcccacatgggcattctctccggcagcgtcgacgccatggtgcaggcacatctcggcgctgtgttcatgccccatggccttggacactttttaggtatcgatgtgcacgatgtgggtgggtaccctgagggcgtggaacgaatcgacgaaccgggactgagaagtttgagaacggcaagacatcttcagcctgggatggtgttgaccgtcgagccgggtatttactttatcgatcacctgctcgatgaggccctggctgatcccgcacgggcttcgttcttgaacagggaggtcctacagagattcagaggttttggcggtgttaggatcgaagaagacgtcgttgtaaccgattccggcatcgagctccttacatgtgtgcccagaactgtcgaagagatcgaagcttgtatggctggctgcgacaaggcctttactcccttttccggtcctaaatag

SEQ ID NO: 6092 - DNA, 1482 bp, Artificial Sequence
  derived and/or modified sequence
atggccgccgccaccggccccagcttctggctgggcaacgagaccctgaaggtgcccctggccctgttcgccctgaacagacagagactgtgcgagagactgagaaagaaccccgccgtgcaggccggcagcatcgtggtgctgcagggcggcgaggagacccagagatactgcaccgacaccggcgtgctgttcagacaggagagcttcttccactgggccttcggcgtgaccgagcccggctgctacggcgtgatcgacgtggacaccggcaagagcaccctgttcgtgcccagactgcccgccagccacgccacctggatgggcaagatccacagcaaggagcacttcaaggagaagtacgccgtggacgacgtgcagtacgtggacgagatcgccagcgtgctgaccagccagaagcccagcgtgctgctgaccctgagaggcgtgaacaccgacagcggcagcgtgtgcagagaggccagcttcgacggcatcagcaagttcgaggtgaacaacaccatcctgcaccccgagatcgtggagtgcagagtgttcaagaccgacatggagctggaggtgctgagatacaccaacaagatcagcagcgaggcccacagagaggtgatgaaggccgtgaaggtgggcatgaaggagtacgagctggagagcctgttcgagcactactgctacagcagaggcggcatgagacacagcagctacacctgcatctgcggcagcggcgagaacagcgccgtgctgcactacggccacgccggcgcccccaacgacagaaccatccagaacggcgacatgtgcctgttcgacatgggcggcgagtactactgcttcgccagcgacatcacctgcagcttccccgccaacggcaagttcaccgccgaccagaaggccgtgtacgaggccgtgctgagaagcagcagagccgtgatgggcgccatgaagcccggcgtgtggtggcccgacatgcacagactggccgacagaatccacctggaggagctggcccacatgggcatcctgagcggcagcgtggacgccatggtgcaggcccacctgggcgccgtgttcatgccccacggcctgggccacttcctgggcatcgacgtgcacgacgtgggcggctaccccgagggcgtggagagaatcgacgagcccggcctgagaagcctgagaaccgccagacacctgcagcccggcatggtgctgaccgtggagcccggcatctacttcatcgaccacctgctggacgaggccctggccgaccccgccagagccagcttcctgaacagagaggtgctgcagagattcagaggcttcggcggcgtgagaatcgaggaggacgtggtggtgaccgacagcggcatcgagctgctgacctgcgtgcccagaaccgtggaggagatcgaggcctgcatggccggctgcgacaaggccttcacccccttcagcggccccaagtag

SEQ ID NO: 6093 - protein, 359 aa, Artificial Sequence
  derived and/or modified sequence
MAEHGAHFTAASVADDQPSIFEVVAQDSLMTAVRPALQHVVKVLAESNPTHYGFLWRWFDEIFTLLDLLLQQHYLSRTSASFSENFYGLKRIVMGDTHKSQRLASAGLPKQQLWKSIMFLVLLPYLKVKLEKLVSSLREEDEYSIHPPSSRWKRFYRAFLAAYPFVNMAWEGWFLVQQLRYILGKAQHHSPLLRLAGVQLGRLTVQDIQALEHKPAKASMMQQPARSVSEKINSALKKAVGGVALSLSTGLSVGVFFLQFLDWWYSSENQETIKSLTALPTPPPPVHLDYNSDSPLLPKMKTVCPLCRKTRVNDTVLATSGYVFCYRCVFHYVRSHQACPITGYPTEVQHLIKLYSPEN

SEQ ID NO: 6094 - protein, 324 aa, Artificial Sequence
  derived and/or modified sequence
MAEHGAHFTAASVADDQPSIFEVVAQDSLMTAVRPALQHVVKVLAESNPTHYGFLWRWFDEIFTLLDLLLQQHYLSRTSASFSENFYGLKRIVMGDTHKSQRLASAGLPKQQLWKSIMFLVLLPYLKVKLEKLVSSLREEDEYSIHPPSSRWKRFYRAFLAAYPFVNMAWEGWFLVQQLRYILGKAQHHSPLLRLAGVQLGRLTVQDIQALEHKPAKASMMQQPARSVSEKINSALKKAVGGVALSLSTGLSVGVFFLQFLDWWYSSENQETIKSLTALPTPPPPVHLDYNSDSPLLPKMKTVCPKKKKKKERKKKKERKKERR

SEQ ID NO: 6095 - DNA, 975 bp, Artificial Sequence
  derived and/or modified sequence
atggccgagcacggcgcccacttcaccgccgccagcgtggccgacgaccagcccagcatcttcgaggtggtggcccaggacagcctgatgaccgccgtgagacccgccctgcagcacgtggtgaaggtgctggccgagagcaaccccacccactacggcttcctgtggagatggttcgacgagatcttcaccctgctggacctgctgctgcagcagcactacctgagcagaaccagcgccagcttcagcgagaacttctacggcctgaagagaatcgtgatgggcgacacccacaagagccagagactggccagcgccggcctgcccaagcagcagctgtggaagagcatcatgttcctggtgctgctgccctacctgaaggtgaagctggagaagctggtgagcagcctgagagaggaggacgagtacagcatccacccccccagcagcagatggaagagattctacagagccttcctggccgcctaccccttcgtgaacatggcctgggagggctggttcctggtgcagcagctgagatacatcctgggcaaggcccagcaccacagccccctgctgagactggccggcgtgcagctgggcagactgaccgtgcaggacatccaggccctggagcacaagcccgccaaggccagcatgatgcagcagcccgccagaagcgtgagcgagaagatcaacagcgccctgaagaaggccgtgggcggcgtggccctgagcctgagcaccggcctgagcgtgggcgtgttcttcctgcagttcctggactggtggtacagcagcgagaaccaggagaccatcaagagcctgaccgccctgcccaccccccccccccccgtgcacctggactacaacagcgacagccccctgctgcccaagatgaagaccgtgtgccccaagaagaagaagaagaaggagagaaagaagaagaaggagagaaagaaggagagaagatag

SEQ ID NO: 6096 - DNA, 975 bp, Artificial Sequence
  derived and/or modified sequence
atggctgaacatggagcacatttcaccgcagccagtgtggctgatgaccagcccagcattttcgaggtcgttgctcaggattcgctgatgaccgcagtgcggccagcccttcagcatgttgtgaaggttctggctgagtctaacccaacccattacggctttctgtggcgatggtttgacgagatcttcactctcttagacctgctgctccagcagcactacctgagtagaacatccgcatcattctcagagaacttttacgggttgaaaagaattgtcatgggtgacacacacaagagtcagcgactggcttctgcaggcttaccaaagcaacaactgtggaagagcatcatgtttctggtcctgctgccatacctgaaggtaaagctggaaaaactagtgtcgtcactgagggaagaagacgagtactccatacaccccccctcttcccgctggaagcggttttatagagccttcctagctgcgtatccatttgtgaacatggcgtgggagggttggttcctggtgcaacaactgagatatattctgggcaaagcacaacatcactcccccctccttcggcttgctggcgtgcagctagggcgcctcacggttcaagatatccaagcccttgaacataagcccgccaaggcaagcatgatgcagcagccggcccgctctgtaagtgagaagataaattctgccttgaagaaggctgtgggaggggtcgctctatcattgtctacggggctgagtgttggcgttttttttctgcaattcctggactggtggtactcctcagagaatcaggagaccattaagagcctgacggcacttcctactccgcctcccccagtccatctagactacaatagcgactcccccttgctcccaaagatgaaaacagtgtgccctaagaaaaagaaaaaaaaggagagaaaaaagaaaaaggagaggaagaaagaacggcgctag

SEQ ID NO: 6097 - DNA, 975 bp, Artificial Sequence
  derived and/or modified sequence
atggccgagcacggggcccacttcaccgctgcctctgtggctgatgaccagcccagcatctttgaggtggtggcccaggacagcctgatgacagctgtgcggcctgccctgcagcacgtggtgaaggtgctggccgagagcaaccccacccactacggcttcctgtggcgctggtttgatgagatcttcaccctgctggacctgctgctgcagcagcactacctgagcaggaccagcgccagcttcagcgagaacttctacggcctgaagagaattgtgatgggagacacccacaagagccagaggctggccagcgctggcctgcccaagcagcagctgtggaagagcatcatgttcctggtgctgctgccctacctgaaggtgaagctggagaagctggtgagcagcctgcgggaggaggatgagtacagcatccacccccccagcagccgctggaagcgcttctaccgggccttcctggccgcctacccctttgtgaacatggcctgggagggctggttcctggtgcagcagctgcgctacatcctgggcaaggcccagcaccacagccccctgctgcggctggccggcgtgcagctgggccgcctgactgtgcaggacatccaggccctggagcacaagccagccaaggcctccatgatgcagcagcctgcccggtctgtgtctgagaagatcaacagcgccctgaagaaggctgtgggcggcgtggccctgagcctgagcacaggcctgtctgtgggcgtcttcttcctgcagttcctggactggtggtacagcagcgagaaccaggagaccatcaagagcctgacagccctgcccaccccacctcctcctgtgcacctggactacaacagcgacagccccctgctgcccaagatgaagacagtgtgccccaagaagaagaagaagaaggagaggaagaagaagaaggagaggaagaaggagaggaggtag

SEQ ID NO: 6098 - DNA, 975 bp, Artificial Sequence
  derived and/or modified sequence
atggccgagcacggcgcccacttcaccgccgccagcgtggccgacgatcagccttccatttttgaagtggtggctcaggactccctgatgacggcagtccgcccagctctccaacatgtagtgaaggtactagctgagtcaaacccaacacattatggctttctatggcgctggttcgacgaaatctttaccctcctggatctattgttacagcagcactatctctcacggacgagcgcctccttctccgagaatttctatggtctgaaacgaattgtcatgggcgatactcataagtcccagcgcctggcctctgccgggctacccaaacaacagctgtggaagagcatcatgtttctggtgcttctgccttacttaaaggttaagttagagaagctcgtgtccagtctcagagaagaagatgaatacagcatacacccaccatcatccagatggaagagattctatcgagcctttctcgcagcctatcccttcgtcaacatggcctgggagggatggttcttggtgcaacagttacggtacattctgggcaaagctcagcaccactccccattacttcgactggctggtgtgcagctgggacgattgacagtccaggacatccaggcactggagcataagcctgcaaaggcttccatgatgcagcagcctgccaggtccgtcagtgaaaaaattaactcagctctgaagaaagctgttggcggagtcgctctgtctctgtccaccggtctgagcgtgggtgtgtttttcctgcagttcctcgattggtggtacagcagtgaaaatcaggagactataaagagtctcactgcgttgccaaccccccctccacccgtacatttggattataacagtgatagcccattgctcccaaagatgaagaccgtgtgtcccaagaaaaaaaaaaaaaaggagaggaagaagaaaaaggaacgaaagaaggaaaggcggtag

SEQ ID NO: 6099 - DNA, 2601 bp, Artificial Sequence
  derived and/or modified sequence
ctcccttcaaacgtggcgtcgtgggttgtttgcgcctcgcctggggtcagcgagcaaggacgggcgcgggcggggatactcaaagccaacagctggagtcagcccttgtgtcccgggctcacagtggcacgactgaatcctcagagtcggctggcttttgagctctcacgattggggaggagggggcgtttctggttcgcagctccagaggattgcgttccttcccccatacctgtcccccacagtcacgctctgccctgacgtgcagcatttgacaagttaccccctcgccacatactacttccacccacgtccgagttaactttgttcttaaccttcttgagactaccctcggcctccaggtctttttttcccagttcatttttgcccataagattgagtttcgagtttcagatatcatgcagaaagtttacctttaagactgagcacccatctgatactcttcctcccgaaaaagttcatgctcacgagagagtttgtgggaaaagtgaaagccagtacacgcaggaaactatggctgagcacggggctcacttcacagctgcttctgtggccgatgaccagccatccatctttgaggtggtagcacaggacagtttaatgacagcagtgagacccgctcttcagcatgtggtcaaggttcttgcagaatcaaatcccacccactatggcttcttgtggaggtggtttgatgaaatctttactctgctagatcttctgctccagcaacattatctgtctagaaccagtgcctcattttctgaaaacttttacggcttaaagagaattgtaatgggggacactcacaagtctcagagattggctagtgctggtctcccaaagcagcagctttggaaatctattatgttcctggttcttcttccctatctgaaagtgaagctggagaagctggtttctagcctgagagaagaggatgaatattctattcatcccccttcttcccgctggaaacgattttacagagctttcctggcagcctacccatttgtgaacatggcctgggaaggatggtttcttgtacaacaacttcgatacatcctaggaaaagctcagcatcactcaccactgctgaggctggctggagttcagctaggtcgactgacagttcaggatatacaagctctggagcacaaaccagctaaggccagcatgatgcagcaaccagccaggagtgttagtgagaagataaactcagctctgaagaaagctgttgggggtgttgccttatccctgtctactggcctttctgtgggtgtattcttcttgcagttccttgactggtggtactcatctgaaaatcaagaaaccatcaagtcattgactgccctgcctactccaccaccacctgtacacctagactataactctgattctcccctcttacccaaaatgaagactgtgtgcccactgtgtcgtaaaacccgggtgaatgatactgttcttgccacctctggctatgtgttttgttaccgctgtgtgtttcattatgtgaggagtcaccaagcttgtcccatcacaggttatccaacagaagtacaacatctgattaaactctactcccctgagaactgaaagggaatcatgtcttatcctcacaacaaaagtattgcgctgtaatgtcacagagctggtttcagcatggtattgagttgacacttctcagcctcaattcataactatatgaactttaaatgattatatggatttctttaaaaggatatgcccatttgatcctaaccttttagcctgctctctagaaccctacttacagttgaccaagctgcttaaagtagaaggatcaggactggcaggggatatgagggccagtgtagagattaaacagaataatgagtacacaagtttttgcctatccctttccttaaaatataagaaataaaggagctcttacgaaaaacccaggttagaccgcataaaaaataaagtgaacagtgaggtggtagcaagacttctttttagaaaagaaagcatttacctgcctgtctgtaaggtggaaatttcatcagtttgcaaacgataagaaatgcagacttgctcttgatagaaatgcttagaaacactctgggggggaaaaaagctccttccatatactgtgagacatttgttaagtgacatctattgtttatcagcttttaaggataaaaaaggtattttaaaagttggatatttaggatatttgaggatattcctttatgagctctccatatccttcttgagaaactggttaaaaaaggaataggggttgagtgttacagagagtagtctgaagattcctgtgtaaaagcaaagctaacaagcaatgaagacatgaagcaaaatactaatctaattgtgtaaagaaaggatattttaataagttctttctgcttgctgctaagagtttgctaaagtgtcatgaattattctggttattactaaagtttctatgaaacacttaagtagattttaagaataaatgtttctggaaaagaactatgttatgattttgtagaaatgtaaagattacttgaggtgtttaaaataaatttttcattcagacta

SEQ ID NO: 6100 - DNA, 1588 bp, Artificial Sequence
  derived and/or modified sequence
tagagcgcctctcttccgccaggcatcccagaggtcctggtggtttcatttccgggtgcggcttctgtcataaagcggagacctcccttcaaacgtggcgtcgtgggttgtttgcgcctcgcctggggtcagcgagcaaggacgggcgcgggcggggatactcaaagccaacagctggagtcagcccttgtgtcccgggctcacagtggcacgactgaatcctcagagtcggctggcttttgagctctcacgattggggaggagggggcgtttctggttcgcagctccagaggattgcgttccttcccccatacctgtcccccacagtcacgctctgccctgacgtgcagcatttgacaagttaccccctcgccacatactacttccacccacgtccgagttaactttgttcttaaccttcttgagactaccctcggcctccaggtctttttttcccagttcatttttgcccataagattgagtttcgagtttcagatatcatgcagaaagtttacctttaagactgagcacccatctgatactcttcctcccgaaaaagttcatgctcacgagagagtttgtgggaaaagtgaaagccagtacacgcaggaaactatggctgagcacggggctcacttcacagctgcttctgtggccgatgaccagccatccatctttgaggtggtagcacaggacagtttaatgacagcagtgagacccgctcttcagcatgtggtcaaggttcttgcagaatcaaatcccacccactatggcttcttgtggaggtggtttgatgaaatctttactctgctagatcttctgctccagcaacattatctgtctagaaccagtgcctcattttctgaaaacttttacggcttaaagagaattgtaatgggggacactcacaagtctcagagattggctagtgctggtctcccaaagcagcagctttggaaatctattatgttcctggttcttcttccctatctgaaagtgaagctggagaagctggtttctagcctgagagaagaggatgaatattctattcatcccccttcttcccgctggaaacgattttacagagctttcctggcagcctacccatttgtgaacatggcctgggaaggatggtttcttgtacaacaacttcgatacatcctaggaaaagctcagcatcactcaccactgctgaggctggctggagttcagctaggtcgactgacagttcaggatatacaagctctggagcacaaaccagctaaggccagcatgatgcagcaaccagccaggagtgttagtgagaagataaactcagctctgaagaaagctgttgggggtgttgccttatccctgtctactggcctttctgtgggtgtattcttcttgcagttccttgactggtggtactcatctgaaaatcaagaaaccatcaagtcattgactgccctgcctactccaccaccacctgtacacctagactataactctgattctcccctcttacccaaaatgaagactgtgtgcccaaaaaaaaaaaaaaagaaagaaagaaagaaaaagaaagaaagaaagaaggaaagaagg

SEQ ID NO: 6101 - DNA, 975 bp, Artificial Sequence
  derived and/or modified sequence
atggccgagcacggggcacacttcacagcagcaagcgtcgcggacgaccagccctcaatctttgaggtggtggcccaagattccttaatgactgccgtgcggcctgcccttcagcacgtagtcaaagtcctcgccgagagcaaccctacacactatgggttcctgtggcggtggttcgacgaaattttcactctgcttgatctgctattacaacaacattatctgtcgagaacctcagcttctttctctgagaacttctacggcctcaagagaatagtcatgggcgacactcataagagccagcggctggccagcgccggactgcctaagcaacagctttggaaatccattatgtttcttgtgttattaccatatttgaaggtcaagcttgagaaattggtatcatcccttagagaggaagatgaatactccattcaccctccctctagcagatggaaaagattttacagagccttcctggcagcctatccttttgtgaatatggcctgggaagggtggtttcttgtgcagcagctgcgatacattctgggcaaagcacaacatcattcacccctcttaagattagcgggtgtgcagctcggcagacttaccgtacaggatatccaggcacttgaacacaagcccgctaaagcctctatgatgcagcagcctgcaagaagcgtgtccgagaaaattaattcagcactcaagaaggctgtcggcggagtggcgctctccctcagcaccggactgtctgttggcgtgtttttcttgcagttcctggattggtggtattcatcagagaaccaggagaccattaagtctttgacggccctgccgacgcctcccccaccagtacacctcgattataattccgactcacccctgctccccaagatgaaaacagtgtgccccaagaaaaaaaagaagaaggaaagaaagaaaaagaaagaacgaaagaaggaacgtcggtag

SEQ ID NO: 6102 - DNA, 1080 bp, Artificial Sequence
  derived and/or modified sequence
atggccgagcacggcgcccacttcaccgccgccagcgtggccgacgaccagcccagcatcttcgaggtggtggcccaggacagcctgatgaccgccgtgagacccgccctgcagcacgtggtgaaggtgctggccgagagcaaccccacccactacggcttcctgtggagatggttcgacgagatcttcaccctgctggacctgctgctgcagcagcactacctgagcagaaccagcgccagcttcagcgagaacttctacggcctgaagagaatcgtgatgggcgacacccacaagagccagagactggccagcgccggcctgcccaagcagcagctgtggaagagcatcatgttcctggtgctgctgccctacctgaaggtgaagctggagaagctggtgagcagcctgagagaggaggacgagtacagcatccacccccccagcagcagatggaagagattctacagagccttcctggccgcctaccccttcgtgaacatggcctgggagggctggttcctggtgcagcagctgagatacatcctgggcaaggcccagcaccacagccccctgctgagactggccggcgtgcagctgggcagactgaccgtgcaggacatccaggccctggagcacaagcccgccaaggccagcatgatgcagcagcccgccagaagcgtgagcgagaagatcaacagcgccctgaagaaggccgtgggcggcgtggccctgagcctgagcaccggcctgagcgtgggcgtgttcttcctgcagttcctggactggtggtacagcagcgagaaccaggagaccatcaagagcctgaccgccctgcccaccccccccccccccgtgcacctggactacaacagcgacagccccctgctgcccaagatgaagaccgtgtgccccctgtgcagaaagaccagagtgaacgacaccgtgctggccaccagcggctacgtgttctgctacagatgcgtgttccactacgtgagaagccaccaggcctgccccatcaccggctaccccaccgaggtgcagcacctgatcaagctgtacagccccgagaactag

SEQ ID NO: 6103 - DNA, 1080 bp, Artificial Sequence
  derived and/or modified sequence
atggcagagcatggcgcgcactttacagccgcgtcagtggcagacgaccagccatctattttcgaagtggtcgcccaggactctctgatgaccgccgtccgcccagctctccagcatgtggtgaaagtgctggcagagagcaatcccacccattacggattcctgtggaggtggttcgacgagattttcaccctcctcgacctcctgctgcagcagcactatctgtcacgaacaagcgccagcttttctgagaacttttatggactcaagaggattgtgatgggtgacacacataaaagccagcgactggccagtgctggactacccaaacaacagttgtggaaaagcatcatgttcttagtgctcctgccgtacctcaaagtgaagcttgagaagctggtcagttcccttcgggaggaagacgagtacagtatccatccgccgagttctaggtggaagcggttttaccgagcttttctcgccgcctatccttttgtcaatatggcctgggagggttggtttctggtccagcagctgcgttatatccttgggaaggctcagcatcactctccgctcctacggctggctggcgtacagctcgggcgcctcactgtccaagacatccaggcccttgaacacaaaccggcaaaggcctcgatgatgcagcaacctgccaggtccgtgtccgaaaagatcaattccgccctcaagaaagctgtgggtggtgtggcactgagcctgagtactggcttatccgtaggtgttttttttctgcagtttttggattggtggtattcttcagagaaccaggaaacaatcaagtcccttacggctctacccacacctccaccacccgtccaccttgattacaatagtgactctcccctcctcccaaagatgaaaaccgtctgtcctctgtgtagaaaaaccagagtgaatgacaccgtgctggcaactagtggatatgtgttttgttataggtgcgtcttccactatgtgcgcagtcatcaagcttgtcccattacgggatatcctactgaggtccagcacctgattaaactgtatagccctgagaattag

SEQ ID NO: 6104 - DNA, 1080 bp, Artificial Sequence
  derived and/or modified sequence
atggccgagcacggggcccacttcaccgctgcctctgtggctgatgaccagcccagcatctttgaggtggtggcccaggacagcctgatgacagctgtgcggcctgccctgcagcacgtggtgaaggtgctggccgagagcaaccccacccactacggcttcctgtggcgctggtttgatgagatcttcaccctgctggacctgctgctgcagcagcactacctgagcaggaccagcgccagcttcagcgagaacttctacggcctgaagagaattgtgatgggagacacccacaagagccagaggctggccagcgctggcctgcccaagcagcagctgtggaagagcatcatgttcctggtgctgctgccctacctgaaggtgaagctggagaagctggtgagcagcctgcgggaggaggatgagtacagcatccacccccccagcagccgctggaagcgcttctaccgggccttcctggccgcctacccctttgtgaacatggcctgggagggctggttcctggtgcagcagctgcgctacatcctgggcaaggcccagcaccacagccccctgctgcggctggccggcgtgcagctgggccgcctgactgtgcaggacatccaggccctggagcacaagccagccaaggcctccatgatgcagcagcctgcccggtctgtgtctgagaagatcaacagcgccctgaagaaggctgtgggcggcgtggccctgagcctgagcacaggcctgtctgtgggcgtcttcttcctgcagttcctggactggtggtacagcagcgagaaccaggagaccatcaagagcctgacagccctgcccaccccacctcctcctgtgcacctggactacaacagcgacagccccctgctgcccaagatgaagacagtgtgccccctgtgcaggaagaccagggtgaatgacacagtgctggccaccagcggctacgtgttctgctaccgctgtgtgttccactacgtgcgcagccaccaggcctgccccatcaccggctaccccacagaggtgcagcacctgatcaagctgtacagccctgagaactag

SEQ ID NO: 6105 - DNA, 1080 bp, Artificial Sequence
  derived and/or modified sequence
atggccgagcacggcgcccacttcaccgccgccagcgtggccgacgatcagccctcaatttttgaggtggtggcgcaggattcattgatgactgctgtacggcctgccctgcagcatgtcgtgaaagtgttggcagagtctaatcccacacactatggcttcttatggcgatggtttgatgagattttcaccctacttgacctgctcttgcagcaacattatctgagccggacctctgctagcttctctgagaatttttatggactgaaacggatcgttatgggggacacacataaatcacagcgtctcgcttccgcaggtctccctaaacaacagctttggaagtctatcatgttcctcgtattgcttccatacctaaaagtgaagctggaaaagctggtctcctcgcttcgggaggaggacgaatactcaatccaccctccctctagtcggtggaagaggttctatcgcgcatttttggcagcctaccccttcgtaaatatggcctgggaggggtggttcttggtccaacagctgcggtatatcctgggaaaggcccagcatcactcccccctactgcgcctggcgggcgtgcagttaggccggctaacggttcaggacatacaagccctggagcataaaccagccaaggcgtctatgatgcagcagcctgcccggtctgtaagtgaaaaaattaacagcgccctgaagaaagccgtcgggggggtggctctatctctgagcaccggcctgagcgtcggtgtgttcttccttcaatttctcgactggtggtacagtagcgagaaccaggagactatcaaatcgttgacagcgctgcctacccccccccctccagtgcacctagactacaattccgacagccctcttttgcccaaaatgaagactgtttgccccctttgtcgtaaaactagggttaacgataccgtgctcgctacttcgggatatgtgttctgctatagatgcgtcttccactacgtgcgctcccatcaggcctgtccaatcacaggctatcccaccgaagtccaacatctgataaaactgtatagccccgagaattag

SEQ ID NO: 6106 - DNA, 1080 bp, Artificial Sequence
  derived and/or modified sequence
atggcggagcacggggcacacttcacagcagctagcgtggcggatgaccaaccctctatctttgaagtagtagcacaggactcacttatgacagcagtgcgtcctgccctccagcatgtggtgaaggtcctcgcagagagtaatccaacacactatgggttcctctggcgttggttcgatgagatcttcacattactggacctgcttctgcagcaacattatctgagtaggaccagtgcatctttcagcgagaacttttacggactcaagagaatagtcatgggtgatacccataagagccagagactcgcaagcgcaggtctgcccaagcagcagctatggaaatctatcatgttcctggtgctattgccctatttgaaagttaaactggaaaagctggtttcgtcactgcgtgaagaagatgagtacagcattcaccccccaagttctcggtggaaacgcttttaccgagcattcttggcagcgtacccctttgtcaatatggcatgggaggggtggtttcttgtgcagcagttgaggtacatcctggggaaggcccagcatcactcacctctactccggcttgccggagtgcagctcgggaggctgacagtccaggacattcaggcgctggagcacaagccagctaaagcttcaatgatgcagcaacctgcacggtccgtgagtgagaaaataaattctgccctgaagaaggcagtgggcggtgtcgctttatcgttgtccaccgggctcagtgtgggcgtgttcttcctccagtttttagactggtggtattcaagcgaaaatcaggaaacaatcaagtctttaaccgcactcccgacacccccaccccctgtccacctggattacaacagtgactctcctctcctccctaagatgaagactgtgtgcccactgtgcaggaagacacgcgtcaacgatacagtgctggctaccagtgggtacgtgttctgttacagatgcgtctttcattacgtgagaagtcatcaggcgtgtccaatcactgggtaccctactgaagtgcagcacttgatcaagttgtactccccagaaaactag

SEQ ID NO: 6107 - protein, 738 aa, Artificial Sequence
  derived and/or modified sequence
MALAVLRVLEPFPTETPPLAVLLPPGGPWPAAELGLVLALRPAGESPAGPALLVAALEGPDAGTEEQGPGPPQLLVSRALLRLLALGSGAWVRARAVRRPPALGWALLGTSLGPGLGPRVGPLLVRRGETLPVPGPRVLETRPALQGLLGPGTRLAVTELRGRARLCPESGDSSRPPPPPVVSSFAVSGTVRRLQGVLGGTGDSLGVSRSCLRGLGLFQGEWVWVAQARESSNTSQPHLARVQVLEPRWDLSDRLGPGSGPLGEPLADGLALVPATLAFNLGCDPLEMGELRIQRYLEGSIAPEDKGSCSLLPGPPFARELHIEIVSSPHYSTNGNYDGVLYRHFQIPRVVQEGDVLCVPTIGQVEILEGSPEKLPRWREMFFKVKKTVGEAPDGPASAYLADTTHTSLYMVGSTLSPVPWLPSEESTLWSSLSPPGLEALVSELCAVLKPRLQPGGALLTGTSSVLLRGPPGCGKTTVVAAACSHLGLHLLKVPCSSLCAESSGAVETKLQAIFSRARRCRPAVLLLTAVDLLGRDRDGLGEDARVMAVLRHLLLNEDPLNSCPPLMVVATTSRAQDLPADVQTAFPHELEVPALSEGQRLSILRALTAHLPLGQEVNLAQLARRCAGFVVGDLYALLTHSSRAACTRIKNSGLAGGLTEEDEGELCAAGFPLLAEDFGQALEQLQTAHSQAVGAPKVETKSLECLPGPGLQLHALSSLMNWTLWPQAGGEVEILEE

SEQ ID NO: 6108 - protein, 980 aa, Artificial Sequence
  derived and/or modified sequence
MALAVLRVLEPFPTETPPLAVLLPPGGPWPAAELGLVLALRPAGESPAGPALLVAALEGPDAGTEEQGPGPPQLLVSRALLRLLALGSGAWVRARAVRRPPALGWALLGTSLGPGLGPRVGPLLVRRGETLPVPGPRVLETRPALQGLLGPGTRLAVTELRGRARLCPESGDSSRPPPPPVVSSFAVSGTVRRLQGVLGGTGDSLGVSRSCLRGLGLFQGEWVWVAQARESSNTSQPHLARVQVLEPRWDLSDRLGPGSGPLGEPLADGLALVPATLAFNLGCDPLEMGELRIQRYLEGSIAPEDKGSCSLLPGPPFARELHIEIVSSPHYSTNGNYDGVLYRHFQIPRVVQEGDVLCVPTIGQVEILEGSPEKLPRWREMFFKVKKTVGEAPDGPASAYLADTTHTSLYMVGSTLSPVPWLPSEESTLWSSLSPPGLEALVSELCAVLKPRLQPGGALLTGTSSVLLRGPPGCGKTTVVAAACSHLGLHLLKVPCSSLCAESSGAVETKLQAIFSRARRCRPAVLLLTAVDLLGRDRDGLGEDARVMAVLRHLLLNEDPLNSCPPLMVVATTSRAQDLPADVQTAFPHELEVPALSEGQRLSILRALTAHLPLGQEVNLAQLARRCAGFVVGDLYALLTHSSRAACTRIKNSGLAGGLTEEDEGELCAAGFPLLAEDFGQALEQLQTAHSQAVGAPKIPSVSWHDVGGLQEVKKEILETIQLPLEHPELLSLGLRRSGLLLHGPPGTGKTLLAKAVATECSLTFLSVKGPELINMYVGQSEENVREVFARARAAAPCIIFFDELDSLAPSRGRSGDSGGVMDRVVSQLLAELDGLHSTQDVFVIGATNRPDLLDPALLRPGRFDKLVFVGANEDRASQLRVLSAITRKFKLEPSVSLVNVLDCCPPQLTGADLYSLCSDAMTAALKRRVHDLEEGLEPGSSALMLTMEDLLQAAARLQPSVSEQELLRYKRIQRKFAAC

SEQ ID NO: 6109 - DNA, 2217 bp, Artificial Sequence
  derived and/or modified sequence
atggctctggccgtgctgagggtgctggagccattccctacagagacacctcctttagctgtcttgctcccccctggaggcccctggcccgcagccgagctcgggctcgtcctcgctctccgccccgcaggtgaatctccagccggcccggctctgctcgtggccgccttggagggacctgacgctgggaccgaggagcaaggccctggaccacctcagctactggtcagtcgcgcattactgaggcttctcgctttggggtccggagcctgggtgagagcacgcgcagtgcgcaggcctcccgctttggggtgggcgctccttggtacctcactcggaccagggctgggccctagagttgggccattacttgttcgcagaggcgagacgctccctgtgccgggccccagggtgctcgagacccgaccagcactccagggactacttgggcctggtactcgactcgctgttacagaactccggggtcgcgcccgcctgtgccccgagtccggggacagttctcgccccccacccccgccagtggtctccagtttcgcagtctccgggacggttcgcagactgcagggcgtgctcgggggtacgggcgactcccttggggtaagccgctcctgtttaagagggctcggactgtttcagggtgagtgggtctgggtcgcacaagcacgtgaaagtagtaacacctctcagccacacctggcgagagtgcaggtcctggagccaaggtgggatctgagtgaccggttaggccccgggagcggcccgcttggagaacctctcgctgacggcctagccctcgtgccagccacactggcatttaacttagggtgcgacccactggagatgggtgagctacgaatacagcggtacctggaaggatccatcgcgcctgaagacaagggctcatgttccctcctgcccggaccaccatttgctagagagctccatatcgagatcgtgtctagcccccactactcaactaacggcaactacgacggcgttctgtatcgccacttccagatcccccgagtggtgcaggaaggggatgttttgtgcgttcctacgatcggccaggtggaaattctggagggctccccagagaaactcccaagatggagggagatgttctttaaggtaaagaaaacagtgggcgaggcacctgatggacccgcatcggcctacctggcagatactacacacacttcactgtacatggttggctccacgctgtcccctgtcccctggctgccaagtgaggaatctacgctgtggtctagcctcagtccccctgggctggaagccctcgtgtccgaactctgtgctgtgctgaagcctcgactgcagcctggcggagccctgctgactggcacttcttccgtcctgctccgcgggcccccagggtgtgggaaaaccacagtcgttgccgcagcatgctcccacctggggctgcacctgctgaaggtgccatgtagctcactgtgtgccgaatccagtggggcagttgaaacaaagcttcaagccatcttctcccgggcccgtaggtgccgtcccgccgtgttattgctgacagccgttgatctccttggcagagatagagatggactcggagaagacgcccgcgtgatggccgtgctgcgtcacctgcttctgaacgaagatccactaaatagctgtccgcctttaatggtggtggccaccacgtcccgtgcccaagacctgccagcagacgtgcagacggcctttccccatgaactggaagtgcccgccctgtctgagggccagcgcttgagcatactgcgggcacttacagcccacctgcctctggggcaagaggtcaatctggcacagttagccagacggtgtgccggtttcgtcgtcggggacttatacgcgttattgacgcatagttctagggccgcttgcacacgtataaaaaattccggactggccggtggccttacagaggaggatgaaggtgaattgtgcgccgccggattccctctacttgcagaagatttcggccaggcgcttgaacagcttcagacagcccacagtcaggccgttggggcccctaaggtggaaaccaaatctctggaatgtctccccgggcctgggcttcagctgcacgccttgtcctcactgatgaattggactctgtggccacaagccgggggtgaagtcgaaattttggaggaatag

SEQ ID NO: 6110 - DNA, 2943 bp, Artificial Sequence
  derived and/or modified sequence
atggcccttgcagtgctccgggtgctggagccgtttccaacggagactccacctttggccgtactgcttccacccggtggcccttggcctgcggcagagctgggcctcgtcctagccctgcggcccgccggggaaagtccggcaggacccgccctgcttgtcgctgcactggaaggaccagatgccggtaccgaagagcaggggcctggccctccacagcttcttgtgtcccgggcactgttgcggcttctcgccttgggctccggcgcatgggtaagagctagggcggtgcggcgcccccccgccctcgggtgggccttgctaggaacgagcctggggcccggattgggcccccgcgtgggccccctcctagtgaggagaggagaaacactgccggtacctggcccacgcgtgctggagacgaggcccgcactgcaggggctcctgggacccgggactcgactggcggtcacagagttaaggggccgagctcgactttgtccggaaagcggagactcatcaaggcccccaccccctcctgtggtctcgtccttcgcagtgtcaggcaccgttcgccgcctacaaggggtgctcggcggcaccggcgattccctgggtgtgagcagaagctgccttcgcggacttgggttgttccagggcgagtgggtgtgggtggcacaagcccgtgagtcttcgaacaccagccaaccacatctggctagggtgcaggtgttagagccccggtgggacctgagtgaccgtttgggtccaggtagcggccctctcggcgagcccctcgctgatggactggcccttgtgccagctacacttgcatttaatctaggatgcgacccgttagaaatgggggagttgcggattcagaggtacctggaaggctcgatcgcccccgaggataaaggatcttgctctttgctcccgggtccccctttcgcaagagaactccatattgagatcgttagtagcccccattatagtacaaatggtaattatgatggcgttctgtaccggcattttcaaatcccaagggtcgtccaggagggcgacgtgctctgtgttccaacgatcggacaggtggagatactggagggctcaccggagaaactgccgagatggcgggaaatgttcttcaaagtgaaaaaaacagtcggcgaagcacccgatggccctgcaagtgcttaccttgccgacactacccacacgagtctgtatatggttgggagcactctatcccccgttccgtggctaccttctgaagaaagtaccctgtggtcctccctctcaccgcccggtctagaagcattggtgtccgagctctgtgcagtgctcaaacccagattgcagccaggcggagcattactcactggaacaagtagcgtgctactgcgggggcctcctggctgtggaaagaccactgtggtggccgctgcgtgctctcacctaggacttcatttactgaaggtcccttgctcttccctctgtgctgaaagctccggagcagtggaaacaaaactgcaagccatcttcagcagagccaggcggtgccggccggcggttctgttgctcactgcggtggacttgctcggccgcgatcgagacggtcttggcgaagatgcacgcgttatggcggttctccgacatctgcttctcaatgaggatccactgaactcatgtccacctctcatggtggttgcaactacgtcacgagcccaagacctacccgccgatgtccagaccgcctttccgcatgagctggaagtgcctgcgttgtcagagggccagagattgagtattctgagagctttgacagcccatctcccgctaggccaagaggtgaacctggctcagctggccagacggtgcgcaggattcgtcgtgggagacctgtacgccttactgacacattcctcccgcgccgcgtgcacacgaatcaagaattcagggcttgcaggaggtctaacagaggaggacgaaggggagctgtgtgccgcaggttttccgctgctggccgaggacttcggccaggcgctggagcagctgcaaacagcccacagccaggcagtgggcgccccgaagatcccatccgtctcctggcacgatgtgggcggcctgcaggaggtaaagaaagagattttggagaccattcagctccctcttgaacaccctgagctcctctcattagggctgcgccggagtggactgctgctacacggaccacctggaaccgggaagacacttcttgcaaaggctgtggccacagaatgcagcctgaccttcctctcagtgaagggccctgaactgatcaatatgtatgtgggccagtccgaagaaaacgtgagagaggtgttcgctcgcgccagagcagcagctccgtgcattattttcttcgatgagctggacagtctcgccccttccagaggaagatctggggatagcggaggggtcatggatcgagtcgtgtcccaactcctggctgagctggacggactccatagtactcaggacgttttcgtgataggggccaccaaccggccagacctgttggatcctgcactcttacgacccggccgcttcgataagcttgtttttgtgggcgccaatgaagatcgggcgtcccagcttagagtgctgtccgccatcactcgtaagttcaagcttgaaccttcagttagcctcgtgaacgtactagattgctgccctccacagttaactggagcagacctatactccctctgttcggacgccatgacagctgccctcaagcggagggtgcacgacttagaagagggactggagccagggagctcagcattaatgctgacgatggaagatcttctgcaagccgccgcccgcctccagccaagtgttagcgaacaagagcttctgaggtacaaacgtatccagaggaaatttgccgcatgttag

SEQ ID NO: 6111 - DNA, 2217 bp, Artificial Sequence
  derived and/or modified sequence
atggccctggccgtgctgcgggtgctggagcccttccccacagagaccccacccctggccgtgctgctgcccccaggcggcccctggccagctgctgagctgggcctggtgctggccctgcggcctgctggggagagccctgctggccctgccctgctggtggccgccctggagggcccagatgctggaacagaggagcagggccctggccccccccagctgctggtgtcccgggccctgctgcggctgctggccctgggcagcggggcctgggtgcgggcccgggctgtgcggcggcccccagccctgggctgggccctgctgggcaccagcctgggccctggcctgggcccccgggtgggccccctgctggtgcggcggggggagaccctgcctgtgcccggcccccgggtgctggagaccaggcctgccctgcagggcctgctgggccctggcacccggctggccgtgacagagctgcggggccgggcccggctgtgcccagagagcggggacagcagccggcccccacctcctcctgtggtgagcagctttgctgtgtctggcaccgtgcggcggctgcagggcgtgctgggcggcactggagacagcctgggcgtgagccgcagctgcctgcggggcctgggcctcttccagggcgagtgggtgtgggtggcccaggcccgggagagcagcaacaccagccagccccacctggcccgggtgcaggtgctggagccccgctgggacctgagtgaccggctgggccctggcagcggccccctgggggagcccctggctgatggcctggccctggtgcctgccaccctggccttcaacctgggctgtgaccccctggagatgggagagctgcgcatccagcgctacctggagggcagcatcgcccctgaggacaagggcagctgcagcctgctgcccggccccccatttgcccgggagctgcacattgaaattgtgagcagcccccactacagcaccaacggcaactatgatggagtgctgtaccgccacttccagatcccccgggtggtgcaggagggagatgtgctgtgtgtgcccaccatcggccaggtggagatcctggagggcagccctgagaagctgccccgctggagggagatgttcttcaaggtgaagaagacagtgggggaggccccagatggccctgccagcgcctacctggccgacaccacccacaccagcctgtacatggtgggcagcaccctgagccctgtgccctggctgcccagcgaggagagcaccctgtggagcagcctgagccccccaggcctggaggccctggtgtctgagctgtgtgctgtgctgaagccccggctgcagcctggaggagccctgctgaccggcaccagctctgtgctgctgcggggccccccaggctgtgggaagaccaccgtggtggccgccgcctgcagccacctgggcctgcacctgctgaaggtgccctgcagcagcctgtgtgccgagagcagcggggctgtggagaccaagctgcaggccatcttcagccgggcccggcgctgcaggcctgctgtgctgctgctgacagctgtggacctgctgggccgggacagagatggcctgggagaagatgcccgggtgatggctgtgctgcggcacctgctgctgaatgaagaccccctgaacagctgcccccccctgatggtggtggccaccaccagccgggcccaggacctgcctgcagatgtgcagacagccttcccccatgagctggaggtgcctgccctgtctgagggccagaggctgagcatcctgcgggccctgacagcccacctgcccctgggccaggaggtgaacctggcccagctggcccggcgctgtgccggctttgtggtgggggacctgtatgccctgctgacccacagcagcagagctgcctgcacccgcatcaagaacagcggcctggccggcggcctgacagaggaggatgaaggagagctgtgtgccgccggcttccccctgctggctgaagattttggccaggccctggagcagctgcagacagcccacagccaggccgtgggcgcccccaaggtggagaccaagagcctggagtgcctgcccggccctggcctgcagctgcacgccctgagcagcctgatgaactggaccctgtggccccaggccggcggggaggtggagatcctggaggagtag

SEQ ID NO: 6112 - DNA, 2943 bp, Artificial Sequence
  derived and/or modified sequence
atggccctggccgtgctgcgggtgctggagcccttccccacagagaccccacccctggccgtgctgctgcccccaggcggcccctggccagctgctgagctgggcctggtgctggccctgcggcctgctggggagagccctgctggccctgccctgctggtggccgccctggagggcccagatgctggaacagaggagcagggccctggccccccccagctgctggtgtcccgggccctgctgcggctgctggccctgggcagcggggcctgggtgcgggcccgggctgtgcggcggcccccagccctgggctgggccctgctgggcaccagcctgggccctggcctgggcccccgggtgggccccctgctggtgcggcggggggagaccctgcctgtgcccggcccccgggtgctggagaccaggcctgccctgcagggcctgctgggccctggcacccggctggccgtgacagagctgcggggccgggcccggctgtgcccagagagcggggacagcagccggcccccacctcctcctgtggtgagcagctttgctgtgtctggcaccgtgcggcggctgcagggcgtgctgggcggcactggagacagcctgggcgtgagccgcagctgcctgcggggcctgggcctcttccagggcgagtgggtgtgggtggcccaggcccgggagagcagcaacaccagccagccccacctggcccgggtgcaggtgctggagccccgctgggacctgagtgaccggctgggccctggcagcggccccctgggggagcccctggctgatggcctggccctggtgcctgccaccctggccttcaacctgggctgtgaccccctggagatgggagagctgcgcatccagcgctacctggagggcagcatcgcccctgaggacaagggcagctgcagcctgctgcccggccccccatttgcccgggagctgcacattgaaattgtgagcagcccccactacagcaccaacggcaactatgatggagtgctgtaccgccacttccagatcccccgggtggtgcaggagggagatgtgctgtgtgtgcccaccatcggccaggtggagatcctggagggcagccctgagaagctgccccgctggagggagatgttcttcaaggtgaagaagacagtgggggaggccccagatggccctgccagcgcctacctggccgacaccacccacaccagcctgtacatggtgggcagcaccctgagccctgtgccctggctgcccagcgaggagagcaccctgtggagcagcctgagccccccaggcctggaggccctggtgtctgagctgtgtgctgtgctgaagccccggctgcagcctggaggagccctgctgaccggcaccagctctgtgctgctgcggggccccccaggctgtgggaagaccaccgtggtggccgccgcctgcagccacctgggcctgcacctgctgaaggtgccctgcagcagcctgtgtgccgagagcagcggggctgtggagaccaagctgcaggccatcttcagccgggcccggcgctgcaggcctgctgtgctgctgctgacagctgtggacctgctgggccgggacagagatggcctgggagaagatgcccgggtgatggctgtgctgcggcacctgctgctgaatgaagaccccctgaacagctgcccccccctgatggtggtggccaccaccagccgggcccaggacctgcctgcagatgtgcagacagccttcccccatgagctggaggtgcctgccctgtctgagggccagaggctgagcatcctgcgggccctgacagcccacctgcccctgggccaggaggtgaacctggcccagctggcccggcgctgtgccggctttgtggtgggggacctgtatgccctgctgacccacagcagcagagctgcctgcacccgcatcaagaacagcggcctggccggcggcctgacagaggaggatgaaggagagctgtgtgccgccggcttccccctgctggctgaagattttggccaggccctggagcagctgcagacagcccacagccaggccgtgggcgcccccaagatccccagcgtgtcctggcatgatgtgggcggcctgcaggaggtgaagaaggagatcctggagaccatccagctgcccctggagcaccctgagctgctgagcctgggcctgcggcgcagcggcctgctgctgcacggccccccaggcaccgggaagaccctgctggccaaggctgtggccacagagtgcagcctgaccttcctgtctgtgaagggccctgagctgatcaacatgtatgtgggccagagtgaagaaaatgtgcgggaggtgtttgcccgggcccgggctgctgccccctgcatcatcttctttgatgagctggacagcctggcccccagccggggccgcagcggggacagcggcggcgtgatggacagagtggtgtcccagctgctggccgagctggatggcctgcacagcacccaggatgtgtttgtgattggagccaccaacagaccagacctgctggaccctgccctgctgcggcccggccgctttgacaagctggtgtttgtgggcgccaatgaagatcgggccagccagctgcgggtgctgagcgccatcaccaggaagttcaagctggagcccagcgtgtccctggtgaatgtgctggactgctgccccccccagctgaccggggctgacctgtacagcctgtgcagtgatgccatgacagctgccctgaagagaagagtgcatgacctggaggagggcctggagcccggcagcagcgccctgatgctgaccatggaggacctgctgcaggccgccgcccggctgcagcccagcgtgtctgagcaggagctgctgcgctacaagaggatccagaggaagtttgctgcctgctag

SEQ ID NO: 6113 - DNA, 2217 bp, Artificial Sequence
  derived and/or modified sequence
atggccctggccgtgctgcgggtgctggagcccttccccaccgagacaccaccactagctgtcctactgccccctggcggaccatggcccgcagcagagttgggcctggtgcttgctctgaggcccgcgggggagtcgccagcgggtcctgcgctgctcgtggccgccctggagggccccgatgcgggcaccgaagagcaaggcccgggacccccccagctcttggtatctcgcgctttgttgcggttactggctttaggaagtggcgcttgggtgagggcaagagcagtcagacggccccccgccctcggatgggctctactgggtacgtcccttgggccagggttggggcctagggtgggacctttgctggtgagaaggggcgagactctgccagtccccgggcccagggtgttggagacaagaccagccctgcagggactcctcggtccaggcacacgactggccgtcacggagttgcgcggacgcgctaggctgtgcccagagagtggggatagctccagacctcctcccccacccgtcgtttcttcttttgctgtctcaggaacggttaggcgactgcagggggtattgggagggaccggggactcgctcggcgtgtcacgcagctgtcttagaggacttggcctgtttcagggcgagtgggtttgggtggcccaagcacgggaaagttctaataccagtcagcctcatcttgcccgggtgcaggtgcttgagccccgttgggatctgtcagacaggttggggcctggcagtgggcctttaggggaacccctggccgatggcctcgctttggtgccagcgacactagcttttaatctggggtgtgacccattggagatgggtgaacttcgcatacagcgctacctggaaggatccattgcgcctgaggacaagggaagttgctccttattgccaggtcctccctttgctcgggagctgcacattgaaatcgtatcctctcctcactattcgaccaatgggaattatgatggggttttgtatagacactttcaaattccccgtgtggtgcaagagggcgacgtgctgtgtgttcctactattggacaggtcgagatcctggaaggcagcccggaaaaattgccgcgctggcgggaaatgtttttcaaggtgaaaaaaactgtgggagaagctccggatggtccagcatctgcctatctggccgataccacccacacttccctctacatggtcggctctacactgtctcctgtgccatggcttccaagtgaggagagcacactgtggtccagcctgagcccacccgggctggaggctttggtgtctgagctatgtgccgtactgaagccccgcctgcagcccggtggggcactcttaaccggcaccagctcagtgcttttgcgcggtccgcctggctgcgggaaaacgactgtggtggctgctgcatgctcccacttgggcctccatctgctgaaggtgccctgcagctctctatgtgccgagagctccggtgctgtcgagaccaaacttcaggcaatcttcagcagggcccgacggtgccgcccagccgtactcctactcacagccgtcgacctgttgggtcgggatcgagacgggcttggcgaggacgcaagggtgatggccgtgctgaggcatctcttactcaacgaggatcccctgaactcttgcccccctttgatggtggtggcaaccacttcacgggcccaggacctccccgctgacgtgcagacagcatttcctcacgagttagaagtgccagcactcagcgaagggcaaaggttatcaatcttgcgtgctctaaccgcgcacctgccactcggtcaagaggttaacctcgcacagctagcccggagatgcgcgggcttcgtggtgggggacctgtacgccctcctgactcactcgagcagagccgcttgtacacgcattaagaactccggccttgctggcggtctgacggaagaggatgagggcgaattgtgcgccgcgggattccctctgctggctgaggattttggacaagcattagagcagctgcagacagctcactcacaggcagtaggtgcacccaaagttgaaactaagtctctcgagtgcttgcccggtccaggtctccagctccatgccctttcctccctaatgaactggactctgtggcctcaagccggcggagaagttgaaatcctagaagaatag

SEQ ID NO: 6114 - DNA, 2943 bp, Artificial Sequence
  derived and/or modified sequence
atggccctggccgtgctgcgggtgctggagcccttccccaccgagacaccgccactcgcagtgctcctgcctcctggcgggccctggcccgcagcagagcttggcctcgtgctggcattacgtcccgctggagagagcccagccggcccagcgctgctggtcgccgctcttgaaggccctgacgctggcacggaagaacaaggcccaggcccccctcagttgctggtgtcccgagctctgctacggctcctggcccttggctcgggggcgtgggtcagggcacgcgctgtgaggcgcccccccgccctcggctgggccctgctggggacttctctagggccgggcttgggtccgcgggtcggaccactcttggtaaggcgcggagaaacactccccgtcccaggtcccagagtcctcgagactaggcccgctttgcagggcctcctcggccccggaactaggttggccgttactgagttacgaggccgcgcacggctgtgtcctgagtccggggacagctctagaccacctcccccgccagtggtctcatcatttgcagtatctgggacggtgaggagactacagggggtgctgggcggaaccggagactctttaggcgtgtctcggtcctgtttgagaggcctaggcctcttccagggcgagtgggtgtgggtcgcgcaggcccgtgagtcgagcaatacgtctcagccacacctggcacgcgtgcaggtgctagaacctcgctgggacctaagtgatcgcttgggcccggggtcaggacccctgggggaacctttggcagatggactggccctcgtgcccgctaccctggccttcaatctgggttgtgacccgctggaaatgggggaactgagaatccagaggtatctggaagggagtatagctccggaggataaaggcagctgctctctcttgcccggtcctccttttgctagagagttgcacatagaaatcgtcagcagtccacactatagcacaaacgggaattacgacggagtgctttacaggcactttcagattccccgggtggtgcaggagggagacgttctgtgtgtgcccactatcggacaggtcgagatcctcgagggaagcccagaaaagctgccccgttggagggaaatgttcttcaaggtgaagaaaacagtaggggaggctccggatggacctgcttctgcctatctggcagatacgacccatacaagtctgtatatggtcggctccactcttagtcccgtcccttggttgccctcagaagaatccactctctggtccagtctgagccctcctggtttggaggcattggtttcagagttatgtgcagtccttaaacctcgcttacaacccgggggcgcgcttctcactgggaccagctccgtactactcagaggcccgcctgggtgtgggaaaactacagttgtggcagctgcttgtagccacctgggactccacctccttaaggtgccctgctctagcttgtgcgccgagtcttccggagctgtcgaaaccaaactgcaggctatttttagccgagcccgtcgatgccgccctgctgtattactcctgaccgctgtagacctgctcgggcgggacagggatggactgggcgaggacgctcgagtcatggcagtgttgaggcacctgctattgaacgaagaccccctcaattcctgtccacctttgatggtggtcgctacaacctcaagggcccaagacctgccagctgacgtgcagaccgcttttccacacgagctcgaagtccctgccctcagtgagggtcaacgactctccattttgcgggccctgactgcacacctgcccctcgggcaggaggtgaacctggcccagttggcacgtcggtgtgctggctttgtggtgggagatctgtatgcgctactgacccactcttcccgcgccgcgtgcacccgtatcaaaaacagtgggttggccggcgggttaacggaggaggacgagggggagctatgtgccgccgggttccccttactagccgaggactttggacaggcacttgagcagctgcaaactgcacattcccaggcggtcggggccccaaagattccctcagtctcctggcatgacgtgggcggcctccaggaagtcaagaaagaaattctggaaactatccagttgccactggaacatcctgagctgctgtcactcggtctcaggagaagtggtctcctgctgcatgggccacccggaactgggaaaacactcctagctaaggccgtggccacggagtgctcacttaccttcttgtcagtgaagggccccgagttaataaacatgtatgttggccagtccgaggagaatgtgcgagaagtcttcgctagagccagagccgccgccccttgtatcattttctttgacgagttggactccttggccccgagcagaggacgctccggagatagcggcggtgtcatggatcgcgttgtgtcccagctgttggccgagctcgatggactgcactctacacaggacgtctttgtgatcggggccaccaatagacctgacctactggaccccgcattgcttaggccaggccgttttgacaagctagtttttgtgggggccaatgaggatcgcgcctctcaacttagggtcctgtctgcaatcactcgtaagtttaaactcgagccttcggtgtccctcgtaaacgtgctcgattgctgtccgccacagctgaccggcgcagacctgtacagtctttgcagtgatgccatgacagcagccttgaagagaagagtgcatgatctagaggaagggttggaacctggctcttctgcacttatgcttactatggaggacctgctccaggcagccgcccggcttcagcctagcgttagcgaacaggaacttttaaggtacaagcgaattcagaggaaattcgccgcgtgctag

SEQ ID NO: 6115 - DNA, 2696 bp, Artificial Sequence
  derived and/or modified sequence
atggcgctggctgtcttgcgggtcctggagccctttccgaccgagacacccccgttggcagtgctgctgccacccgggggcccgtggccggcggcggagctgggcctggtgctggccctgaggcctgcaggggagagcccggcagggccggcgctgctggtggcagccctggaggggccggacgcgggcaccgaagagcagggtcccgggccgccgcagctactggttagccgcgcgctgctgcggctcctggcactgggctccggggcctgggtgcgggcgcgggcggtgcggcggcccccggcgctaggttgggcactgcttggcacctcgctggggcctgggctcggaccgcgagtcgggccgctgctggtgaggcgcggagagaccctcccagtgcccggaccgcgggtgctggagacgcggccggcgttgcaagggctgctgggcccagggactcggctggctgtgactgagctccgcgggcgggccagactgtgtccagagtctggggacagcagtcggcccccacccccgcccgtggtgtcctcctttgcggtttctggcacagtgcggcgactccagggagttctgggagggactggagattcactaggggtgagccggagctgtctccgtggccttggcctcttccagggcgaatgggtgtgggtggcccaggccagagagtcatcgaacacttcacagccgcacttggctagggtgcaggtcctagaacctcgctgggacctctctgatagactgggacccggctctggaccgctgggagagcccctcgctgacggactggcgcttgtccctgccactttggcttttaatcttggctgtgaccccctggaaatgggagagctcagaattcagaggtacttggaaggctccatcgcccctgaagacaaaggaagctgctcattgctgcctgggcctccatttgccagagagttacacatcgaaattgtgtcttctccccactacagcactaatggaaattatgacggtgttctttaccggcactttcagatacccagggtagtccaggaaggggatgttctatgtgtgccaacaattgggcaagtagagatcctggaaggaagtccagagaaactgcccaggtggcgggaaatgttttttaaagtgaagaaaacagttggggaagctccagatggaccagccagtgcctacttggccgacaccacccatacctccttgtacatggtgggttctaccctgagccctgttccatggctcccttcagaggaatccactctctggagcagtttgtctcctccaggcctggaggccttggtgtctgaactctgtgctgtcctgaagcctcgcctccagccagggggtgccctgctgacaggaactagcagtgtccttctacggggccccccaggctgtgggaagaccacagtagttgctgctgcctgtagtcaccttgggctccacttactgaaggtgccctgctccagcctctgtgcagaaagtagtggggctgtggagacaaaactgcaggccatcttctcccgggcccgccgttgccggcctgcagtcctgttgctcacagctgtggaccttctgggccgggaccgtgatgggctgggtgaggatgcccgtgtgatggctgtgctgcgtcacctcctcctcaatgaggaccccctcaacagctgccctcccctcatggttgtggccaccacaagccgggcccaggacctgcctgctgatgtgcagacagcatttcctcatgagctcgaggtgcctgctctgtcagaggggcagcggctcagcatcctgcgggccctcactgcccaccttcccctgggccaggaggtgaacttggcacagctagcacggcggtgtgcaggctttgtggtaggggatctctatgcccttctgacccacagcagccgggcagcctgcaccaggatcaagaactcaggtttggcaggtggcttgactgaggaggatgagggggagctgtgtgctgccggctttcctctcctggctgaggactttgggcaggcactggagcaactgcagacagctcactcccaggccgttggagcccccaaggtggagaccaagtccttggagtgtttgccagggccagggctgcagctccatgcattatcttctttgatgaactggactctttggccccaagccgggggcgaagtggagattctggaggagtgatggacagggtggtgtctcagctccttgccgagctagatgggctgcacagcactcaggatgtgtttgtgattggagccaccaacagaccagatctcctggaccctgcccttctgcggcctggcagatttgacaagctggtgtttgtgggggcaaatgaggaccgggcctcccagctacgcgttctaagtgccatcacacgcaaattcaagctagagccatctgtgagcctggtaaacgtgctagattgctgccctccccagctgacgggcgcggacctctactctctctgctctgatgctatgacagctgccctcaaacgcagggttcatgacctggaggaagggctggagccaggtagctcagcactgatgctcaccatggaggacttgctgcaggctgccgcccggctgcaaccctcagtcagtgagcaggagctgctccggtacaagcgcatccagcgcaagtttgctgcctgctag

SEQ ID NO: 6116 - DNA, 3478 bp, Artificial Sequence
  derived and/or modified sequence
acactagtcgtctggctctctggctccggaagctgcgctccttcaccctcctcgttggtgtcctgtcaccatggcgctggctgtcttgcgggtcctggagccctttccgaccgagacacccccgttggcagtgctgctgccacccgggggcccgtggccggcggcggagctgggcctggtgctggccctgaggcctgcaggggagagcccggcagggccggcgctgctggtggcagccctggaggggccggacgcgggcaccgaagagcagggtcccgggccgccgcagctactggttagccgcgcgctgctgcggctcctggcactgggctccggggcctgggtgcgggcgcgggcggtgcggcggcccccggcgctaggttgggcactgcttggcacctcgctggggcctgggctcggaccgcgagtcgggccgctgctggtgaggcgcggagagaccctcccagtgcccggaccgcgggtgctggagacgcggccggcgttgcaagggctgctgggcccagggactcggctggctgtgactgagctccgcgggcgggccagactgtgtccagagtctggggacagcagtcggcccccacccccgcccgtggtgtcctcctttgcggtttctggcacagtgcggcgactccagggagttctgggagggactggagattcactaggggtgagccggagctgtctccgtggccttggcctcttccagggcgaatgggtgtgggtggcccaggccagagagtcatcgaacacttcacagccgcacttggctagggtgcaggtcctagaacctcgctgggacctctctgatagactgggacccggctctggaccgctgggagagcccctcgctgacggactggcgcttgtccctgccactttggcttttaatcttggctgtgaccccctggaaatgggagagctcagaattcagaggtacttggaaggctccatcgcccctgaagacaaaggaagctgctcattgctgcctgggcctccatttgccagagagttacacatcgaaattgtgtcttctccccactacagcactaatggaaattatgacggtgttctttaccggcactttcagatacccagggtagtccaggaaggggatgttctatgtgtgccaacaattgggcaagtagagatcctggaaggaagtccagagaaactgcccaggtggcgggaaatgttttttaaagtgaagaaaacagttggggaagctccagatggaccagccagtgcctacttggccgacaccacccatacctccttgtacatggtgggttctaccctgagccctgttccatggctcccttcagaggaatccactctctggagcagtttgtctcctccaggcctggaggccttggtgtctgaactctgtgctgtcctgaagcctcgcctccagccagggggtgccctgctgacaggaactagcagtgtccttctacggggccccccaggctgtgggaagaccacagtagttgctgctgcctgtagtcaccttgggctccacttactgaaggtgccctgctccagcctctgtgcagaaagtagtggggctgtggagacaaaactgcaggccatcttctcccgggcccgccgttgccggcctgcagtcctgttgctcacagctgtggaccttctgggccgggaccgtgatgggctgggtgaggatgcccgtgtgatggctgtgctgcgtcacctcctcctcaatgaggaccccctcaacagctgccctcccctcatggttgtggccaccacaagccgggcccaggacctgcctgctgatgtgcagacagcatttcctcatgagctcgaggtgcctgctctgtcagaggggcagcggctcagcatcctgcgggccctcactgcccaccttcccctgggccaggaggtgaacttggcacagctagcacggcggtgtgcaggctttgtggtaggggatctctatgcccttctgacccacagcagccgggcagcctgcaccaggatcaagaactcaggtttggcaggtggcttgactgaggaggatgagggggagctgtgtgctgccggctttcctctcctggctgaggactttgggcaggcactggagcaactgcagacagctcactcccaggccgttggagcccccaagatcccctcagtgtcctggcatgatgtgggtgggctgcaggaggtgaagaaggagatcctggagaccattcagctccccctggagcaccctgagctactgagcctgggcctgagacgctcaggccttctgctccatgggccccctggcaccggcaagacccttctggccaaggcagtagccactgagtgcagccttaccttcctcagcgtgaaggggccagagctcattaacatgtatgtgggccaaagtgaggagaatgtgcgggaagtgtttgccagggccagggctgcagctccatgcattatcttctttgatgaactggactctttggccccaagccgggggcgaagtggagattctggaggagtgatggacagggtggtgtctcagctccttgccgagctagatgggctgcacagcactcaggatgtgtttgtgattggagccaccaacagaccagatctcctggaccctgcccttctgcggcctggcagatttgacaagctggtgtttgtgggggcaaatgaggaccgggcctcccagctacgcgttctaagtgccatcacacgcaaattcaagctagagccatctgtgagcctggtaaacgtgctagattgctgccctccccagctgacgggcgcggacctctactctctctgctctgatgctatgacagctgccctcaaacgcagggttcatgacctggaggaagggctggagccaggtagctcagcactgatgctcaccatggaggacttgctgcaggctgccgcccggctgcaaccctcagtcagtgagcaggagctgctccggtacaagcgcatccagcgcaagtttgctgcctgctaggagccccccagggtctgggaccccgctcagcatggctgcaggtaccttgatagcccacagagagatctgggaaggaagggctcctcctcaggctgctgccaacccacctggaggccacctccctccaggagatcccagggtgcaaagtggcattgagacagcagcaacagctcaagagatatctcctgcctacttgcccctccttccaggccggctctaagagaaaggcccatctactcaggaagagggccagggccttgggttctggggattgggccctgagagggctagttctgtggctgaaaataaagcatgtcccgccccctactggtgttgtggcatgaaaggttggagtgagaaagagcagggttgtgggaggagtaagccctgggagagggtgggggggtgggcagcatgggagcctgatccttctgacataaataaacacaatgcatgcaggaactg

SEQ ID NO: 6117 - DNA, 2217 bp, Artificial Sequence
  derived and/or modified sequence
atggccttagctgtgcttagggtgcttgagccatttcctactgaaacacctcctcttgcggtattgttaccacctggcggaccctggcctgccgctgaattaggcctcgtgctggctctgagacccgctggagaatcgccagccggaccagcccttctcgtggccgcactcgagggccctgatgctgggaccgaggaacaaggacccggtcctccccagcttttagtttcaagggcattgctcagacttcttgcacttgggtccggtgcctgggtccgagctcgggcagtgaggcggcctcctgctctggggtgggccctgttgggcacttcgttgggccctggtctgggtcctagggtgggcccactcctcgttcgtaggggagaaactctgccagtgcccggaccacgagtactagagacccgccctgccctccagggtctgttggggcctgggactagactggcagtcacggaactgcggggtcgggctcggctctgtcccgagtctggagacagttctagaccccctcccccaccagtggtgagctcttttgctgtcagtggcacagtgaggagacttcaaggcgttctggggggtacaggtgattccttaggtgtgtcacgctcttgtttgcggggtctaggtctgttccagggcgagtgggtttgggttgcccaggcaagagagtcatccaacacctcccagccccacttggcccgagtgcaggtgctggagccgagatgggatctgtcagaccgactaggaccgggatctggaccactgggggaaccactggctgatgggcttgccctggtgccagctacccttgccttcaatctggggtgcgatcctctggaaatgggagagctgcgcatccagcgctacttagagggttccatcgctcccgaggataagggctcctgtagcctcctgcctgggcctccttttgcacgcgagctgcacatcgagatcgtctcatcaccccactacagcacaaacggtaactacgatggggtgctctatcgccatttccagatacctcgcgttgtgcaggaaggcgatgtcctgtgcgtgcccactatcgggcaggtagaaattcttgagggctcacccgaaaaactgcctagatggcgcgagatgttttttaaagttaaaaagactgtgggtgaggctcccgatgggccagcctctgcctacttggcagatacgactcataccagcctctatatggttgggtccacactgtccccggttccatggctgcctagcgaagaatccacactgtggtcaagcctcagtccgccaggcctcgaagctctggtgagcgaactgtgtgccgtcctcaagcccaggctacaacctggtggggctctcctcacgggcaccagtagcgtcttgctcagaggccctccaggctgcggaaaaacaaccgtagtagccgcagcctgttcccaccttgggctgcatcttctgaaggtcccatgcagctctctctgcgctgagtcctccggcgcagtggaaacgaaactccaggctatcttctctagggctcggaggtgtcggcctgccgtgcttctgctgaccgccgtggacctgttgggaagggaccgtgatggactcggggaggacgcacgcgttatggcagtgttgagacacttacttcttaatgaagaccctttaaactcctgcccaccactcatggtggtggccacaactagtcgggctcaggatttgccagccgatgtgcaaaccgcattcccccacgaattggaagtgcctgcgcttagcgagggacagaggttaagtattcttcgggcactgacagcacacctccctctggggcaggaggtgaacctggctcaactggccagacgctgtgcaggatttgtcgttggtgacctgtacgcactactcactcacagcagcagggccgcatgcacacggatcaaaaacagcgggttggccggaggcctaaccgaagaggatgagggagaattgtgtgccgcaggctttcctctgttggctgaggattttggtcaggcactcgagcagctgcagacagcccacagccaggctgtgggagcgcctaaagtcgaaactaaatccctcgagtgcctgcctggtcccggacttcagctccacgctctgtccagtctgatgaactggaccttgtggccacaggctggtggcgaggttgagattttagaagaatag

SEQ ID NO: 6118 - DNA, 2943 bp, Artificial Sequence
  derived and/or modified sequence
atggccctcgcggtgctccgagtgctggagccattccctactgaaacgcctccactcgcggtgctgctccctcccggaggtccttggccggcagctgaactaggtcttgtgttagccctgagaccagcaggcgagtcccccgcaggacctgcactgttggtggcagccctggagggccctgatgcaggaacagaagaacaaggcccaggcccacctcagctgctggtgtctcgtgcacttctccgacttctggccctggggagtggggcatgggtccgcgctcgagcagtgcggagacccccagccctgggttgggccttgcttggtacatcccttggccctggtctggggccacgtgtggggccactgcttgtacggaggggtgagaccctgccagtgcctggacccagagtgctagaaaccaggcctgcgctccaagggttactcggacctggcactagactcgcagttactgagttaagggggcgagcccgtttgtgtccagaatctggggactcctctagacctcctccaccccctgtagtcagctctttcgccgtatcaggaactgtgcggaggctgcaaggcgtccttgggggtactggggactctctgggcgtgagtcggtcctgtctcagaggactcggactcttccagggcgaatgggtgtgggttgcacaagcccgtgaatcgagcaatacaagtcagcctcatttggccagagtgcaagtgctggagcccaggtgggacctctctgatcggctcggtccaggctccgggccactgggcgagccactggctgacgggctggccctggttccggctaccctcgctttcaatctggggtgtgatcccctggagatgggagaattacgtattcagcgttacttggagggctcaatcgcacctgaagacaaggggagctgtagtctcttacctggccctccatttgccagagagctacatatagagatagttagcagcccccactattccactaatggtaactacgacggcgtcctgtaccggcattttcagatccccagggtggttcaagaaggagacgtgctgtgtgtgcctacaattggacaagtcgagatcctggagggatcccctgaaaagttacccagatggagggaaatgttttttaaagtgaagaagacagtaggagaggctccggacgggccagcctctgcttacttagctgatacaacccataccagcctctacatggtggggtcaacccttagtcctgtgccctggctcccctctgaagagtcgaccttatggtcaagcctctcccccccaggcctcgaagccctcgtgtctgaactttgtgctgtgctgaaaccaaggctgcagcccggtggagctctgctcacagggacctcctcagtgctgctccggggtcctcctggatgtggcaagacaaccgttgttgcagccgcatgttcacacttggggttacacctgttaaaggtaccatgtagttccctgtgtgccgaatcgagcggagccgtggaaaccaaactgcaagccattttcagtagggctcggagatgcagacctgcggtgttgctcctcaccgccgtggacttactcggcagagaccgggacgggctgggggaggatgccagagtgatggcagttctgcggcacctcctgttaaacgaggatccgttgaacagttgtcctcctctaatggtcgtggctacaacaagtagggctcaggatttaccagccgacgtgcagacagctttcccacatgaactggaagtcccggctctgtctgaaggtcaacggctcagtatactgagagccttgaccgcccacttgcccttaggccaggaggtaaacctcgcacaactggcccgacggtgcgctggtttcgtggttggagatctttatgcactgctgactcacagcagcagagccgcatgcacccggatcaaaaattcgggattagccggagggctcaccgaggaagatgagggcgaattgtgtgcagcagggtttcccctgcttgctgaggactttggacaagccctggagcaactacagactgcccacagccaggccgttggcgctccaaagatcccaagcgtctcttggcacgatgtgggcggtcttcaggaggtgaaaaaggagatccttgaaactatacagcttccattagaacaccctgagctcctgtcactgggactccgtcgatccggtctgctgctgcacgggccaccaggcacaggaaagacattactggccaaagcagtcgccacagaatgcagtctcacgtttctgagcgttaaaggccctgaactgatcaacatgtatgtgggccagtcagaggagaacgtgagggaggtgtttgccagagccagggctgctgcaccctgcattattttcttcgacgagctggatagtctcgctccatccagaggacggagtggggacagtggaggtgtgatggaccgggtggtttcccaactattagccgaattggatggattacacagcacacaggacgtctttgtaataggtgccactaatcgacccgacctacttgatcctgccttattacgacccggtaggttcgacaagctggtgtttgttggggctaatgaggatcgggcatcccagcttagggtcctgtccgccatcactcggaaattcaagctcgagccatcagtaagcctggtgaacgtgctggactgctgccccccacagctgactggcgcagacctgtatagtctttgctctgacgccatgaccgcggcattgaagcgccgagtccacgacttggaggaagggctggaaccgggatcatccgcattaatgctgaccatggaagacctgctgcaagctgctgcacggttacagccatcagtaagcgagcaggagctcctacgctataagagaattcagcggaagtttgcagcatgctag

SEQ ID NO: 6119 - DNA, 2217 bp, Artificial Sequence
  derived and/or modified sequence
atggccctggccgtgctgagagtgctggagcccttccccaccgagaccccccccctggccgtgctgctgccccccggcggcccctggcccgccgccgagctgggcctggtgctggccctgagacccgccggcgagagccccgccggccccgccctgctggtggccgccctggagggccccgacgccggcaccgaggagcagggccccggccccccccagctgctggtgagcagagccctgctgagactgctggccctgggcagcggcgcctgggtgagagccagagccgtgagaagaccccccgccctgggctgggccctgctgggcaccagcctgggccccggcctgggccccagagtgggccccctgctggtgagaagaggcgagaccctgcccgtgcccggccccagagtgctggagaccagacccgccctgcagggcctgctgggccccggcaccagactggccgtgaccgagctgagaggcagagccagactgtgccccgagagcggcgacagcagcagacccccccccccccccgtggtgagcagcttcgccgtgagcggcaccgtgagaagactgcagggcgtgctgggcggcaccggcgacagcctgggcgtgagcagaagctgcctgagaggcctgggcctgttccagggcgagtgggtgtgggtggcccaggccagagagagcagcaacaccagccagccccacctggccagagtgcaggtgctggagcccagatgggacctgagcgacagactgggccccggcagcggccccctgggcgagcccctggccgacggcctggccctggtgcccgccaccctggccttcaacctgggctgcgaccccctggagatgggcgagctgagaatccagagatacctggagggcagcatcgcccccgaggacaagggcagctgcagcctgctgcccggcccccccttcgccagagagctgcacatcgagatcgtgagcagcccccactacagcaccaacggcaactacgacggcgtgctgtacagacacttccagatccccagagtggtgcaggagggcgacgtgctgtgcgtgcccaccatcggccaggtggagatcctggagggcagccccgagaagctgcccagatggagagagatgttcttcaaggtgaagaagaccgtgggcgaggcccccgacggccccgccagcgcctacctggccgacaccacccacaccagcctgtacatggtgggcagcaccctgagccccgtgccctggctgcccagcgaggagagcaccctgtggagcagcctgagcccccccggcctggaggccctggtgagcgagctgtgcgccgtgctgaagcccagactgcagcccggcggcgccctgctgaccggcaccagcagcgtgctgctgagaggcccccccggctgcggcaagaccaccgtggtggccgccgcctgcagccacctgggcctgcacctgctgaaggtgccctgcagcagcctgtgcgccgagagcagcggcgccgtggagaccaagctgcaggccatcttcagcagagccagaagatgcagacccgccgtgctgctgctgaccgccgtggacctgctgggcagagacagagacggcctgggcgaggacgccagagtgatggccgtgctgagacacctgctgctgaacgaggaccccctgaacagctgcccccccctgatggtggtggccaccaccagcagagcccaggacctgcccgccgacgtgcagaccgccttcccccacgagctggaggtgcccgccctgagcgagggccagagactgagcatcctgagagccctgaccgcccacctgcccctgggccaggaggtgaacctggcccagctggccagaagatgcgccggcttcgtggtgggcgacctgtacgccctgctgacccacagcagcagagccgcctgcaccagaatcaagaacagcggcctggccggcggcctgaccgaggaggacgagggcgagctgtgcgccgccggcttccccctgctggccgaggacttcggccaggccctggagcagctgcagaccgcccacagccaggccgtgggcgcccccaaggtggagaccaagagcctggagtgcctgcccggccccggcctgcagctgcacgccctgagcagcctgatgaactggaccctgtggccccaggccggcggcgaggtggagatcctggaggagtag

SEQ ID NO: 6120 - DNA, 2943 bp, Artificial Sequence
  derived and/or modified sequence
atggccctggccgtgctgagagtgctggagcccttccccaccgagaccccccccctggccgtgctgctgccccccggcggcccctggcccgccgccgagctgggcctggtgctggccctgagacccgccggcgagagccccgccggccccgccctgctggtggccgccctggagggccccgacgccggcaccgaggagcagggccccggccccccccagctgctggtgagcagagccctgctgagactgctggccctgggcagcggcgcctgggtgagagccagagccgtgagaagaccccccgccctgggctgggccctgctgggcaccagcctgggccccggcctgggccccagagtgggccccctgctggtgagaagaggcgagaccctgcccgtgcccggccccagagtgctggagaccagacccgccctgcagggcctgctgggccccggcaccagactggccgtgaccgagctgagaggcagagccagactgtgccccgagagcggcgacagcagcagacccccccccccccccgtggtgagcagcttcgccgtgagcggcaccgtgagaagactgcagggcgtgctgggcggcaccggcgacagcctgggcgtgagcagaagctgcctgagaggcctgggcctgttccagggcgagtgggtgtgggtggcccaggccagagagagcagcaacaccagccagccccacctggccagagtgcaggtgctggagcccagatgggacctgagcgacagactgggccccggcagcggccccctgggcgagcccctggccgacggcctggccctggtgcccgccaccctggccttcaacctgggctgcgaccccctggagatgggcgagctgagaatccagagatacctggagggcagcatcgcccccgaggacaagggcagctgcagcctgctgcccggcccccccttcgccagagagctgcacatcgagatcgtgagcagcccccactacagcaccaacggcaactacgacggcgtgctgtacagacacttccagatccccagagtggtgcaggagggcgacgtgctgtgcgtgcccaccatcggccaggtggagatcctggagggcagccccgagaagctgcccagatggagagagatgttcttcaaggtgaagaagaccgtgggcgaggcccccgacggccccgccagcgcctacctggccgacaccacccacaccagcctgtacatggtgggcagcaccctgagccccgtgccctggctgcccagcgaggagagcaccctgtggagcagcctgagcccccccggcctggaggccctggtgagcgagctgtgcgccgtgctgaagcccagactgcagcccggcggcgccctgctgaccggcaccagcagcgtgctgctgagaggcccccccggctgcggcaagaccaccgtggtggccgccgcctgcagccacctgggcctgcacctgctgaaggtgccctgcagcagcctgtgcgccgagagcagcggcgccgtggagaccaagctgcaggccatcttcagcagagccagaagatgcagacccgccgtgctgctgctgaccgccgtggacctgctgggcagagacagagacggcctgggcgaggacgccagagtgatggccgtgctgagacacctgctgctgaacgaggaccccctgaacagctgcccccccctgatggtggtggccaccaccagcagagcccaggacctgcccgccgacgtgcagaccgccttcccccacgagctggaggtgcccgccctgagcgagggccagagactgagcatcctgagagccctgaccgcccacctgcccctgggccaggaggtgaacctggcccagctggccagaagatgcgccggcttcgtggtgggcgacctgtacgccctgctgacccacagcagcagagccgcctgcaccagaatcaagaacagcggcctggccggcggcctgaccgaggaggacgagggcgagctgtgcgccgccggcttccccctgctggccgaggacttcggccaggccctggagcagctgcagaccgcccacagccaggccgtgggcgcccccaagatccccagcgtgagctggcacgacgtgggcggcctgcaggaggtgaagaaggagatcctggagaccatccagctgcccctggagcaccccgagctgctgagcctgggcctgagaagaagcggcctgctgctgcacggcccccccggcaccggcaagaccctgctggccaaggccgtggccaccgagtgcagcctgaccttcctgagcgtgaagggccccgagctgatcaacatgtacgtgggccagagcgaggagaacgtgagagaggtgttcgccagagccagagccgccgccccctgcatcatcttcttcgacgagctggacagcctggcccccagcagaggcagaagcggcgacagcggcggcgtgatggacagagtggtgagccagctgctggccgagctggacggcctgcacagcacccaggacgtgttcgtgatcggcgccaccaacagacccgacctgctggaccccgccctgctgagacccggcagattcgacaagctggtgttcgtgggcgccaacgaggacagagccagccagctgagagtgctgagcgccatcaccagaaagttcaagctggagcccagcgtgagcctggtgaacgtgctggactgctgccccccccagctgaccggcgccgacctgtacagcctgtgcagcgacgccatgaccgccgccctgaagagaagagtgcacgacctggaggagggcctggagcccggcagcagcgccctgatgctgaccatggaggacctgctgcaggccgccgccagactgcagcccagcgtgagcgagcaggagctgctgagatacaagagaatccagagaaagttcgccgcctgctag

SEQ ID NO: 6121 - protein, 323 aa, Artificial Sequence
  derived and/or modified sequence
MSAVCGGAARMLRTPGRHGYAAEFSPYLPGRLACATAQHYGIAGCGTLLILDPDEAGLRLFRSFDWNDGLFDVTWSENNEHVLITCSGDGSLQLWDTAKAAGPLQVYKEHAQEVYSVDWSQTRGEQLVVSGSWDQTVKLWDPTVGKSLCTFRGHESIIYSTIWSPHIPGCFASASGDQTLRIWDVKAAGVRIVIPAHQAEILSCDWCKYNENLLVTGAVDCSLRGWDLRNVRQPVFELLGHTYAIRRVKFSPFHASVLASCSYDFTVRFWNFSKPDSLLETVEHHTEFTCGLDFSLQSPTQVADCSWDETIKIYDPACLTIPA

SEQ ID NO: 6122 - protein, 280 aa, Artificial Sequence
  derived and/or modified sequence
MSAVCGGAARMLRTPGRHGYAAEFSPYLPGRLACATAQHYGIAGCGTLLILDPDEAGLRLFRSFDWNDGLFDVTWSENNEHVLITCSGDGSLQLWDTAKAAGPLQVYKEHAQEVYSVDWSQTRGEQLVVSGSWDQTVKLWDPTVGKSLCTFRGHESIIYSTIWSPHIPGCFASASGDQTLRIWDVKAAGVRIVIPAHQAEILSCDWCKYNENLLVTGAVDCSLRGWDLRNVRQPVFELLGHTYAIRRVKMESCPVTQTRSQLTATSAFWVQAVLLPQPTE

SEQ ID NO: 6123 - DNA, 972 bp, Artificial Sequence
  derived and/or modified sequence
atgagcgccgtctgtgggggcgcggctcgcatgctgagaacacccggccgacacgggtacgctgcggagttctctccatacttgcctgggcgtctcgcctgtgctaccgcgcagcactacggtatcgccggttgtggcacacttctaatcttggatccagacgaggcggggcttcgcctgtttagatcctttgactggaatgacggcttattcgacgtgacgtggtccgagaataacgaacatgtcctgataacatgctcaggcgacgggtctttacaactttgggataccgcaaaggccgctggtccacttcaagtgtataaagaacacgcccaggaagtgtactctgtggactggagtcaaaccaggggtgagcaacttgtcgtttctggatcatgggaccagaccgtcaaactgtgggatccaaccgtcgggaagtcactgtgtacatttcggggacacgaatccatcatatactcaactatctggagcccacatatccccggatgcttcgctagtgctagtggtgaccagacactcaggatctgggacgtaaaagccgctggtgttcgcatcgttattccggcccatcaggctgagatcctgtcctgcgattggtgtaagtacaatgaaaatctgctggtgacaggggctgttgattgctctctccgcggatgggatctgcgtaacgtgcgtcaacccgtgttcgagctcctgggacatacatatgccatacggcgggttaagttctctccattccatgcctctgttctggcttcttgctcatacgattttactgtgcgcttctggaacttctcaaaacccgactccttgctggaaacagtcgagcatcatactgagtttacctgcgggctcgatttctccctgcagtcccctacgcaggtggccgattgctcttgggacgaaactatcaaaatctatgaccccgcatgcctgacaatacctgcctag

SEQ ID NO: 6124 - DNA, 843 bp, Artificial Sequence
  derived and/or modified sequence
atgagcgccgtgtgtgggggggccgcaaggatgctgcggacacccggtaggcacggctacgctgctgagtttagtccatacctgcccggccgcttagcctgcgctactgcccagcactatgggatcgcgggatgcggcacattgttgatactcgacccagatgaagccggccttagactattcaggtcattcgactggaacgacggtctgtttgatgtgacgtggagcgagaacaacgagcacgtcctcataacctgtagcggggatggcagcctccagctttgggatacggcgaaggccgctggacccctccaggtttacaaggagcatgcccaggaggtgtattcagtcgattggtcgcagacgagaggcgagcagctcgtggtgagcggctcctgggaccagaccgtgaaactttgggaccccacagtaggtaagtctctttgcacctttcgtggccatgagtccatcatttactctacaatctggtcacctcatattcccggctgctttgctagcgcttccggcgaccagaccctcagaatttgggacgtgaaggcagccggcgttaggatcgtgatccccgcacaccaggctgagatcctgtcatgtgattggtgcaaatacaatgaaaacttgctagtgacaggagccgtagattgcagcctgcggggctgggacttgagaaacgtccggcagcccgtgtttgagctgttaggccacacctatgcaattcggagagtaaagatggagtcttgccccgtgacccagactaggtcgcagctgactgctacatccgctttttgggtgcaagcggttctgcttcctcagccaaccgaatag

SEQ ID NO: 6125 - DNA, 972 bp, Artificial Sequence
  derived and/or modified sequence
atgtctgctgtgtgtggcggggccgccaggatgctgcggaccccaggccgccacggctatgctgctgagttcagcccctacctgcccggccgcctggcctgtgccacagcccagcactacggcattgctggctgcggcaccctgctgatcctggaccctgatgaggccggcctgcggctcttccgcagctttgactggaatgatggcctgtttgatgtgacctggagcgaaaataatgaacatgtgctgatcacctgcagcggagatggcagcctgcagctgtgggacacagccaaggctgctggccccctgcaggtgtacaaggagcacgcccaggaggtgtacagcgtggactggagccagaccagaggagagcagctggtggtgtctggctcctgggaccagacagtgaagctgtgggaccccaccgtgggcaagagcctgtgcaccttccggggccacgagagcatcatctacagcaccatctggagcccccacatccctggctgctttgccagcgccagcggggaccagaccctgcgcatctgggatgtgaaggccgccggcgtgcgcatcgtcatcccagcccaccaggccgagatcctgagctgtgactggtgcaagtacaatgaaaacctgctggtgactggagctgtggactgcagcctgcggggctgggacctgagaaatgtgcggcagcctgtgtttgagctgctgggccacacctacgccatccggcgggtgaagttcagccccttccacgcctctgtgctggccagctgcagctatgacttcaccgtgcgcttctggaacttcagcaagccagacagcctgctggagaccgtggagcaccacacagagttcacctgtggcctggacttcagcctgcagagccccacccaggtggccgactgctcctgggatgagaccatcaagatctatgaccctgcctgcctgaccatcccagcctag

SEQ ID NO: 6126 - DNA, 843 bp, Artificial Sequence
  derived and/or modified sequence
atgtctgctgtgtgtggcggggccgccaggatgctgcggaccccaggccgccacggctatgctgctgagttcagcccctacctgcccggccgcctggcctgtgccacagcccagcactacggcattgctggctgcggcaccctgctgatcctggaccctgatgaggccggcctgcggctcttccgcagctttgactggaatgatggcctgtttgatgtgacctggagcgaaaataatgaacatgtgctgatcacctgcagcggagatggcagcctgcagctgtgggacacagccaaggctgctggccccctgcaggtgtacaaggagcacgcccaggaggtgtacagcgtggactggagccagaccagaggagagcagctggtggtgtctggctcctgggaccagacagtgaagctgtgggaccccaccgtgggcaagagcctgtgcaccttccggggccacgagagcatcatctacagcaccatctggagcccccacatccctggctgctttgccagcgccagcggggaccagaccctgcgcatctgggatgtgaaggccgccggcgtgcgcatcgtcatcccagcccaccaggccgagatcctgagctgtgactggtgcaagtacaatgaaaacctgctggtgactggagctgtggactgcagcctgcggggctgggacctgagaaatgtgcggcagcctgtgtttgagctgctgggccacacctacgccatccggcgggtgaagatggagagctgccctgtgacccagaccaggagccagctgacagccaccagcgccttctgggtgcaggccgtgctgctgccccagcccacagaatag

SEQ ID NO: 6127 - DNA, 972 bp, Artificial Sequence
  derived and/or modified sequence
atgagcgccgtgtgcggcggcgccgcccggatgctgcggacccccggtcggcacggctatgccgctgagttttccccttatctacctggtcggctcgcctgcgctaccgctcagcactatggaatcgctggttgtggcactctgctgatactcgatccggatgaggccggactgcgactgtttcgtagctttgactggaacgatgggctgttcgatgtcacctggagcgagaacaatgaacacgttctgattacttgttccggggacggcagcctacaactgtgggacactgccaaagccgcaggtccgctccaagtgtacaaagaacacgcacaagaagtatacagtgtggactggagtcagacccggggggaacaactggtggtgtccggctcctgggaccagactgttaagctgtgggatcccaccgtgggaaaatctctctgcacattcaggggacatgaaagtattatctatagcacaatttggtctccgcacatcccaggttgtttcgcgtctgcaagtggcgatcagacgttgcggatttgggatgtgaaagccgctggcgtgcgaatagtaataccagcccatcaggcagaaattttgagctgcgactggtgcaaatataacgagaatcttcttgtcacaggcgccgtggattgtagcttaagaggctgggacctaaggaacgtgagacagccagtttttgagctgctgggtcatacctatgccatcaggagggtcaagtttagcccgtttcatgccagcgttcttgcctcgtgttcatacgatttcacagtgcggttttggaacttttctaaaccagacagtctactagagactgtcgagcaccacacggaattcacatgtgggttagacttttctctgcagagccctactcaagtagctgattgtagttgggacgaaaccatcaagatctatgaccccgcatgcctcactatacccgcctag

SEQ ID NO: 6128 - DNA, 843 bp, Artificial Sequence
  derived and/or modified sequence
atgagcgccgtgtgcggcggcgccgcccggatgctgcggacccccggccggcacggatatgcagctgagtttagcccttatctgcctggccgccttgcctgcgccaccgcccagcactacgggatcgcgggctgtggaaccctgttgatcctcgatcccgatgaagccggcttgcgcctattccgcagcttcgattggaatgacggcttgtttgatgtgacctggtctgaaaacaacgaacacgtcttaatcacatgcagcggcgacgggtccctccagctgtgggacaccgctaaggccgccggcccactgcaggtctacaaagaacacgcccaggaggtgtacagcgtggattggtctcagactcggggtgagcagcttgttgtgtctgggagctgggaccagactgtaaagctctgggatccaacagtgggcaagtccctctgcacgttcaggggacatgagagcatcatatactcaaccatttggtcccctcacatacctggatgctttgccagcgcttcaggggaccaaaccctgcggatatgggacgtgaaagccgcaggtgtgaggatcgtaatccccgcccatcaggctgagatcctaagctgtgactggtgcaagtacaacgaaaatcttctggtgaccggcgccgttgactgttccctccgtggttgggacctgcgcaacgttcgccaaccagtgtttgaactcctgggccatacttacgcaataagaagggtaaagatggagtcttgcccagtgacacaaacaaggagccagctgaccgcaacgagcgccttctgggtacaggccgtgttgcttccgcaacctactgaatag

SEQ ID NO: 6129 - DNA, 1448 bp, Artificial Sequence
  derived and/or modified sequence
tctctctaaccgcgccagtgtgcctccgactcggaacggcttccgcggccggggcagcgagggccgggggcggcgggcgggatgagtgcggtgtgcggtggagcggcgcggatgctgcggacgccgggacgccacggctacgccgccgagttctccccgtacctgccgggccgcctggcctgcgccaccgcgcagcactacggcatcgcgggctgtggaaccctactaatattggatccagatgaagctgggctaaggctttttagaagctttgactggaatgatggtttgtttgatgtgacttggagtgagaacaacgaacatgtcctcatcacctgtagtggcgatggctcgctgcagctctgggacactgccaaagctgcagggccactgcaagtctataaagaacacgctcaggaggtgtatagtgttgattggagccaaaccagaggtgaacagcttgtggtgtctggctcatgggatcaaactgtcaaattgtgggatccaactgttggaaagtctctgtgcacctttagaggccatgaaagtattatttatagcacaatctggtctccccacatccctggttgttttgcttcagcctcaggtgatcagactctgagaatatgggatgtgaaggcagcaggagtaagaatcgtgattcctgcacatcaggcagaaatcttgagttgtgactggtgtaaatacaatgagaatttgctggtgaccggggcggttgactgtagtttgagaggctgggacttaaggaatgtacgacaaccagtgtttgaacttcttggtcatacctatgctattaggagggtgaaattttcaccatttcatgcttctgtgctggcctcttgctcgtatgattttactgtaagattctggaacttttcaaagcctgactctcttcttgaaacagtggagcatcatacagagtttacttgtggtttagacttcagtcttcagagccccactcaggtggctgactgttcttgggatgaaacaataaagatctatgaccctgcttgtcttactattcctgcttgagatacactactttggtcagaaacagaggatgttggctgaagaactgcctaacagcaaataaattaactatggaaaacatagacattatgcttttatatgctattcagatttcaaatctttccaatttaccctggaatcagttttgagggagctgataaagactttagctgactcgttaagcctgatacataagccatatttaaaattctaagaaataattaatgttatgatatatcttgtagtatctattaaaatgtctctgggtcataaaatggattaaaatatgggagatcagtaggttatacttatatagatagtgatatatttcatttttaatttgtcatttttgatgtaaaatataatcactgctgtgataaataaactatctattgatc

SEQ ID NO: 6130 - DNA, 1539 bp, Artificial Sequence
  derived and/or modified sequence
cctggtctctctaaccgcgccagtgtgcctccgactcggaacggcttccgcggccggggcagcgagggccgggggcggcgggcgggatgagtgcggtgtgcggtggagcggcgcggatgctgcggacgccgggacgccacggctacgccgccgagttctccccgtacctgccgggccgcctggcctgcgccaccgcgcagcactacggcatcgcgggctgtggaaccctactaatattggatccagatgaagctgggctaaggctttttagaagctttgactggaatgatggtttgtttgatgtgacttggagtgagaacaacgaacatgtcctcatcacctgtagtggcgatggctcgctgcagctctgggacactgccaaagctgcagggccactgcaagtctataaagaacacgctcaggaggtgtatagtgttgattggagccaaaccagaggtgaacagcttgtggtgtctggctcatgggatcaaactgtcaaattgtgggatccaactgttggaaagtctctgtgcacctttagaggccatgaaagtattatttatagcacaatctggtctccccacatccctggttgttttgcttcagcctcaggtgatcagactctgagaatatgggatgtgaaggcagcaggagtaagaatcgtgattcctgcacatcaggcagaaatcttgagttgtgactggtgtaaatacaatgagaatttgctggtgaccggggcggttgactgtagtttgagaggctgggacttaaggaatgtacgacaaccagtgtttgaacttcttggtcatacctatgctattaggagggtgaaaatggagtcttgccctgtcacccagacacgatctcagctcactgcaacctctgccttctgggttcaagctgttctcctgcctcagcctactgagtagctgggactacagttttcaccatttcatgcttctgtgctggcctcttgctcgtatgattttactgtaagattctggaacttttcaaagcctgactctcttcttgaaacagtggagcatcatacagagtttacttgtggtttagacttcagtcttcagagccccactcaggtggctgactgttcttgggatgaaacaataaagatctatgaccctgcttgtcttactattcctgcttgagatacactactttggtcagaaacagaggatgttggctgaagaactgcctaacagcaaataaattaactatggaaaacatagacattatgcttttatatgctattcagatttcaaatctttccaatttaccctggaatcagttttgagggagctgataaagactttagctgactcgttaagcctgatacataagccatatttaaaattctaagaaataattaatgttatgatatatcttgtagtatctattaaaatgtctctgggtcataaaatggattaaaatatgggagatcagtaggttatacttatatagatagtgatatatttcatttttaatttgtcatttttgatgtaaaatataatcactgctgtg

SEQ ID NO: 6131 - DNA, 972 bp, Artificial Sequence
  derived and/or modified sequence
atgtccgcagtatgtggaggggctgccagaatgttacggacaccgggacgccacggctacgcggcagagttcagcccttacctgcccggacgtcttgcttgtgccacagctcagcactatggcattgctggatgtggaaccctgctgatcttggaccccgatgaggccggactgcgcctcttccggtccttcgattggaacgatggccttttcgatgtgacctggtcagagaacaatgagcatgtactcatcacttgttccggcgatgggtcactacaactgtgggatacagcaaaagccgctgggccacttcaggtgtataaagaacatgcacaggaggtgtattctgtggactggagtcagactcggggtgaacagttagtagtctcgggttcctgggaccagaccgtgaagctgtgggaccctaccgtcggtaaaagtctctgtacattccgcggacacgagagtattatttactcaaccatctggtccccacacatacctggttgttttgccagcgcatcgggcgatcagaccctgagaatctgggatgtaaaggctgctggtgtccgaatcgttattcctgctcatcaagctgagattctgtcctgcgactggtgtaagtacaatgagaatttactggtcacaggcgctgttgattgctccctgagggggtgggatcttaggaatgtgaggcagcccgtgtttgagctcctgggccatacctatgccatcaggcgggtgaagttttctccattccatgcatcggtgttggcttcctgctcttacgacttcaccgtgcgcttctggaacttttctaagcccgattcactgctggagacagtggagcaccacacggaatttacctgtgggcttgattttagcctgcagagtccgacccaggtcgctgactgctcgtgggacgagacgatcaagatctacgatcccgcatgtctaaccattcccgcttag

SEQ ID NO: 6132 - DNA, 843 bp, Artificial Sequence
  derived and/or modified sequence
atgtctgctgtttgtggcggtgctgctcgaatgctgcgaactcctgggaggcacggctatgcagctgagttctctccttatctgcctggaagactggcctgcgctacagcgcaacattacggcatcgcaggttgcggaacattactgatacttgaccctgatgaagctggcttgcgacttttcaggtcattcgactggaacgatgggctattcgatgttacgtggtccgagaataacgagcacgtgttgattacatgctcgggcgatggatctctccagctgtgggatacagccaaggccgctggccctctgcaggtctacaaggagcacgcacaggaagtgtattcagtggattggtcacagacgcgcggtgagcagctcgtagtgtccggatcctgggaccagactgtaaagttatgggatcccacagtgggcaagagcctatgcaccttccggggacacgaatccataatttactccacaatttggagcccccatattcctgggtgcttcgcctctgcaagtggggatcagactttacggatttgggatgttaaagcagcgggagtgcgtattgtgatcccggcacatcaggccgaaatcctgagctgcgactggtgtaagtacaatgagaacttgctggtcacgggtgctgtggattgttcccttcgaggatgggacctgcgcaatgttcgccaaccggtcttcgagctgcttggtcacacctacgcaattaggcgcgtgaagatggagagctgccccgtgacccagacccggtcacagctgacggctaccagcgcgttttgggttcaggcagtgcttctaccacagcctacagagtag

SEQ ID NO: 6133 - DNA, 972 bp, Artificial Sequence
  derived and/or modified sequence
atgagcgccgtgtgcggcggcgccgccagaatgctgagaacccccggcagacacggctacgccgccgagttcagcccctacctgcccggcagactggcctgcgccaccgcccagcactacggcatcgccggctgcggcaccctgctgatcctggaccccgacgaggccggcctgagactgttcagaagcttcgactggaacgacggcctgttcgacgtgacctggagcgagaacaacgagcacgtgctgatcacctgcagcggcgacggcagcctgcagctgtgggacaccgccaaggccgccggccccctgcaggtgtacaaggagcacgcccaggaggtgtacagcgtggactggagccagaccagaggcgagcagctggtggtgagcggcagctgggaccagaccgtgaagctgtgggaccccaccgtgggcaagagcctgtgcaccttcagaggccacgagagcatcatctacagcaccatctggagcccccacatccccggctgcttcgccagcgccagcggcgaccagaccctgagaatctgggacgtgaaggccgccggcgtgagaatcgtgatccccgcccaccaggccgagatcctgagctgcgactggtgcaagtacaacgagaacctgctggtgaccggcgccgtggactgcagcctgagaggctgggacctgagaaacgtgagacagcccgtgttcgagctgctgggccacacctacgccatcagaagagtgaagttcagccccttccacgccagcgtgctggccagctgcagctacgacttcaccgtgagattctggaacttcagcaagcccgacagcctgctggagaccgtggagcaccacaccgagttcacctgcggcctggacttcagcctgcagagccccacccaggtggccgactgcagctgggacgagaccatcaagatctacgaccccgcctgcctgaccatccccgcctag

SEQ ID NO: 6134 - DNA, 843 bp, Artificial Sequence
  derived and/or modified sequence
atgagcgccgtgtgcggcggcgccgccagaatgctgagaacccccggcagacacggctacgccgccgagttcagcccctacctgcccggcagactggcctgcgccaccgcccagcactacggcatcgccggctgcggcaccctgctgatcctggaccccgacgaggccggcctgagactgttcagaagcttcgactggaacgacggcctgttcgacgtgacctggagcgagaacaacgagcacgtgctgatcacctgcagcggcgacggcagcctgcagctgtgggacaccgccaaggccgccggccccctgcaggtgtacaaggagcacgcccaggaggtgtacagcgtggactggagccagaccagaggcgagcagctggtggtgagcggcagctgggaccagaccgtgaagctgtgggaccccaccgtgggcaagagcctgtgcaccttcagaggccacgagagcatcatctacagcaccatctggagcccccacatccccggctgcttcgccagcgccagcggcgaccagaccctgagaatctgggacgtgaaggccgccggcgtgagaatcgtgatccccgcccaccaggccgagatcctgagctgcgactggtgcaagtacaacgagaacctgctggtgaccggcgccgtggactgcagcctgagaggctgggacctgagaaacgtgagacagcccgtgttcgagctgctgggccacacctacgccatcagaagagtgaagatggagagctgccccgtgacccagaccagaagccagctgaccgccaccagcgccttctgggtgcaggccgtgctgctgccccagcccaccgagtag

SEQ ID NO: 6135 - protein, 253 aa, Artificial Sequence
  derived and/or modified sequence
MATHRLVMVRHGESTWNQENRFCGWFDAELSEKGTEEAKRGAKAIKDAKMEFDICYTSVLKRAIRTLWAILDGTDQMWLPVVRTWRLNERHYGGLTGLNKAETAAKHGEEQVKIWRRSFDIPPPPMDEKHPYYNSISKERRYAGLKPGELPTCESLKDTIARALPFWNEEIVPQIKAGKRVLIAAHGNSLRGIVKHLEGMSDQAIMELNLPTGIPIVYELNKELKPTKPMQFLGDEETVRKAMEAVAAQGKAK

SEQ ID NO: 6136 - DNA, 762 bp, Artificial Sequence
  derived and/or modified sequence
atggctacgcatcgcctggttatggttcgccacggcgagtctacctggaaccaggagaacagattctgtgggtggttcgatgctgagctctcagagaaagggacagaagaggccaaacggggcgccaaggccataaaggatgccaaaatggagtttgacatatgctatacatctgtcctgaagagggccataagaactctgtgggccattttggacggcaccgaccagatgtggctgcccgtcgtgaggacttggcgtctaaatgagaggcattacggcggacttaccggacttaataaggccgaaacggctgcaaagcacggagaagagcaggtgaaaatatggcgccgttcctttgatatcccacctccacctatggatgagaagcacccctactataacagtatttctaaagagaggcgatatgccggactcaaacctggtgaactcccaacttgcgaatctctcaaggacactatcgctagagccctgcctttttggaatgaggaaatcgtcccacagattaaggcagggaaacgcgttctcattgcagcccatggcaactcactgcggggaatcgtaaagcacctggaggggatgtctgatcaggcaataatggagttaaatctgcccacaggaatcccaattgtatacgagctgaataaggaactcaaacctactaaacccatgcaatttttgggcgacgaggagaccgtgagaaaggcgatggaggctgtcgcggcccaagggaaagctaagtag

SEQ ID NO: 6137 - DNA, 762 bp, Artificial Sequence
  derived and/or modified sequence
atggccacccaccggctggtgatggtgagacatggagagagcacctggaaccaggagaaccgcttctgtggctggtttgatgctgagctgtctgagaagggcacagaggaggccaagagaggagccaaggccatcaaggatgccaagatggagtttgacatctgctacacctctgtgctgaagagggccatccgcaccctgtgggccatcctggatggaacagaccagatgtggctgcctgtggtgaggacctggaggctgaatgaaagacactacggcggcctgaccggcctgaacaaggccgagacagctgccaagcatggagaggagcaggtgaagatctggaggaggagctttgacatccccccaccacccatggatgagaagcacccctactacaacagcatcagcaaggagcggcgctatgccggcctgaagccaggagagctgcccacctgtgagagcctgaaggacaccatcgcccgggccctgcccttctggaatgaggagatcgtgccccagatcaaggccggcaagagggtgctgattgctgcccacggcaacagcctgcggggcatcgtgaagcacctggagggcatgtctgaccaggccatcatggagctgaacctgcccaccggcatccccatcgtgtatgagctgaacaaggagctgaagcccaccaagcccatgcagttcctgggagatgaggagaccgtgaggaaggccatggaggccgtggccgcccagggcaaggccaagtag

SEQ ID NO: 6138 - DNA, 762 bp, Artificial Sequence
  derived and/or modified sequence
atggccacccaccggctggtgatggtgcggcacggcgagagcacctggaatcaggagaacagattctgtggctggttcgacgccgaattatcggagaagggaacagaggaagctaagaggggggccaaagccattaaggacgctaagatggagttcgacatttgttataccagtgtgttaaaacgggctattaggacgctctgggcaatcctggatggcactgaccagatgtggttgcccgtggtgagaacctggagactgaacgaaagacactacggggggctcacaggcctgaacaaggcagaaacagccgctaaacacggcgaggaacaagttaagatatggcggagatcattcgatatcccccccccacctatggacgagaagcacccctactacaacagtatcagtaaagagcggcggtatgcaggactgaaacctggcgagctacccacctgtgagagccttaaggatacaatcgcccgcgccctccccttctggaatgaagaaatagtcccccagataaaagctggaaagagagtcttaatcgcagcccatggtaatagcttgagaggtattgtcaaacacctggagggtatgtccgaccaggccatcatggaattaaaccttcctactggtatcccgatcgtctacgagcttaacaaggagcttaaacctacaaaacccatgcaattcctgggcgacgaggagactgtacgcaaagccatggaagcagtggcagcacaaggaaaggctaaatag

SEQ ID NO: 6139 - DNA, 857 bp, Artificial Sequence
  derived and/or modified sequence
gggagtgttgggaagcagccgtccccgtccagagtcctctgtggtccctgctgccaccatggccactcaccgcctcgtgatggtccggcacggcgagagcacatggaaccaggagaaccgtttctgtggctggttcgatgcagagctgagtgaaaaggggaccgaggaggccaagcggggagccaaggccatcaaggatgccaagatggagtttgacatctgctacacgtcagtgctgaagcgggccatccgcaccctctgggccatcctggacggcacggaccagatgtggctgcctgtggtgcgcacttggcgcctcaatgagcggcattacgggggcctcacaggcctcaacaaggcagaaacggccgccaagcacggggaggagcaggtgaagatctggaggcgctccttcgacatcccgccgcccccgatggacgagaagcacccctactacaactccattagcaaggagcgtcggtacgcaggcctgaagcccggggaactccccacctgcgagagcctcaaggacaccattgcccgggccctgcccttctggaacgaggagattgttccccagatcaaggccggcaagcgagtgctcattgcagcccacgggaacagcctgcggggcattgtcaagcacctggaagggatgtcagaccaggcgatcatggagctgaacctgcccacggggatccccattgtgtatgagctgaacaaggagctgaagcccaccaagcccatgcagttcctgggtgatgaggaaacggtgcggaaggccatggaggctgtggctgcccagggcaaggccaagtgaggggtgggcttgggcaataaaggcacctcccccaaca

SEQ ID NO: 6140 - DNA, 762 bp, Artificial Sequence
  derived and/or modified sequence
atggcgactcaccgcctcgtgatggtccggcatggggaaagcacctggaaccaggagaaccgattctgcgggtggtttgatgccgaactgagcgagaaaggaaccgaggaggctaaacgcggtgctaaagcgatcaaggatgctaaaatggagttcgacatctgctatacctccgtgctaaaacgggcaattcgaacactgtgggccattttggatgggaccgatcagatgtggctccccgtcgtgagaacttggaggctgaacgaacggcactatggcggactgacaggcttaaataaagccgaaacagcagctaaacacggtgaggaacaagttaagatatggcggcgttcattcgatatacctccgcctcccatggacgagaagcatccatattacaactccattagcaaggaacggcgttatgccggactaaagcccggagaacttcctacctgcgagtccctgaaagacaccatcgcacgtgccctcccgttctggaatgaggaaattgttccacagatcaaggctgggaaaagggtactcatcgctgctcatggaaactctctcagaggcattgtcaagcacctggagggcatgtctgatcaagccatcatggaactcaatctgccaaccggcattccaattgtgtacgagctgaataaggagcttaagcccaccaagcctatgcagtttctgggcgacgaggagaccgttcggaaggccatggaggctgtcgccgctcaaggcaaggccaagtag

SEQ ID NO: 6141 - DNA, 762 bp, Artificial Sequence
  derived and/or modified sequence
atggccacccacagactggtgatggtgagacacggcgagagcacctggaaccaggagaacagattctgcggctggttcgacgccgagctgagcgagaagggcaccgaggaggccaagagaggcgccaaggccatcaaggacgccaagatggagttcgacatctgctacaccagcgtgctgaagagagccatcagaaccctgtgggccatcctggacggcaccgaccagatgtggctgcccgtggtgagaacctggagactgaacgagagacactacggcggcctgaccggcctgaacaaggccgagaccgccgccaagcacggcgaggagcaggtgaagatctggagaagaagcttcgacatcccccccccccccatggacgagaagcacccctactacaacagcatcagcaaggagagaagatacgccggcctgaagcccggcgagctgcccacctgcgagagcctgaaggacaccatcgccagagccctgcccttctggaacgaggagatcgtgccccagatcaaggccggcaagagagtgctgatcgccgcccacggcaacagcctgagaggcatcgtgaagcacctggagggcatgagcgaccaggccatcatggagctgaacctgcccaccggcatccccatcgtgtacgagctgaacaaggagctgaagcccaccaagcccatgcagttcctgggcgacgaggagaccgtgagaaaggccatggaggccgtggccgcccagggcaaggccaagtag

SEQ ID NO: 6142 - protein, 17 aa, Artificial Sequence
  derived and/or modified sequence
ALESPERPFLAILGGAK

SEQ ID NO: 6143 - protein, 417 aa, Artificial Sequence
  derived and/or modified sequence
MSLSNKLTLDKLDVKGKRVVMRVDFNVPMKNNQITNNQRIKAAVPSIKFCLDNGAKSVVLMSHLGRPDGVPMPDKYSLEPVAVELKSLLGKDVLFLKDCVGPEVEKACANPAAGSVILLENLRFHVEEEGKGKDASGNKVKAEPAKIEAFRASLSKLGDVYVNDAFGTAHRAHSSMVGVNLPQKAGGFLMKKELNYFAKALESPERPFLAILGGAKVADKIQLINNMLDKVNEMIIGGGMAFTFLKVLNNMEIGTSLFDEEGAKIVKDLMSKAEKNGVKITLPVDFVTADKFDENAKTGQATVASGIPAGWMGLDCGPESSKKYAEAVTRAKQIVWNGPVGVFEWEAFARGTKALMDEVVKATSRGCITIIGGGDTATCCAKWNTEDKVSHVSTGGGASLELLEGKVLPGVDALSNI

SEQ ID NO: 6144 - protein, 281 aa, Artificial Sequence
  derived and/or modified sequence
MSLSNKLTLDKLDVKGKRVVMRVDFNVPMKNNQITNNQRIKAAVPSIKFCLDNGAKSVVLMSHLGRPDGRPFLAILGGAKVADKIQLINNMLDKVNEMIIGGGMAFTFLKVLNNMEIGTSLFDEEGAKIVKDLMSKAEKNGVKITLPVDFVTADKFDENAKTGQATVASGIPAGWMGLDCGPESSKKYAEAVTRAKQIVWNGPVGVFEWEAFARGTKALMDEVVKATSRGCITIIGGGDTATCCAKWNTEDKVSHVSTGGGASLELLEGKVLPGVDALSNI

SEQ ID NO: 6145 - protein, 242 aa, Artificial Sequence
  derived and/or modified sequence
MVGVNLPQKAGGFLMKKELNYFAKALESPERPFLAILGGAKVADKIQLINNMLDKVNEMIIGGGMAFTFLKVLNNMEIGTSLFDEEGAKIVKDLMSKAEKNGVKITLPVDFVTADKFDENAKTGQATVASGIPAGWMGLDCGPESSKKYAEAVTRAKQIVWNGPVGVFEWEAFARGTKALMDEVVKATSRGCITIIGGGDTATCCAKWNTEDKVSHVSTGGGASLELLEGKVLPGVDALSNI

SEQ ID NO: 6146 - protein, 389 aa, Artificial Sequence
  derived and/or modified sequence
MKNNQITNNQRIKAAVPSIKFCLDNGAKSVVLMSHLGRPDGVPMPDKYSLEPVAVELKSLLGKDVLFLKDCVGPEVEKACANPAAGSVILLENLRFHVEEEGKGKDASGNKVKAEPAKIEAFRASLSKLGDVYVNDAFGTAHRAHSSMVGVNLPQKAGGFLMKKELNYFAKALESPERPFLAILGGAKVADKIQLINNMLDKVNEMIIGGGMAFTFLKVLNNMEIGTSLFDEEGAKIVKDLMSKAEKNGVKITLPVDFVTADKFDENAKTGQATVASGIPAGWMGLDCGPESSKKYAEAVTRAKQIVWNGPVGVFEWEAFARGTKALMDEVVKATSRGCITIIGGGDTATCCAKWNTEDKVSHVSTGGGASLELLEGKVLPGVDALSNI

SEQ ID NO: 6147 - DNA, 1254 bp, Artificial Sequence
  derived and/or modified sequence
atgtccctgtccaacaagcttacccttgacaagctcgatgtcaaaggcaagcgtgtcgtgatgcgggtcgacttcaacgttcccatgaagaataaccagattactaacaaccagaggattaaagctgccgtgcctagcattaaattttgtctcgacaatggagcaaagtctgtggtcctcatgagtcacctcgggcggcctgatggagtgcccatgcccgacaagtactcattggagccggtggccgtcgaactgaagtcacttttgggcaaagatgtcctcttccttaaagattgcgttggtcccgaggtggaaaaagcttgcgctaaccctgcagcgggtagtgtcatcctcttggaaaatctaaggtttcacgtagaagaggagggcaaagggaaggacgcatctgggaacaaggtgaaagccgaacctgccaagatcgaggcctttcgggcctccctctcaaagctgggcgacgtttacgtgaacgacgcattcgggaccgctcaccgtgcacattcctcaatggtgggagtgaatctcccgcagaaagctggcggatttctgatgaagaaagagctgaattattttgccaaggcgctcgagagccctgaaaggcccttcctggcaatcctgggcggggccaaggttgctgacaaaatacagctcattaacaatatgctggataaggttaatgagatgatcataggcggcggtatggcctttaccttcttgaaagtactgaataacatggaaattggcacatctctgttcgatgaggagggggcgaagatcgtgaaggatttgatgagcaaggccgagaagaacggagtgaagattacactcccggtcgattttgtcaccgccgacaagtttgacgagaacgccaaaaccgggcaggcgacagtggcctctgggatcccagccggatggatgggattagattgtggacccgaatcctctaagaagtatgctgaagctgtcactagagcaaaacagatcgtgtggaatggtccagtgggcgtgttcgagtgggaagcattcgcacgggggaccaaagccctgatggatgaggtcgtgaaagccacctcacgaggatgtattaccattataggcggcggggacacagccacatgctgtgcaaaatggaacactgaggacaaggtgtctcatgtcagtacaggcgggggagcatcattggaactgcttgagggaaaggtgctgccaggagtggatgctttgagcaatatctag

SEQ ID NO: 6148 - DNA, 846 bp, Artificial Sequence
  derived and/or modified sequence
atgtcactctctaataaactcactctggacaagttggacgttaaaggaaaacgcgtggtcatgagagtcgatttcaatgtgccaatgaagaataatcagatcactaacaaccaaagaataaaggctgccgtccctagcatcaagttctgcctggacaacggagcaaaatcagtcgtcctgatgagccacctgggccgacccgacggccggccctttctggcgatattggggggcgcgaaagtagcagacaaaatccagttgattaacaacatgctcgacaaggtaaacgaaatgatcattggtggcggcatggcatttacatttttgaaggtgctgaataacatggagatcggaacaagtttatttgatgaagagggcgccaagattgtcaaggatctcatgtctaaagctgaaaagaatggagtgaagatcacactacccgttgacttcgttaccgcggataagttcgacgaaaacgccaagacgggccaggccactgtggcatcagggatccctgcggggtggatgggacttgattgcggacccgagtcttccaaaaaatatgctgaggctgtcactagggctaaacagattgtttggaatggaccagtgggtgtctttgaatgggaggcattcgcgcggggcaccaaggctctaatggatgaggttgtgaaggctacctcaagaggatgcattacaattattggcggaggggatacggcaacctgctgcgcaaagtggaataccgaggacaaagtatctcacgtgagcaccggcgggggggcatccctcgaacttcttgagggaaaagtgttgcccggcgtcgacgccctgagtaatatatag

SEQ ID NO: 6149 - DNA, 729 bp, Artificial Sequence
  derived and/or modified sequence
atggtcggagtaaacctccctcagaaggcaggggggtttctaatgaagaaggaactgaattacttcgcgaaggcactggagagccctgaaagaccatttttggctatacttgggggggctaaggtcgcagataaaatccagctcatcaataatatgctggacaaggtgaacgaaatgattattggagggggtatggccttcacttttctgaaagttcttaacaatatggaaatcgggacatccctgtttgacgaggagggtgccaagatagtgaaagaccttatgtccaaggcagaaaaaaatggcgtgaaaatcactctacccgtcgacttcgtaaccgcagataagttcgatgagaatgctaagacaggacaagcaaccgttgcaagtggcattcctgcggggtggatgggcttggactgcgggccggaatcctcgaagaagtatgccgaagcagtgactagagctaagcagatcgtgtggaatggccccgtgggcgtctttgagtgggaggcattcgctaggggcacaaaggctctcatggacgaggtcgttaaagcgacctccagaggatgcattacaataattggaggcggcgataccgctacatgctgtgctaagtggaacacagaagataaggtctcgcacgtatcgactggcggaggcgcatccctggaactgttagaaggaaaggtcctacccggcgtcgatgccttgtcgaacatttag

SEQ ID NO: 6150 - DNA, 1170 bp, Artificial Sequence
  derived and/or modified sequence
atgaaaaacaaccagatcacaaacaaccagcgaatcaaggcagcagttccttccatcaaattttgtcttgacaacggagcaaagagcgtggtcctcatgtctcacctcggccggccggatggagtacccatgcctgacaaatactccctggagcctgttgcagtcgagctaaaatccctgctcggtaaggatgtgctgttcctcaaagactgtgtcggacctgaggtggagaaggcatgtgcgaatcctgctgctgggagtgtgatcctccttgagaacctccggtttcatgtggaggaggaagggaaaggaaaggacgcatcaggaaataaagtgaaggccgagcccgctaaaatcgaggcctttagggcatctctgagcaagctgggagacgtgtacgtgaacgatgcttttgggaccgcacaccgcgcacattcttcaatggttggtgtgaatctgcctcagaaggccggaggttttctgatgaaaaaagagctcaattatttcgcgaaggccttagagagtccagagaggccattcctagcaatattgggtggtgctaaagtggccgacaagatccagcttattaacaatatgttagacaaagtaaatgagatgatcatcggggggggcatggccttcaccttcttgaaggtgcttaacaatatggaaatcggaacaagcctgtttgacgaagagggtgctaagattgttaaggatttaatgtctaaggcagagaagaacggcgtgaaaattacgctgccagttgatttcgtgaccgccgacaagtttgacgagaatgcaaagactggccaggcaacagtcgcttccggcattccagctggctggatgggactggactgcgggccagagagcagcaaaaaatacgcagaagccgtgacacgcgctaagcaaattgtgtggaatgggcctgtaggagtgttcgagtgggaagccttcgcccgcggaacgaaggcccttatggatgaagtagtcaaggccactagccggggctgtatcaccatcatagggggtggcgataccgccacgtgttgtgctaaatggaacactgaggataaagtatctcatgtatccacaggcggcggggcgtccttagaactcctggagggtaaagtgttgcctggggtggacgctttgagcaacatttag

SEQ ID NO: 6151 - DNA, 1254 bp, Artificial Sequence
  derived and/or modified sequence
atgagcctgagcaacaagctgaccctggacaagctggatgtgaagggcaagagggtggtgatgagggtggacttcaacgtgcccatgaagaacaaccagatcaccaacaaccagaggatcaaggctgctgtgcccagcatcaagttctgcctggacaatggagccaagtctgtggtgctgatgagccacctgggccgcccagatggagtgcccatgccagacaagtacagcctggagcctgtggccgtggagctgaagagcctgctgggcaaggatgtgctcttcctgaaggactgtgtgggccctgaggtggagaaggcctgtgccaacccagctgctggcagcgtcatcctgctggagaacctgcgcttccacgtggaggaggagggcaagggcaaggatgccagcggcaacaaggtgaaggccgagcccgccaagattgaggccttccgggccagcctgagcaagctgggagatgtgtatgtgaatgatgccttcggcacagcccaccgggcccacagctccatggtgggcgtgaacctgccccagaaggccggcggcttcctgatgaagaaggagctgaactactttgccaaggccctggagagccctgagcggcccttcctggccatcctgggcggggccaaggtggccgacaagatccagctgatcaacaacatgctggacaaggtgaatgagatgatcatcggcggcggcatggccttcaccttcctgaaggtgctgaacaacatggagatcggcaccagcctgtttgatgaggagggcgccaagatcgtgaaggacctgatgagcaaggccgagaagaatggagtgaagatcaccctgcctgtggactttgtgacagctgacaagtttgatgaaaatgccaagacaggccaggccaccgtggccagcggcatcccagctggctggatgggcctggactgtggccctgagagcagcaagaagtatgcagaggccgtgacccgggccaagcagatcgtgtggaatggacctgtgggcgtgtttgagtgggaggcctttgcccggggcaccaaggccctgatggatgaggtggtgaaggccaccagccggggctgcatcaccatcattggaggaggagacacagccacctgctgtgccaagtggaacacagaggacaaggtgagccacgtgtccactggaggaggagccagcctggagctgctggagggcaaggtgctgcccggggtggatgccctgagcaacatctag

SEQ ID NO: 6152 - DNA, 846 bp, Artificial Sequence
  derived and/or modified sequence
atgagcctgagcaacaagctgaccctggacaagctggatgtgaagggcaagagggtggtgatgagggtggacttcaacgtgcccatgaagaacaaccagatcaccaacaaccagaggatcaaggctgctgtgcccagcatcaagttctgcctggacaatggagccaagtctgtggtgctgatgagccacctgggccgcccagatggccggcccttcctggccatcctgggcggggccaaggtggccgacaagatccagctgatcaacaacatgctggacaaggtgaatgagatgatcatcggcggcggcatggccttcaccttcctgaaggtgctgaacaacatggagatcggcaccagcctgtttgatgaggagggcgccaagatcgtgaaggacctgatgagcaaggccgagaagaatggagtgaagatcaccctgcctgtggactttgtgacagctgacaagtttgatgaaaatgccaagacaggccaggccaccgtggccagcggcatcccagctggctggatgggcctggactgtggccctgagagcagcaagaagtatgcagaggccgtgacccgggccaagcagatcgtgtggaatggacctgtgggcgtgtttgagtgggaggcctttgcccggggcaccaaggccctgatggatgaggtggtgaaggccaccagccggggctgcatcaccatcattggaggaggagacacagccacctgctgtgccaagtggaacacagaggacaaggtgagccacgtgtccactggaggaggagccagcctggagctgctggagggcaaggtgctgcccggggtggatgccctgagcaacatctag

SEQ ID NO: 6153 - DNA, 729 bp, Artificial Sequence
  derived and/or modified sequence
atggtgggcgtgaacctgccccagaaggccggcggcttcctgatgaagaaggagctgaactactttgccaaggccctggagagccctgagcggcccttcctggccatcctgggcggggccaaggtggccgacaagatccagctgatcaacaacatgctggacaaggtgaatgagatgatcattggaggcggcatggccttcaccttcctgaaggtgctgaacaacatggagatcggcaccagcctgtttgatgaggagggcgccaagatcgtgaaggacctgatgagcaaggccgagaagaatggagtgaagatcaccctgcctgtggactttgtgacagctgacaagtttgatgaaaatgccaagacaggccaggccaccgtggccagcggcatcccagctggctggatgggcctggactgtggccctgagagcagcaagaagtatgcagaggccgtgacccgggccaagcagatcgtgtggaatggacctgtgggcgtgtttgagtgggaggcctttgcccggggcaccaaggccctgatggatgaggtggtgaaggccaccagccggggctgcatcaccatcatcggcggcggggacacagccacctgctgtgccaagtggaacacagaggacaaggtgagccacgtgtccactggaggaggagccagcctggagctgctggagggcaaggtgctgcccggggtggatgccctgagcaacatctag

SEQ ID NO: 6154 - DNA, 1170 bp, Artificial Sequence
  derived and/or modified sequence
atgaagaacaaccagatcaccaacaaccagaggatcaaggctgctgtgcccagcatcaagttctgcctggacaatggagccaagtctgtggtgctgatgagccacctgggccgcccagatggagtgcccatgccagacaagtacagcctggagcctgtggccgtggagctgaagagcctgctgggcaaggatgtgctcttcctgaaggactgtgtgggccctgaggtggagaaggcctgtgccaacccagctgctggcagcgtcatcctgctggagaacctgcgcttccacgtggaggaggagggcaagggcaaggatgccagcggcaacaaggtgaaggccgagcccgccaagattgaggccttccgggccagcctgagcaagctgggagatgtgtatgtgaatgatgccttcggcacagcccaccgggcccacagctccatggtgggcgtgaacctgccccagaaggccggcggcttcctgatgaagaaggagctgaactactttgccaaggccctggagagccctgagcggcccttcctggccatcctgggcggggccaaggtggccgacaagatccagctgatcaacaacatgctggacaaggtgaatgagatgatcatcggcggcggcatggccttcaccttcctgaaggtgctgaacaacatggagatcggcaccagcctgtttgatgaggagggcgccaagatcgtgaaggacctgatgagcaaggccgagaagaatggagtgaagatcaccctgcctgtggactttgtgacagctgacaagtttgatgaaaatgccaagacaggccaggccaccgtggccagcggcatcccagctggctggatgggcctggactgtggccctgagagcagcaagaagtatgcagaggccgtgacccgggccaagcagatcgtgtggaatggacctgtgggcgtgtttgagtgggaggcctttgcccggggcaccaaggccctgatggatgaggtggtgaaggccaccagccggggctgcatcaccatcattggaggaggagacacagccacctgctgtgccaagtggaacacagaggacaaggtgagccacgtgtccactggaggaggagccagcctggagctgctggagggcaaggtgctgcccggggtggatgccctgagcaacatctag

SEQ ID NO: 6155 - DNA, 1254 bp, Artificial Sequence
  derived and/or modified sequence
atgagcctgagcaacaagctgaccctggacaagctggacgtgaaggggaaacgcgtggttatgcgggttgatttcaacgtacccatgaaaaataaccagataacaaacaatcagcggatcaaggcagccgtgccaagtataaaattttgtttagacaatggagccaagtccgttgtactgatgtcacacctgggccgaccagacggcgtacctatgccggacaagtatagtctagagcccgtggctgtggagttgaagtccctattgggaaaagacgttctgttcctgaaagattgtgtgggcccagaagtggagaaagcttgtgctaaccctgcagccggtagcgtgatactgctagagaaccttaggttccacgtcgaggaggagggaaaggggaaagacgccagcggcaacaaagtaaaggccgagccagccaaaatcgaggccttcagggcatcattatccaaacttggcgatgtctacgtcaatgacgcctttgggactgcacaccgcgctcatagcagcatggtgggcgtaaacctgccacaaaaggcaggggggttcttgatgaagaaggagctcaattattttgcgaaggctctcgagtctcctgaacgtcccttcctcgccatcctgggcggtgcaaaagtggcagataagatacagctgatcaacaacatgcttgataaggtgaatgaaatgattattgggggcgggatggcctttacttttctgaaggtgctgaataatatggaaattggtaccagtcttttcgacgaagaaggcgcgaaaatcgtgaaagacctaatgagtaaagcagaaaaaaatggtgtaaagatcacactgcctgtggacttcgtaacagcagacaagtttgatgaaaatgctaaaacaggccaggcgacagttgcctccgggattccagcagggtggatgggtctagattgtggccctgagtccagtaaaaagtacgccgaggcagtcacgcgtgcaaagcagatcgtctggaacggaccagtgggggtgttcgagtgggaagcctttgctcgcggcactaaggctctcatggacgaggtggtgaaagccaccagtcgtggttgcattacaataattggtgggggcgatacagcaacctgctgtgccaagtggaataccgaggataaggtcagccacgtgtcaactggcggcggcgcctcactggaattactagagggcaaggtcctgccgggcgtggatgctctgagcaacatttag

SEQ ID NO: 6156 - DNA, 846 bp, Artificial Sequence
  derived and/or modified sequence
atgagcctgagcaacaagctgaccctggacaagctggacgtgaaggggaagagagtcgtaatgcgggtggacttcaacgtgccaatgaagaacaatcagattacaaataatcagaggataaaagctgcagtcccgagcataaagttctgcttagataacggggcaaagagtgtcgtgctcatgagccacctaggccgccctgacggcagacccttcctcgccatactgggcggggccaaagtcgcagacaagattcaactcattaacaacatgttagataaggttaatgagatgattataggaggaggcatggcattcacctttttgaaggtgctgaataatatggaaattgggacatcccttttcgacgaggagggggccaaaatagtaaaggatctgatgtctaaggccgagaaaaatggcgtcaaaatcactctgccagtggacttcgtgaccgctgacaaattcgatgaaaacgcaaaaactggtcaggcgacagtagccagtgggataccagccggctggatgggcctggactgcgggccagaaagcagcaaaaagtacgctgaggcggtaacacgcgcgaagcaaatcgtgtggaacgggcctgtaggcgttttcgagtgggaggcctttgctcgcgggacaaaggccctgatggacgaggtggtgaaggccacatctcggggttgcatcactatcataggcggtggggacactgccacttgttgcgccaaatggaacacggaggataaagtctcccacgttagtactggcgggggggcttcactggaactgctggaagggaaggttctgccaggtgtggacgcactatccaatatttag

SEQ ID NO: 6157 - DNA, 729 bp, Artificial Sequence
  derived and/or modified sequence
atggtgggcgtgaacctgccccagaaggccggcggcttcctgatgaaaaaagagctgaactatttcgcaaaggccctagagagcccggagagacctttcttggccattctgggaggggccaaggtggctgataaaattcagcttatcaacaacatgttagataaggtaaatgagatgattattggcgggggaatggccttcacctttctgaaggtcctgaataacatggagatcggcacttccctgttcgatgaggaaggtgctaaaatagtgaaagatttaatgtccaaagctgaaaaaaacggggtcaagatcactttgccagttgatttcgtaacggctgacaaatttgatgagaatgccaagaccggccaggccaccgtggcttccggaattcctgccgggtggatgggacttgactgtggacccgagtcttcgaagaagtacgcggaagccgttacgagagccaagcagattgtgtggaacggacctgtgggcgtgttcgaatgggaggctttcgcccgcggcactaaagctctgatggacgaagtcgtgaaagcaacctccagaggctgtatcactatcattggcggaggagacaccgcaacgtgctgcgcgaaatggaacactgaggacaaggtgtcccacgtgagtacaggaggcggagctagtctggagttgctggagggtaaagtgctgcccggggttgatgccttgtcgaacatttag

SEQ ID NO: 6158 - DNA, 1170 bp, Artificial Sequence
  derived and/or modified sequence
atgaagaacaaccagatcaccaacaaccagcggatcaaggccgccgtgccatccattaaattttgtcttgacaacggagcaaagtccgttgtgctgatgtcccacctgggtcgtccagacggcgtacccatgccagacaagtatagcttagagccagttgcagtggagctgaagtctctcctagggaaggatgtactgttcctcaaggattgcgttggtcccgaggtggagaaagcttgtgcgaaccctgctgccggttctgtgatcctattggaaaacctccggttccacgtggaggaggaagggaaaggaaaggacgcctctgggaataaagtcaaggccgagcccgccaagattgaggcgtttcgtgctagtttaagcaaacttggcgatgtgtatgtgaatgacgcctttggaaccgcccaccgcgcgcattcttctatggttggtgtgaacctaccacagaaagccggcggatttttaatgaagaaggaactgaactatttcgcaaaagccctggaaagccctgagcgaccatttctggcgatactgggtggtgctaaggttgccgacaaaattcaactcattaacaacatgttggacaaggtaaatgagatgataattggcggggggatggccttcacttttctcaaagtgctgaacaacatggagattggcacgtctctgttcgacgaggagggcgctaagatcgtgaaagatctgatgagcaaggcggaaaagaatggggtgaagataactctgcctgtcgacttcgtgactgccgacaaatttgacgagaatgcaaagactggacaagctaccgttgccagtgggattccggctggctggatggggcttgactgcggccccgaatcttccaagaagtacgctgaggctgttacgagagccaagcagatagtctggaacggaccagtgggcgtgtttgaatgggaagcctttgcccgagggacaaaagcactaatggacgaagtggtcaaggccacttccaggggatgtataaccatcattggaggcggagacactgctacatgttgcgccaagtggaacacggaagataaagtgtcacacgtctcgaccggtggaggtgcttccctggagctgcttgagggaaaggtgctccccggcgtggacgcactgtcaaacatctag

SEQ ID NO: 6159 - DNA, 4887 bp, Artificial Sequence
  derived and/or modified sequence
cagcggccgggaaggggcggtgcgggaggcggggtgtggggcggtagtgtgggccctgttcctgcccgcgcggtgttccgcattctgcaagcctccggagcgcacgtcggcagtcggctccctcgttgaccgaatcaccgacctctctccccagctgtatttccaaaatgtcgctttctaacaagctgacgctggacaagctggacgttaaagggaagcgggtcgttatgagagtcgacttcaatgttcctatgaagaacaaccagataacaaacaaccagaggattaaggctgctgtcccaagcatcaaattctgcttggacaatggagccaagtcggtagtccttatgagccacctaggccggcctgatggtgtgcccatgcctgacaagtactccttagagccagttgctgtagaactcaaatctctgctgggcaaggatgttctgttcttgaaggactgtgtaggcccagaagtggagaaagcctgtgccaacccagctgctgggtctgtcatcctgctggagaacctccgctttcatgtggaggaagaagggaagggaaaagatgcttctgggaacaaggttaaagccgagccagccaaaatagaagctttccgagcttcactttccaagctaggggatgtctatgtcaatgatgcttttggcactgctcacagagcccacagctccatggtaggagtcaatctgccacagaaggctggtgggtttttgatgaagaaggagctgaactactttgcaaaggccttggagagcccagagcgacccttcctggccatcctgggcggagctaaagttgcagacaagatccagctcatcaataatatgctggacaaagtcaatgagatgattattggtggtggaatggcttttaccttccttaaggtgctcaacaacatggagattggcacttctctgtttgatgaagagggagccaagattgtcaaagacctaatgtccaaagctgagaagaatggtgtgaagattaccttgcctgttgactttgtcactgctgacaagtttgatgagaatgccaagactggccaagccactgtggcttctggcatacctgctggctggatgggcttggactgtggtcctgaaagcagcaagaagtatgctgaggctgtcactcgggctaagcagattgtgtggaatggtcctgtgggggtatttgaatgggaagcttttgcccggggaaccaaagctctcatggatgaggtggtgaaagccacttctaggggctgcatcaccatcataggtggtggagacactgccacttgctgtgccaaatggaacacggaggataaagtcagccatgtgagcactgggggtggtgccagtttggagctcctggaaggtaaagtccttcctggggtggatgctctcagcaatatttagtactttcctgccttttagttcctgtgcacagcccctaagtcaacttagcattttctgcatctccacttggcattagctaaaaccttccatgtcaagattcagctagtggccaagagatgcagtgccaggaacccttaaacagttgcacagcatctcagctcatcttcactgcaccctggatttgcatacattcttcaagatcccatttgaattttttagtgactaaaccattgtgcattctagagtgcatatatttatattttgcctgttaaaaagaaagtgagcagtgttagcttagttctcttttgatgtaggttattatgattagctttgtcactgtttcactactcagcatggaaacaagatgaaattccatttgtaggtagtgagacaaaattgatgatccattaagtaaacaataaaagtgtccattgaaaccgtgatttttttttttttcctgtcatactttgttaggaagggtgagaatagaatcttgaggaacggatcagatgtctatattgctgaatgcaagaagtggggcagcagcagtggagagatgggacaattagataaatgtccattctttatcaagggcctactttatggcagacattgtgctagtgcttttattctaacttttatttttatcagttacacatgatcataatttaaaaagtcaaggcttataacaaaaaagccccagcccattcctcccattcaagattcccactccccagaggtgaccactttcaactcttgagtttttcaggtatatacctccatgtttctaagtaatatgcttatattgttcacttcttttttttttattttttaaagaaatctatttcataccatggaggaaggctctgttccacatatatttccacttcttcattctctcggtatagttttgtcacaattatagattagatcaaaagtctacataactaatacagctgagctatgtagtatgctatgattaaatttacttatgtaacttttattgtctttggcattaacagtgtttcaaaaaattttctgtgtatacccatcagtgattcattcccaaatcttctagaagcataagtgtctcaatatattaaaacatattgaataatccttgttagagttatccctgcaggagtccttagtgctcctttatccaatttgtacttgatgccctctaggcagggtgtacagctagctgttgctctggtatttcctataaccttcttggggatttcttttacctcctgtgttagactcctgttttctggattcccccttttccctctttcttggtctactttttgtagaacacaagactctactagcttcctgagaaagggtgcctgggaggcaaaatctctaagactttgtaagtctgaaaatgtctttattcgacccttatacttgattcctagtttggctatatatagaattttagcctgagtatcactttttgagactcgaagccactgtttcattgtcactattgagaatctaaatggccattcggattctttcatcatctttataattttaccttcctatttctttcctgtccttttaatggagttttgggagagagcagaggtaaacatgatttgaaaaagccatgtctgaccagaaattctgtgctggaaagatatgtatttcacctttagggacaaagaaataaacttttggacaggaccacagagctagtaagtaacagcagggattcaagtccaggtttgtctggttccagtggctgatgcttttccaatgtgcctccgtccctgacatgatgcttctaggctatagatgcttctagactctatccctgacatgatgcttctagactattttgtttaaccctggatagaatagcaaaagaaaattttggtggttgctctaaacaaaacagaaatttgaaagctcaagttttttcttcatttgtattttagttaatactgtacccatatttgtagttaattttaaattgtaccatgtttctgcatacctctatgggtactcaggaattctagtccaatttttgtgactttttcctactgattacctttcctccaacgttttaaaaattatttcaaatggaactgaaagaagcataaactcccataaacccagcacctagactctacaattgccaacattatctatccaacaatctctgactgtaccttttaagtactttctactggactgtttccaggatcacccctcatttatttgggttgttaacctaaagaatgaatgggggaatctccagtcataaacaacttgtcaattaggcaaatatttgagttccttctatgtgcttaaagacgtgatagagggaatataagagcatttatgttctgaaggaatttttaacctaaccaaagaagatagtagataacttgtgtgcatataagctagaacagtataaggggccgggcatggtggcttacgcctgtaatcccaggactttgggaggccaaggcgggcagatcacctgtcaggagtttgggaccagcctggccaacatggtgaaaccccgtttctaccaaaaatacaaaaattagccgggcgtggtggcgtgtgccactgtagtcccagctattcagaaggctgaggcaggagaatcacttgaacccgggaggtggaggttgcagtgagctgagatcacgctactgcattcctgcttgggcgacagagtgagactctgcctcaaaacaaaaaccccacaaaacagtataaggatgtgctttctaatttggaattatgaattattggtaaaatattgcaaaggtgtatgctttaagttgtaaattcacctttaaccctagactatatatgtgtgtttatatgcagaaaaaaataattcccatgtcgtaagtgaacaatttggttctttagctcagtgttttcctgttttcttcatttccaaaatttccctctagcacaggggtttacacatgatcaaaaaggagtatacaatgaagacaccttcctcagtcccctacctaccagtttccctccccagaagcaacctctggaagaccagtttctttcaatctaaggctatttaatatacattaagaggccgggcgcagtggctcacgcctgtaatcccaacaacactttgggaggcccaggcaggcgggtcatgaggtcaggagattgagaccatcctggctaacacggtgaaaccctgtctctactaaaaatacaaaaaattagctgggcgtgatggtgggcgcctgtagtcccagctactcgggaggctgaggcaggagaatggcgtgaacctgggaagcggagctcgcagtgagccgagatcacgccactgcactccagcctgggcaacagtgagactctgcataaagagcatacccatgtgtgtacctatctatctatctatctatctatctatctatctatctatctgtatatagatatattaaaatgtaaatggtggcat

SEQ ID NO: 6160 - DNA, 1366 bp, Artificial Sequence
  derived and/or modified sequence
attctgcaagcctccggagcgcacgtcggcagtcggctccctcgttgaccgaatcaccgacctctctccccagctgtatttccaaaatgtcgctttctaacaagctgacgctggacaagctggacgttaaagggaagcgggtcgttatgagagtcgacttcaatgttcctatgaagaacaaccagataacaaacaaccagaggattaaggctgctgtcccaagcatcaaattctgcttggacaatggagccaagtcggtagtccttatgagccacctaggccggcctgatggtcgacccttcctggccatcctgggcggagctaaagttgcagacaagatccagctcatcaataatatgctggacaaagtcaatgagatgattattggtggtggaatggcttttaccttccttaaggtgctcaacaacatggagattggcacttctctgtttgatgaagagggagccaagattgtcaaagacctaatgtccaaagctgagaagaatggtgtgaagattaccttgcctgttgactttgtcactgctgacaagtttgatgagaatgccaagactggccaagccactgtggcttctggcatacctgctggctggatgggcttggactgtggtcctgaaagcagcaagaagtatgctgaggctgtcactcgggctaagcagattgtgtggaatggtcctgtgggggtatttgaatgggaagcttttgcccggggaaccaaagctctcatggatgaggtggtgaaagccacttctaggggctgcatcaccatcataggtggtggagacactgccacttgctgtgccaaatggaacacggaggataaagtcagccatgtgagcactgggggtggtgccagtttggagctcctggaaggtaaagtccttcctggggtggatgctctcagcaatatttagtactttcctgccttttagttcctgtgcacagcccctaagtcaacttagcattttctgcatctccacttggcattagctaaaaccttccatgtcaagattcagctagtggccaagagatgcagtgccaggaacccttaaacagttgcacagcatctcagctcatcttcactgcaccctggatttgcatacattcttcaagatcccatttgaattttttagtgactaaaccattgtgcattctagagtgcatatatttatattttgcctgttaaaaagaaagtgagcagtgttagcttagttctcttttgatgtaggttattatgattagctttgtcactgtttcactactcagcatggaaacaagatgaaattccatttgtaggtagtgagacaaaattgatgatccattaagtaaacaataaaagtgtccattg

SEQ ID NO: 6161 - DNA, 1405 bp, Artificial Sequence
  derived and/or modified sequence
attctgcaagcctccggagcgcacgtcggcagtcggctccctcgttgaccgaatcaccgacctctctccccagctgtatttccaaaatgtcgctttctaacaagctgacgctggacaagctggacgttaaagggaagcgggtcgttatgagagtcgacttcaatgttcctatgaagaacaaccagataacaaacaaccagaggattaaggctgctgtcccaagcatcaaattctgcttggacaatggagccaagtcggtagtccttatgagccacctaggccggcctgatggtgtgcccatgcctgacaagtactccttagagccagttgctgtagaactcaaatctctgctgggcaaggatgttctgttcttgaaggactgtgtaggcccagaagtggagaaagcctggagaacctccgctttcatgtggaggaagaagggaagggaaaagatgcttctgggaacaaggttaaagccgagccagccaaaatagaagctttccgagcttcactttccaagctaggggatgtctatgtcaatgatgcttttggcactgctcacagagcccacagctccatggtaggagtcaatctgccacagaaggctggtgggtttttgatgaagaaggagctgaactactttgcaaaggccttggagagcccagagcgacccttcctggccatcctgggcggagctaaagttgcagacaagatccagctcatcaataatatgctggacaaagtcaatgagatgattattggtggtggaatggcttttaccttccttaaggtgctcaacaacatggagattggcacttctctgtttgatgaagagggagccaagattgtcaaagacctaatgtccaaagctgagaagaatggtgtgaagattaccttgcctgttgactttgtcactgctgacaagtttgatgagaatgccaagactggccaagccactgtggcttctggcatacctgctggctggatgggcttggactgtggtcctgaaagcagcaagaagtatgctgaggctgtcactcgggctaagcagattgtgtggaatggtcctgtgggggtatttgaatgggaagcttttgcccggggaaccaaagctctcatggatgaggtggtgaaagccacttctaggggctgcatcaccatcataggtggtggagacactgccacttgctgtgccaaatggaacacggaggataaagtcagccatgtgagcactgggggtggtgccagtttggagctcctggaaggtaaagtccttcctggggtggatgctctcagcaatatttagtactttcctgccttttagttcctgtgcacagcccctaagtcaacttagcattttctgcatctccacttggcattagctaaaaccttccatgtcaagatt

SEQ ID NO: 6162 - DNA, 1769 bp, Artificial Sequence
  derived and/or modified sequence
aacctggataccttctacttatttaggctgaggacaggaagttacatggttccctgattattaatgtatttcttttgaacagagagtcacattgtaggcctacttttttggaggtgcttaggcagccatgtggtgtcagctcaattcctttttgtttcaacgtggtggttgctggcggtgtttccggaatggggcttcctgagtagtggctgcctcatttgtcgtctttgtcctgcagaagtgaactatggtatttgctgactcttctggtccactggtttggattgccaagggaaattgatttgttgagagtcgacttcaatgttcctatgaagaacaaccagataacaaacaaccagaggattaaggctgctgtcccaagcatcaaattctgcttggacaatggagccaagtcggtagtccttatgagccacctaggccggcctgatggtgtgcccatgcctgacaagtactccttagagccagttgctgtagaactcaaatctctgctgggcaaggatgttctgttcttgaaggactgtgtaggcccagaagtggagaaagcctgtgccaacccagctgctgggtctgtcatcctgctggagaacctccgctttcatgtggaggaagaagggaagggaaaagatgcttctgggaacaaggttaaagccgagccagccaaaatagaagctttccgagcttcactttccaagctaggggatgtctatgtcaatgatgcttttggcactgctcacagagcccacagctccatggtaggagtcaatctgccacagaaggctggtgggtttttgatgaagaaggagctgaactactttgcaaaggccttggagagcccagagcgacccttcctggccatcctgggcggagctaaagttgcagacaagatccagctcatcaataatatgctggacaaagtcaatgagatgattattggtggtggaatggcttttaccttccttaaggtgctcaacaacatggagattggcacttctctgtttgatgaagagggagccaagattgtcaaagacctaatgtccaaagctgagaagaatggtgtgaagattaccttgcctgttgactttgtcactgctgacaagtttgatgagaatgccaagactggccaagccactgtggcttctggcatacctgctggctggatgggcttggactgtggtcctgaaagcagcaagaagtatgctgaggctgtcactcgggctaagcagattgtgtggaatggtcctgtgggggtatttgaatgggaagcttttgcccggggaaccaaagctctcatggatgaggtggtgaaagccacttctaggggctgcatcaccatcataggtggtggagacactgccacttgctgtgccaaatggaacacggaggataaagtcagccatgtgagcactgggggtggtgccagtttggagctcctggaaggtaaagtccttcctggggtggatgctctcagcaatatttagtactttcctgccttttagttcctgtgcacagcccctaagtcaacttagcattttctgcatctccacttggcattagctaaaaccttccatgtcaagattcagctagtggccaagagatgcagtgccaggaacccttaaacagttgcacagcatctcagctcatcttcactgcaccctggatttgcatacattcttcaagatcccatttgaattttttagtgactaaaccattgtgcattctagagtgcatatatttatattttgcctgtt

SEQ ID NO: 6163 - DNA, 1254 bp, Artificial Sequence
  derived and/or modified sequence
atgtctctctccaacaagcttacattggacaagttagatgtcaaaggcaaacgagtggttatgagggtggatttcaacgtgcctatgaagaacaatcagatcaccaacaaccaacgcattaaagccgcagtgccatccatcaagttctgccttgataatggggcaaaatctgtcgtccttatgtctcacttggggcgtccagacggtgtcccaatgccagacaaatactcactggagccagtggcggttgagctgaagtccctactagggaaggacgttcttttcctgaaggactgcgtaggtcccgaagtggaaaaggcctgcgctaatccagcagcaggatccgtgattctgctcgaaaacttgcgcttccacgtagaggaggagggcaaggggaaggacgcaagtggcaataaagtcaaggccgagcccgcaaaaatcgaggcgttccgcgcttcattgagtaagctgggggacgtgtatgtgaacgatgcgttcgggacagctcatcgggctcatagcagcatggttggcgttaacctgcctcagaaggccggaggctttctcatgaagaaggagttgaactatttcgctaaggccctcgagtcacccgagcgcccattcctggcgatcctgggcggagctaaggtggctgataagatccagctcatcaacaatatgcttgacaaggtgaatgaaatgatcatcggaggaggtatggcattcacctttctgaaggtgctgaataatatggagattggtacaagcctttttgatgaggaaggggctaaaatagtgaaggaccttatgtctaaagctgagaaaaacggtgtcaaaatcacactacctgtggatttcgtgacagcagataagttcgatgaaaatgcgaaaactggtcaggctactgtggcatcaggtatacccgctgggtggatgggactcgactgcggaccagaaagtagtaagaagtatgccgaggctgtcaccagagccaagcagatcgtgtggaacgggcctgttggcgtatttgaatgggaagcgtttgctcgagggacaaaggcccttatggatgaggtggtaaaagcaacgagtagaggatgtatcactatcatcggaggcggagacacagccacctgctgtgcgaaatggaatacggaggacaaggtgagccacgttagcacggggggtggagcttctttggaactgcttgaaggcaaagttctgccgggagttgacgctctgagcaacatctag

SEQ ID NO: 6164 - DNA, 846 bp, Artificial Sequence
  derived and/or modified sequence
atgagtttaagtaataaacttacactagataaattggatgtgaaaggcaagcgtgttgtgatgcgggttgacttcaatgtccctatgaagaataaccagataacgaataaccagcggataaaggcggcagtgccaagtatcaagttctgcctcgacaatggagccaagtcagtcgtcctgatgtctcatttgggcaggccagacggaaggcccttcctggcaatcctcggaggcgctaaggtggccgacaagatccaactgatcaacaacatgttggacaaagtgaacgaaatgattatcggtggagggatggcgttcacattcttaaaagtcctaaataacatggagataggcacctcattgtttgatgaagaaggcgctaagatcgtaaaggatctgatgtccaaggctgaaaagaacggggtcaagattaccctgcccgtggacttcgtgacggccgacaagttcgacgagaacgccaaaaccgggcaggcaacagtcgcctctgggatacccgctggctggatggggctagactgtggtccagagagttccaaaaagtatgcggaggcagtcacccgggcaaagcagatcgtgtggaatggaccagtgggagtgtttgaatgggaagcattcgccagagggaccaaggcccttatggatgaggtggtcaaagccacgagccggggatgcataacaataatcggtggtggggacacggcaacctgctgtgccaagtggaacactgaggataaggtcagtcacgtcagcaccggtggtggggcttcactggaactcttggagggaaaggtcttgcctggggttgacgctctgtctaacatctag

SEQ ID NO: 6165 - DNA, 729 bp, Artificial Sequence
  derived and/or modified sequence
atggtaggggtcaacctgccccagaaggctggcggatttctcatgaagaaagagttaaattactttgcgaaggctctcgagagccccgagcgccctttcttggctattcttggaggggctaaagtcgcggataagatccagctgatcaacaacatgctggataaggtgaatgaaatgatcattggtggtgggatggcattcactttcctgaaggtgctcaacaacatggaaattggcacatcgttatttgacgaagagggcgcaaaaatcgtcaaggatctaatgtccaaggccgaaaagaacggcgttaagattaccttacccgtcgactttgtgaccgccgataaattcgatgagaacgctaaaaccggccaggctaccgtggcctcaggaatcccggcaggctggatgggcctagactgcgggccagaatccagtaagaagtacgcagaagccgtgacgagggctaagcagattgtttggaacggacctgtcggggtgtttgagtgggaggcttttgcccgtggcaccaaagcgctgatggacgaagtggtcaaagcgacctcgaggggctgcattactataattggaggcggagatacggcgacatgctgtgcaaaatggaatactgaagataaggtgagccatgtaagtaccgggggaggcgcatccctcgagctactggaggggaaggtcctgcccggagtggatgcactgtcgaacatttag

SEQ ID NO: 6166 - DNA, 1170 bp, Artificial Sequence
  derived and/or modified sequence
atgaaaaataatcagatcactaataaccagcgcataaaagccgctgtgcccagtatcaagttctgcttagataatggcgctaaatcggtggtcttaatgagccatctgggcaggccggacggagtaccaatgcccgacaaatactccttggaacccgtagccgttgaactcaagtctctgctgggtaaggatgtgctgttcctgaaagactgtgtggggcctgaggtcgagaaggcttgcgccaacccagccgctgggagtgtgatcctgttggagaacctgcggtttcacgtggaggaggagggcaagggtaaggatgcttccggtaataaggttaaggcagaaccagcaaaaatcgaagccttccgcgcatcgttgagtaagctaggtgatgtctatgtaaacgacgcttttggaacagcgcatagagcccattcatccatggtcggcgtgaacctgccccagaaagcgggaggattcttaatgaagaaggaattaaattacttcgccaaggctctcgagtcgccagagaggccattcctggcaatactgggaggcgcaaaagtggcagacaagatccagctcatcaacaacatgctggataaagtaaacgaaatgattattggcggaggaatggccttcacatttctcaaagtgttaaacaacatggaaatcggcacttcactgtttgatgaagagggcgcaaagatagtgaaagacctaatgtccaaggccgagaagaacggtgtgaagattactctccctgtggatttcgtgacggcagataagttcgatgaaaatgcaaaaacaggacaggcgactgtggcgtctggcattcccgctggctggatgggactcgattgtggtccggaatcctccaagaaatatgcggaggccgtgactcgcgctaagcagatcgtgtggaatgggccagttggggtgtttgaatgggaggcgttcgcacgcggtacaaaagccctcatggacgaggtcgtgaaagctacttctagaggatgcataacaatcatcgggggtggggatacggcaacctgttgcgccaagtggaacaccgaggacaaagtgagtcacgtcagtactggcggaggcgcatctctcgaattgctggagggcaaggtcctgccaggggtcgatgcgctctcgaacatatag

SEQ ID NO: 6167 - DNA, 1254 bp, Artificial Sequence
  derived and/or modified sequence
atgagcctgagcaacaagctgaccctggacaagctggacgtgaagggcaagagagtggtgatgagagtggacttcaacgtgcccatgaagaacaaccagatcaccaacaaccagagaatcaaggccgccgtgcccagcatcaagttctgcctggacaacggcgccaagagcgtggtgctgatgagccacctgggcagacccgacggcgtgcccatgcccgacaagtacagcctggagcccgtggccgtggagctgaagagcctgctgggcaaggacgtgctgttcctgaaggactgcgtgggccccgaggtggagaaggcctgcgccaaccccgccgccggcagcgtgatcctgctggagaacctgagattccacgtggaggaggagggcaagggcaaggacgccagcggcaacaaggtgaaggccgagcccgccaagatcgaggccttcagagccagcctgagcaagctgggcgacgtgtacgtgaacgacgccttcggcaccgcccacagagcccacagcagcatggtgggcgtgaacctgccccagaaggccggcggcttcctgatgaagaaggagctgaactacttcgccaaggccctggagagccccgagagacccttcctggccatcctgggcggcgccaaggtggccgacaagatccagctgatcaacaacatgctggacaaggtgaacgagatgatcatcggcggcggcatggccttcaccttcctgaaggtgctgaacaacatggagatcggcaccagcctgttcgacgaggagggcgccaagatcgtgaaggacctgatgagcaaggccgagaagaacggcgtgaagatcaccctgcccgtggacttcgtgaccgccgacaagttcgacgagaacgccaagaccggccaggccaccgtggccagcggcatccccgccggctggatgggcctggactgcggccccgagagcagcaagaagtacgccgaggccgtgaccagagccaagcagatcgtgtggaacggccccgtgggcgtgttcgagtgggaggccttcgccagaggcaccaaggccctgatggacgaggtggtgaaggccaccagcagaggctgcatcaccatcatcggcggcggcgacaccgccacctgctgcgccaagtggaacaccgaggacaaggtgagccacgtgagcaccggcggcggcgccagcctggagctgctggagggcaaggtgctgcccggcgtggacgccctgagcaacatctag

SEQ ID NO: 6168 - DNA, 846 bp, Artificial Sequence
  derived and/or modified sequence
atgagcctgagcaacaagctgaccctggacaagctggacgtgaagggcaagagagtggtgatgagagtggacttcaacgtgcccatgaagaacaaccagatcaccaacaaccagagaatcaaggccgccgtgcccagcatcaagttctgcctggacaacggcgccaagagcgtggtgctgatgagccacctgggcagacccgacggcagacccttcctggccatcctgggcggcgccaaggtggccgacaagatccagctgatcaacaacatgctggacaaggtgaacgagatgatcatcggcggcggcatggccttcaccttcctgaaggtgctgaacaacatggagatcggcaccagcctgttcgacgaggagggcgccaagatcgtgaaggacctgatgagcaaggccgagaagaacggcgtgaagatcaccctgcccgtggacttcgtgaccgccgacaagttcgacgagaacgccaagaccggccaggccaccgtggccagcggcatccccgccggctggatgggcctggactgcggccccgagagcagcaagaagtacgccgaggccgtgaccagagccaagcagatcgtgtggaacggccccgtgggcgtgttcgagtgggaggccttcgccagaggcaccaaggccctgatggacgaggtggtgaaggccaccagcagaggctgcatcaccatcatcggcggcggcgacaccgccacctgctgcgccaagtggaacaccgaggacaaggtgagccacgtgagcaccggcggcggcgccagcctggagctgctggagggcaaggtgctgcccggcgtggacgccctgagcaacatctag

SEQ ID NO: 6169 - DNA, 729 bp, Artificial Sequence
  derived and/or modified sequence
atggtgggcgtgaacctgccccagaaggccggcggcttcctgatgaagaaggagctgaactacttcgccaaggccctggagagccccgagagacccttcctggccatcctgggcggcgccaaggtggccgacaagatccagctgatcaacaacatgctggacaaggtgaacgagatgatcatcggcggcggcatggccttcaccttcctgaaggtgctgaacaacatggagatcggcaccagcctgttcgacgaggagggcgccaagatcgtgaaggacctgatgagcaaggccgagaagaacggcgtgaagatcaccctgcccgtggacttcgtgaccgccgacaagttcgacgagaacgccaagaccggccaggccaccgtggccagcggcatccccgccggctggatgggcctggactgcggccccgagagcagcaagaagtacgccgaggccgtgaccagagccaagcagatcgtgtggaacggccccgtgggcgtgttcgagtgggaggccttcgccagaggcaccaaggccctgatggacgaggtggtgaaggccaccagcagaggctgcatcaccatcatcggcggcggcgacaccgccacctgctgcgccaagtggaacaccgaggacaaggtgagccacgtgagcaccggcggcggcgccagcctggagctgctggagggcaaggtgctgcccggcgtggacgccctgagcaacatctag

SEQ ID NO: 6170 - DNA, 1170 bp, Artificial Sequence
  derived and/or modified sequence
atgaagaacaaccagatcaccaacaaccagagaatcaaggccgccgtgcccagcatcaagttctgcctggacaacggcgccaagagcgtggtgctgatgagccacctgggcagacccgacggcgtgcccatgcccgacaagtacagcctggagcccgtggccgtggagctgaagagcctgctgggcaaggacgtgctgttcctgaaggactgcgtgggccccgaggtggagaaggcctgcgccaaccccgccgccggcagcgtgatcctgctggagaacctgagattccacgtggaggaggagggcaagggcaaggacgccagcggcaacaaggtgaaggccgagcccgccaagatcgaggccttcagagccagcctgagcaagctgggcgacgtgtacgtgaacgacgccttcggcaccgcccacagagcccacagcagcatggtgggcgtgaacctgccccagaaggccggcggcttcctgatgaagaaggagctgaactacttcgccaaggccctggagagccccgagagacccttcctggccatcctgggcggcgccaaggtggccgacaagatccagctgatcaacaacatgctggacaaggtgaacgagatgatcatcggcggcggcatggccttcaccttcctgaaggtgctgaacaacatggagatcggcaccagcctgttcgacgaggagggcgccaagatcgtgaaggacctgatgagcaaggccgagaagaacggcgtgaagatcaccctgcccgtggacttcgtgaccgccgacaagttcgacgagaacgccaagaccggccaggccaccgtggccagcggcatccccgccggctggatgggcctggactgcggccccgagagcagcaagaagtacgccgaggccgtgaccagagccaagcagatcgtgtggaacggccccgtgggcgtgttcgagtgggaggccttcgccagaggcaccaaggccctgatggacgaggtggtgaaggccaccagcagaggctgcatcaccatcatcggcggcggcgacaccgccacctgctgcgccaagtggaacaccgaggacaaggtgagccacgtgagcaccggcggcggcgccagcctggagctgctggagggcaaggtgctgcccggcgtggacgccctgagcaacatctag

SEQ ID NO: 6171 - protein, 1235 aa, Artificial Sequence
  derived and/or modified sequence
MRSRSNSGVRLDGYARLVQQTILCYQNPVTGLLSASHEQKDAWVRDNIYSILAVWGLGMAYRKNADRDEDKAKAYELEQNVVKLMRGLLQCMMRQVAKVEKFKHTQSTKDSLHAKYNTATCGTVVGDDQWGHLQVDATSLFLLFLAQMTASGLRIIFTLDEVAFIQNLVFYIEAAYKVADYGMWERGDKTNQGIPELNASSVGMAKAALEAIDELDLFGAHGGRKSVIHVLPDEVEHCQSILFSMLPRASTSKEIDAGLLSIISFPAFAVEDVNLVNVTKNEIISKLQGRYGCCRFLRDGYKTPREDPNRLHYDPAELKLFENIECEWPVFWTYFIIDGVFSGDAVQVQEYREALEGILIRGKNGIRLVPELYAVPPNKVDEEYKNPHTVDRVPMGKVPHLWGQSLYILSSLLAEGFLAAGEIDPLNRRFSTSVKPDVVVQVTVLAENNHIKDLLRKHGVNVQSIADIHPIQVQPGRILSHIYAKLGRNKNMNLSGRPYRHIGVLGTSKLYVIRNQIFTFTPQFTDQHHFYLALDNEMIVEMLRIELAYLCTCWRMTGRPTLTFPISRTMLTNDGSDIHSAVLSTIRKLEDGYFGGARVKLGNLSEFLTTSFYTYLTFLDPDCDEKLFDNASEGTFSPDSDSDLVGYLEDTCNQESQDELDHYINHLLQSTSLRSYLPPLCKNTEDRHVFSAIHSTRDILSVMAKAKGLEVPFVPMTLPTKVLSAHRKSLNLVDSPQPLLEKVPESDFQWPRDDHGDVDCEKLVEQLKDCSNLQDQADILYILYVIKGPSWDTNLSGQHGVTVQNLLGELYGKAGLNQEWGLIRYISGLLRKKVEVLAEACTDLLSHQKQLTVGLPPEPREKIISAPLPPEELTKLIYEASGQDISIAVLTQEIVVYLAMYVRAQPSLFVEMLRLRIGLIIQVMATELARSLNCSGEEASESLMNLSPFDMKNLLHHILSGKEFGVERSVRPIHSSTSSPTISIHEVGHTGVTKTERSGINRLRSEMKQMTRRFSADEQFFSVGQAASSSAHSSKSARSSTPSSPTGTSSSDSGGHHIGWGERQGQWLRRRRLDGAINRVPVGFYQRVWKILQKCHGLSIDGYVLPSSTTREMTPHEIKFAVHVESVLNRVPQPEYRQLLVEAIMVLTLLSDTEMTSIGGIIHVDQIVQMASQLFLQDQVSIGAMDTLEKDQATGICHFFYDSAPSGAYGTMTYLTRAVASYLQELLPNSGCQMQ

SEQ ID NO: 6172 - DNA, 3705 bp, Artificial Sequence
  derived and/or modified sequence
atgcgaagtcggtctaacagtggggtccggttggatgggtatgctaggctggttcagcagacaatcctttgttatcagaatccagttactgggctactgagtgcctcacatgaacagaaagatgcatgggtcagggataacatctactctatattagccgtgtgggggctcggaatggcttatcggaaaaatgctgacagggatgaagataaagccaaagcctatgaactggaacaaaatgtggtcaaactcatgcgagggctcctgcagtgtatgatgcggcaggtggccaaagtggaaaaattcaaacacacacagtctacaaaggattcactacacgccaaatataatacagcaacgtgtggaacagtagtgggggatgatcagtgggggcatctccaggtggacgctactagtttgttcttactatttctggctcagatgactgcgtccgggctccgaattatctttacacttgatgaagtggcattcatccagaacctggtgttttatattgaggcagcctataaggtagctgattatgggatgtgggaaagaggggataaaacaaatcaggggatcccggagctcaatgcctcatccgttggaatggcaaaagctgcactggaagctatcgatgaactggatctctttggagcccacggagggcggaagtcagttatacatgtccttcccgatgaggtggaacactgccaatctatcctcttctcaatgttaccaagggcatccacatccaaagaaattgatgctgggctccttagtatcatctcctttcctgccttcgctgttgaagacgtcaacctcgtcaacgttacaaaaaatgaaataatttctaaactgcagggacggtacgggtgctgtaggttcctccgcgatgggtataagactcccagagaggacccgaaccggctgcactacgatcctgcagaactaaaattatttgagaatattgagtgcgaatggcctgtgttctggacatattttattattgatggagtgttctccggggacgccgtgcaggtgcaggaatatagagaagccctcgaaggaatccttataagaggaaaaaatggaattcgtctcgtgcccgaactctatgctgtgccacctaataaagtggatgaagaatataagaacccccacacagttgatagagtacctatgggaaaagtaccacacctttggggacagtcgctttatatcctatcgagtctcctcgctgaagggttccttgctgctggagaaatagatccgctcaaccggagattctccacttccgtaaagcctgatgtggttgtgcaggttactgtgctcgcagagaataatcatattaaagatctgctccgaaaacatggggtaaacgtccagagtatcgctgatatccacccaatacaggtacagcctgggagaatactttcccatatctacgctaaactcggaagaaacaagaacatgaacctgtctgggcggccttatcgacatattggagtgcttgggacatctaaattatacgtgatacggaaccagatctttacattcacaccacagttcactgatcagcatcatttttacctagcactggacaatgagatgatcgtggaaatgctgcgtattgaactcgcctatctctgtacatgttggcggatgacaggaaggccaacactcacttttccgatctctaggactatgctgacaaacgacggatctgatatacattctgcagtcttgtctactattagaaagctagaagatggatactttgggggagctagagtgaaattaggaaacctgtcagaattcttgacaacatctttttatacgtatctgactttccttgatcctgattgtgatgaaaaactgtttgataatgcctccgaagggacattttcccccgacagtgattcagatcttgtggggtatctggaagatacatgtaatcaggaatcccaggatgaactcgatcactacataaatcacttattgcagtcaacatccctccgatcctatctgccaccactatgtaagaatacagaagatcggcacgtgttttccgctatacactctactagagatatcctatcagtcatggccaaagcgaaaggactcgaagtaccctttgtacctatgacactccctactaaggtactttctgctcatcgcaaatctctaaacctcgtggattcaccccagcctctgcttgaaaaagtgcccgaaagtgactttcagtggccccgcgatgatcacggagatgtcgattgtgagaaattagttgaacagctgaaagactgttcaaatctccaggaccaggctgatatcctatacatcctgtacgtaatcaaaggaccctcttgggatacaaacctgtcaggacagcacggggttacagtccagaacctgctcggagaactctatggaaaagctgggctgaaccaggaatgggggctcattcgctatatatccggactcctgcggaaaaaagttgaagttctagctgaagcgtgcacagatctactatctcatcagaaacagcttacagtgggacttccacccgaacccagggagaagattatatctgctcccttacctcccgaagaattgactaaactaatatacgaagcatcaggacaagatatttctatcgccgtgctcactcaggaaatagttgtgtatctggctatgtatgttcgagctcagccttccctcttcgtcgaaatgctgaggctccggatcggactgatcatccaggtcatggcaacggagctcgctagatccctgaactgctctggagaagaagcttcagagagtttaatgaacctatctccattcgatatgaaaaacctgctccatcatatactctcaggaaaagaatttggggtggaacgcagtgtacgacctatacacagttcaacaagtagtccaactatatccatccacgaagtcgggcatacaggagtgactaaaacagaaaggtcaggaataaatcggctccggtctgaaatgaaacagatgactcgccgcttctctgctgatgaacagttttttagtgtcggacaggccgccagttcttccgcccactcttcaaaatcggctcgatcttctacaccttcttccccaacaggaacttcatcatctgattcgggagggcaccatataggatggggagaacgacagggacagtggctgagaaggaggcgcttggatggggctataaatagagtgcccgtgggattttatcagagagtgtggaaaattctgcagaaatgccatgggctatctatcgatgggtacgtactaccctccagtacaactcgagagatgactccccacgaaattaaattcgctgtccatgtggaatctgtgctcaaccgcgtaccacagcctgaatatcggcagctcctagtggaagcaataatggtacttactttattatcagatactgagatgacatcgataggagggatcattcacgtcgatcaaatcgttcagatggcctcacagcttttcctgcaggatcaggtgtctatcggagccatggatacgctagaaaaagatcaggccactgggatctgccactttttctacgattctgctccatctggagcgtacgggacaatgacatatctcactagggccgtggccagttacctgcaggaactgctccccaattctgggtgtcaaatgcag

SEQ ID NO: 6173 - DNA, 3705 bp, Artificial Sequence
  derived and/or modified sequence
atgcgatcacggtccaactcaggtgtccggcttgacggctacgctcgcctcgttcagcaaactatcctctgctaccaaaaccctgtgactgggctcctgtcggcctcacatgagcagaaggacgcctgggtgagggacaatatctacagcatcctggccgtgtggggactgggaatggcatacaggaagaatgcagacagggacgaggacaaggctaaggcctacgaactggaacagaacgtggtcaagctgatgagaggactcctgcaatgcatgatgaggcaggtggccaaggtggagaagttcaagcatactcagtccaccaaagactccttgcatgccaagtacaacactgcgacgtgcggtacggtggtgggcgatgatcagtgggggcaccttcaagtggacgcgacctcattgttcctgcttttcctggcacaaatgactgcttcggggctgcgcataatcttcaccctggacgaagtggcttttatccaaaatctcgtgttctacatcgaagccgcatacaaggtcgctgactacggaatgtgggaacgtggcgacaagactaaccagggaatcccggagctcaacgcctcatccgttggtatggcgaaggctgcactcgaggccattgatgagcttgatctgttcggtgcacatggtggtcggaaatcagtgatccacgtcctgccggatgaagtcgaacattgtcagtcgattctgttctcaatgctgccgcgggcttcaacctcgaaggagatcgatgcagggctgctctccatcatatcatttccggccttcgccgtcgaggacgtgaacctggtgaacgtcaccaagaacgagattatctccaagttgcagggccgctacggatgttgcaggttcttgcgagacggttacaagacgccgagagaagatccgaaccggcttcactatgatcccgccgaactgaagctgttcgagaatatcgaatgcgaatggccggtcttttggacctacttcatcatcgatggagtgttttctggagacgcggtgcaggtgcaggaataccgggaggcgctggaaggaatcctgatcagaggcaagaatggaattagattggtgccggaactgtacgctgtgccaccgaataaggtcgacgaggagtacaaaaatccacatactgtcgatcgcgtcccaatggggaaagtccctcacctttggggtcagagcctgtatatcctttcgagccttctcgcggaaggattcctcgctgccggagagatcgacccattgaaccggagattttccacttccgtgaagccggatgtggtggtccaagtcactgtgcttgctgagaataatcatatcaaagatctgttgcgcaaacacggggtgaacgtgcaatcgatcgccgacatccatccgatccaggtccagccaggccgaatcttgagccatatctacgcaaagctcgggcggaataagaatatgaacctctcgggtcgcccataccgccatattggagtgctgggcaccagcaaactctacgtgatccgaaaccaaatctttaccttcacgccacaatttactgaccaacatcacttttacttggccctggataacgaaatgatcgtggaaatgctcagaattgaacttgcctacctgtgtacttgctggaggatgaccgggcgcccgaccttgactttcccgatctcgcgcactatgctgaccaacgatggaagcgatatccattccgccgtcttgagcaccatcagaaagctggaagatggatacttcggaggggcccgcgtcaagctgggaaacttgtccgaattcctgaccacttcgttctacacctaccttactttcctcgacccggactgcgacgaaaagctgttcgataacgcgtccgagggaactttctcaccggactcggactccgatcttgtgggctacctcgaagatacttgtaaccaagagtcccaagatgagctggatcattacattaaccaccttctccagtcaaccagcctgaggtcatacctgccgccgctgtgcaagaataccgaggaccgccacgtgttctcggcaatccatagcactcgggacatcctgagcgtgatggccaaagcaaaaggattggaggtcccgttcgtgccgatgactctgcccacgaaggtcctctcagcacaccgcaaaagccttaatctcgtggactcgccgcagcctctgctcgagaaggtcccagaatctgacttccagtggccacgggatgaccacggagatgtggattgcgaaaaactggtggaacagctgaaggactgtagcaacctccaagaccaggcggacatcctgtacatcctttatgtgatcaaaggaccgagctgggataccaacttgtcgggacaacacggagtcaccgtgcagaacctcttgggcgaactctacggcaaggccggtctgaatcaagaatggggactgatcagatatatcagcggcctccttcgaaagaaggtggaagtcctggccgaggcgtgtactgatttgctgtcccaccagaaacagctcacggtgggcctgccgcccgagcctcgcgagaaaatcatctccgcgccgctcccacccgaagagcttaccaaactgatctacgaggcttcgggacaggatatttcaattgctgtcctgacccaggagattgtggtgtaccttgccatgtacgtccgcgcccagccgtccctgttcgtcgaaatgctccgcctgcgcatcggactgatcatccaggtgatggcgaccgaacttgcgagatccctcaactgcagcggagaggaagccagcgaaagcctgatgaacctgtcgccgttcgatatgaagaaccttttgcaccatatcttgtccggtaaagagtttggtgtggaacggtcggtgcgccccatccactcttcaacttcgtccccaactatctccatccacgaagtgggacataccggagtgactaagaccgagcgctccgggatcaaccgcctgagatcggagatgaagcaaatgacccggcgcttttccgccgacgagcagtttttctcggtcggacaggcagctagcagctccgcccattcttcgaagtcagccaggtcatcgacccctagcagccccactggaacctcctcctcggactcgggaggacaccacatcggctggggtgaacgccaaggccagtggctgcgacggcggaggttggacggagccatcaatcgggtgccggtcggattctaccagcgggtctggaagatccttcaaaagtgccacggcctgtcgatcgacggctacgttctgccttcttcaaccacccgcgaaatgactccgcacgagataaagtttgctgtccacgtggagtccgttctcaaccgggttccccagccagaatacagacagttgcttgtggaagcaatcatggtgctcacgttgttgagcgacaccgagatgacttcaatcggaggaatcatccacgtggaccagattgtgcagatggcttcccaactgttccttcaagaccaggtgtcgatcggagcaatggatacgttggaaaaagaccaggcaaccggaatctgccacttcttctacgatagcgcaccctccggagcgtacgggaccatgacctacctgactagagccgtggctagctacctccaagaactgctgcctaactcgggctgccagatgcag

SEQ ID NO: 6174 - DNA, 3705 bp, Artificial Sequence
  derived and/or modified sequence
atgcgctcccggtcaaattcgggagtgagactcgacggatacgctcggctcgtccaacagactattctctgctaccagaatcctgtgaccgggttgctgtctgcgtcacacgaacagaaagacgcctgggtccgggataacatctactctatcctggcggtgtggggacttggaatggcctacagaaagaacgcggatagggatgaagataaggccaaggcctacgagctggaacaaaacgtcgtcaagctgatgcggggccttctccaatgcatgatgcggcaggtggccaaggtggagaagttcaaacatacccaatcaaccaaggactcgctccatgccaagtacaatactgctacctgtggaactgtagtcggagatgaccagtggggccatctccaggtggacgccacttcgctcttcctgctgttcctcgcacagatgactgcctcgggactcagaattatctttactctggatgaagtggccttcatccagaacctggtgttttacatcgaggcggcgtacaaggtggctgactacggaatgtgggaacgcggagacaaaactaatcaaggaatccccgaactcaacgcgtcctccgtcggaatggcgaaggctgcccttgaggctatcgatgagctcgatctgttcggagcgcacggcggccggaagtccgtgatccacgtactgcctgatgaagtcgagcactgccaaagcattctcttctctatgctccccagagcctccacttcgaaggagattgacgccggcctgttgtcgatcatcagctttccggccttcgccgtggaggacgtgaatctcgtgaacgtgaccaagaacgagatcatttcgaaactccaggggcgatatggatgctgccgcttcctgcgcgacggctacaagactcctcgcgaagatccgaacaggctgcattacgacccggcagaactcaaactgttcgagaatatcgaatgcgagtggcccgtgttctggacctacttcatcatcgatggcgttttttcgggtgatgccgtgcaagtccaggagtacagagaggcgctcgaaggcatcctcatccggggaaaaaacggaatcaggctggtgcccgagctctacgcggtcccgccaaataaggtggatgaagaatacaagaacccccacactgtcgaccgcgtgccaatgggaaaggtgccacatctgtggggacagagcctctacatcttgtccagtctgctggcagaaggattcctcgcggctggagagattgatccgctcaaccggcgcttcagcaccagcgtgaagccagatgtggtggtgcaggtgactgtgctggcagagaacaatcacataaaagacctgttgaggaagcacggtgtgaatgtgcagtcgatcgccgatatccacccgatccaggtgcagccaggacggatactgtcccacatctacgcgaaactcggacggaataagaacatgaatctgtcgggtcggccatatcgccacatcggagtcctcgggacctccaagctctacgtcattagaaatcagatcttcaccttcactccacagttcacggatcaacaccacttttaccttgccctggataacgaaatgattgttgaaatgctgcgaattgaactggcctacctgtgcacttgctggcgcatgactggccggccgaccctcaccttccccatctcgcgcactatgcttacgaacgacggatctgacatccactccgctgttctgtctactatcaggaaattggaggacggttacttcggcggcgcacgggtcaagctcggaaacctctcggagtttctgactacttccttttacacttatctgactttcttggacccggactgtgacgaaaagctgttcgacaacgcaagcgagggtaccttctcccctgattcggactccgatctggtgggatacctcgaggacacctgcaaccaagaatcacaagacgaactggaccattacatcaaccatctgctccagagcacctcattgcgatcgtaccttccgcccctgtgcaaaaacaccgaagatcggcacgtttttagcgcgatccactcgactcgcgacatcctgtccgtgatggccaaggcgaaagggctcgaagtgcctttcgtgccaatgaccctgccaacgaaggtcctgtccgcccaccgcaagagcctgaacctggtggacagcccgcagccactgctggaaaaggtgccggagtcggatttccagtggccccgcgatgaccatggagacgtggactgtgaaaagctggtggaacaacttaaggattgctcaaatcttcaggatcaggccgacatcttgtacatcctctacgtgatcaaaggaccatcctgggataccaacctgtcaggacaacacggagtgaccgtgcaaaacctcctgggcgaactctacggcaaggccgggctcaaccaagagtggggactgatcagatacatctcaggactgctccggaagaaggtcgaggtgctggccgaagcctgtaccgacctgttgtcccatcagaaacagctcaccgtcggactgccgccagagccgcgggagaaaatcatctcggcgccactccctcctgaagagctgacgaagctcatctacgaggcctcagggcaagacattagcattgccgtgctgacccaggagatcgtggtgtatctggctatgtacgtcagagcacagccgtcactgtttgtagaaatgctcaggctgcgcatcggtcttatcatccaagtcatggctaccgagctcgctcgctcactgaattgctcgggagaagaggcaagcgaatctcttatgaatctctcgccttttgacatgaagaacctgctgcatcacatcctgtcaggcaaggaattcggagtggaaagatcggtccggccaatccactcttcgaccagctccccgactatctctatccatgaagtaggccatactggagtgaccaaaactgaacggtccggcatcaatagactgagatcggaaatgaagcagatgaccaggcgcttctcggcagacgaacagtttttctcggtgggtcaggcagcttcctccagcgcacactccagcaaaagcgcgcggtccagcaccccctcatcccccacgggcactagctcaagcgactccggaggtcaccatatcggctggggtgagcgccaaggacagtggctcagaaggcgccgcctcgacggagcgatcaaccgcgtcccggtcggcttctaccagcgagtctggaagatcttgcagaagtgtcacggccttagtatagacggatatgtccttccatcatcgaccaccagggagatgacgccgcacgaaatcaaattcgccgtgcacgtggagtccgtgctgaatcgcgtcccacagcccgagtacaggcaattgcttgtcgaagccatcatggtgctcactctgctgtcagacaccgagatgacgtctatcggggggattatacatgtggaccaaatcgtgcagatggcctcccagcttttcttgcaggaccaggtgagcatcggagccatggataccctggaaaaggaccaggctactggcatctgtcatttcttttacgacagcgctccctcgggcgcttacggaaccatgacctacctgactcgcgctgtcgcatcgtaccttcaggaactgctgccgaactcgggatgccaaatgcaa

SEQ ID NO: 6175 - DNA, 3705 bp, Artificial Sequence
  derived and/or modified sequence
atgcgctcccgatccaactctggcgtcagactcgacggctatgctcgcctcgtccaacagactattctttgttatcagaaccccgttacgggactcctgtctgcttctcatgagcaaaaggacgcctgggtccgagacaacatttactccatcttggcggtgtggggcctgggaatggcctaccgcaagaatgcagatcgagacgaagataaggcgaaggcctacgagctggagcagaacgtcgttaagctgatgcgcggacttcttcaatgcatgatgcgccaggtggctaaggtcgagaagtttaaacacacccagtccaccaaggactcattgcacgccaagtacaacacggcgacgtgcggcacggtcgtcggcgatgaccagtggggtcacctccaggtagatgctacttccctcttcttgttattcttggcacaaatgaccgcgagcggactacgtatcatcttcactctcgacgaggtggcgttcattcagaacctggtgttctacatcgaggcagcttacaaggtcgctgactacggaatgtgggagcggggagataagactaaccagggcattcccgagttgaatgcttcatccgtcggcatggctaaggccgctctggaggcaatcgacgagttggacctttttggggcccacggcggccgcaagagtgttatccacgtcctgcctgacgaagtagagcactgccagagcatcttgttctcaatgctgcctcgcgcctccactagtaaggagatcgacgctggactgctgagcatcatttcattccctgctttcgcggtggaggatgtgaatctggttaatgtcaccaagaacgagatcatttccaagctccagggccgctatggctgctgccgtttcctgagggatggatacaagaccccgcgtgaagatcctaaccggctccactatgatccggcagaattgaagctatttgagaacatcgagtgtgaatggcccgttttctggacatacttcatcatcgacggagtgttttcgggtgatgctgtccaggttcaggagtacagagaagctttggagggaatcctgatccgtggaaagaacggcatccgcctggtgcccgaactctatgctgttccaccgaataaggtcgatgaggagtataagaaccctcatacggtggatcgcgtccccatgggtaaggtgccccatctttggggtcagtccctctacatcctgtcgtccctgctggcggagggtttccttgccgctggcgagatcgaccccttgaatcgccgtttttcaacctccgtgaagccggatgtagtcgtgcaggttaccgttctggcggagaacaatcatatcaaggatctgctgaggaagcacggagtcaacgttcagtccatagcagatatccatcctattcaggtgcagcccggacgtattctgtcccacatctacgccaagctgggccgtaacaagaacatgaacctcagcggccgcccctaccgccacatcggcgtcctcggcacgtcgaagttgtacgttattcgcaaccagatattcactttcactccccaatttacggatcagcaccacttttacttagccctagataacgagatgatcgttgagatgctgcgcatcgagctggcctacctctgcacttgctggcggatgactggacgtccgaccctcacctttccgatctcgcgcaccatgttgaccaacgatggttctgatatccactccgctgttctgtctaccattcggaagctggaggacggttattttggaggagcccgcgtaaagctgggtaacttgagtgaattcctcacaactagcttttacacttacctcacgttcttggatcctgattgcgacgagaagctgttcgacaatgcctcggagggtacattttcaccggattctgatagcgacttggtgggttatttggaggacacgtgcaaccaggagagccaagatgagctcgatcactacatcaatcatctcctccaaagcacctcgctccgctcgtacctcccccccctctgcaagaacaccgaagaccgacacgtgttctcggccatccactctactcgcgatattctctcggtcatggcaaaggctaaggggctggaagtgccattcgtccccatgactctccccaccaaggtgctctctgcgcaccggaagagtttaaacctggtcgatagcccccagcccctcctcgagaaagttccggagtcggatttccagtggcctcgagacgatcacggtgatgtggattgtgaaaagctcgttgagcagctcaaggattgctccaacctccaggaccaggcggatatcctctacatcctgtacgtaatcaagggtccttcctgggacaccaacctgagcggtcagcacggtgtcactgtccagaacctcctcggagagttatacggaaaggccggattgaaccaggagtggggactaattaggtacattagtggactgcttaggaagaaggttgaagtgcttgcggaggcctgcacggaccttctgagccaccagaaacagctcacggtgggcctcccccccgagccccgggaaaagatcatctcggcgcctctgccgccggaggaattgacgaagcttatttacgaagcttcgggtcaggacatctcgatagcggtcctcacgcaggagatcgtagtctacctggccatgtacgtccgtgcacagccgtccctctttgtcgagatgcttcggcttagaattggcttgataatccaagttatggccacagagctcgcgcgcagcctgaactgtagcggggaggaggccagcgagagcctcatgaacctgtccccctttgatatgaagaacctgttgcatcatatcctctccggtaaggagttcggtgttgagcggtccgttcggcccattcatagcagcaccagctcccctacaatctctattcacgaggtgggtcacaccggcgttacgaagacggagcgttccggaattaaccgcctccggtccgagatgaaacaaatgacgcggcgcttctccgccgatgagcagttcttctcggtgggacaggctgccagctcctcggcccattcctcgaagtccgcgagatccagcactccctcttcccccaccggcacctcctcgtcggattccgggggccaccatattggatggggagagagacagggacaatggcttcgccgtcgtagactggacggcgcaatcaaccgcgttcccgtcgggttctatcaacgtgtttggaagatcctacagaagtgccacgggctgtccattgacggctacgtgctgcccagctccactacgcgcgagatgaccccccacgaaatcaagttcgctgtgcatgtcgagtcggtcttgaatcgggttcctcagccggaataccgccaactgctggttgaggctattatggtcttgaccctactgagtgatactgagatgacctctatcggaggcataatccacgtggaccagatcgtccaaatggctagccaattgtttttgcaggatcaggtgtctatcggagcgatggataccctcgagaaggaccaagccaccggcatctgccacttcttctatgatagcgcacccagtggagcctatggcaccatgacataccttactcgcgccgtcgccagttacttgcaggagctcctgcctaacagcggttgccagatgcag

SEQ ID NO: 6176 - DNA, 3705 bp, Artificial Sequence
  derived and/or modified sequence
atgcggagccgctcgaattcgggagtcaggctggacggatacgcgcgcctggtgcagcagaccatcctgtgctaccagaatccggtgaccgggcttctgtcagcctcacacgaacagaaggacgcgtgggtccgcgacaacatctactccatcttggcggtgtggggactggggatggcctaccggaagaatgccgatagagacgaggacaaggcgaaggcctatgagctggagcagaacgtggtgaagctcatgcggggtcttttgcagtgtatgatgcgccaggtggccaaggtcgagaaattcaagcacacccaatccactaaagactcgctccacgccaagtacaacaccgccacgtgtggcaccgtggttggagatgatcagtggggacacctgcaagtggatgcgacttctctgttcctcttgttcctggcccagatgaccgcatcaggactgcgaatcatcttcaccctggacgaagtggcattcattcagaatctggtgttctatatcgaagcggcttacaaggtggcagattacgggatgtgggaaagaggagacaagacgaaccagggcatcccggagttgaatgccagctcggtgggaatggcgaaagctgcgcttgaagccatcgatgaactggatctgttcggcgcccacggtggacgcaagtcggtgatccacgtgctgcccgatgaagtcgaacactgccagtcgattctcttctcgatgctcccgagggcctccacctcaaaagagatcgatgccggtttgctcagcatcattagctttccggccttcgccgtggaggatgtgaatctggtgaacgtcaccaagaacgaaatcatctcaaaactgcagggacgatacggatgttgtcgcttcttgcgcgacggctacaagactcctcgggaggatccgaacaggctgcattacgacccggcagagcttaaactgtttgagaacatcgaatgcgaatggccggtgttttggacttacttcatcatcgacggagtgttcagcggggatgcagtgcaagtgcaagaatacagagaagctctggagggaatcctgatccggggaaagaacggaatccggctcgtcccagagctgtacgccgtcccgccaaacaaagtggacgaggagtacaaaaacccgcacactgtcgatcgcgtgcctatgggtaaggtgccgcacctctggggtcaatcactctacattctgtcgagcttgctggctgaaggattcctggcagcaggagaaattgacccgttgaaccgccgcttctcgacctcggtgaagccagacgtcgtggtgcaagtgactgtgttggcagaaaacaatcacatcaaggatctcctcagaaaacatggcgtgaacgtgcaatccatcgcagatattcacccgatccaggtccagccaggccgcatcctgtcccatatctatgcgaagttggggagaaacaaaaacatgaacttgtccggtaggccgtacagacatattggagttctgggcacctcgaaactctacgtgatcagaaaccagatcttcacctttaccccgcagtttaccgatcagcaccatttctatctggccctggataacgagatgatcgtcgaaatgctgaggattgaactcgcgtacctgtgcacctgctggagaatgactggccgtccgacccttacgtttccgatttcacggactatgctcaccaacgacggttcagatatccatagcgctgtcttgtctactatccgaaaacttgaggacggatatttcggcggtgcccgagtgaaacttggaaacctgtcggagttccttactacgtccttctacacttacctcactttcctggatccagattgcgacgagaagctgttcgataatgccagcgaggggactttcagccctgattccgattcggacctcgtcgggtatctcgaagatacgtgcaaccaagagtctcaggatgaattggatcattacatcaatcacctgctgcaatcgacctccttgcggtcctacctgccgccgctctgcaagaatactgaggatcgccacgtgttttcagcgatacacagcacccgggacattctgagcgtgatggccaaagccaaagggctcgaagttccgtttgtcccgatgactttgccgactaaagtcttgtctgcacatagaaagtcgctgaatctggtggactcaccgcaaccgctgctggaaaaagtgccagaatcagacttccagtggccgcgggacgaccatggagatgtggattgtgaaaaactggtggaacagctgaaagattgcagcaatctgcaagaccaagcggacatcctgtatatcctgtacgtcatcaaaggaccgtcatgggacaccaatctcagcggacagcacggagtcaccgtccagaacctcctgggtgaactgtacgggaaggccggcctcaaccaggagtgggggctgatcagatacatctctgggttgcttagaaagaaggtcgaggttcttgctgaggcttgcactgatctgctgtcgcaccaaaaacaactgactgttggacttcccccggagccgcgcgagaagatcatctcagccccgctccctccggaggagctgactaaactgatttacgaagctagcggtcaggacatctcaatcgccgtgctgacccaggagattgtggtgtacctggcgatgtacgtcagggctcagccgtcactgttcgtcgagatgctgcggctgagaatcggactgatcatccaggtgatggcgaccgaattggccagatctctcaactgcagcggagaagaagcgtccgagtccctgatgaatctttccccattcgacatgaagaatctgttgcaccatatcctctccggaaaggaattcggagtcgaacgctcggttagaccgatccactcaagcacctcgtcgccaaccatctcaattcacgaggtgggacacactggagtgactaagaccgaacgcagcggcatcaacaggctgcggtccgagatgaagcagatgactaggagattttcagctgatgagcagttcttttcggtgggacaggcggcatcgagctccgcccatagctccaagagcgcccgctcctccactccatcctcgccgactgggaccagctcctccgactccggcggccatcatatcggatggggcgagcggcagggacagtggctccgccgcagacggctggacggagcaattaacagagtgcctgtcggattttaccagagagtttggaagattctgcagaagtgccacggactgtcgatcgacggatacgtgctgccctcgtcgaccactcgggaaatgaccccgcacgaaatcaaatttgccgtgcacgtcgaatcagtcctcaatcgggtccctcagccggagtacagacaactgctcgtggaggcaatcatggtgctcacgctcttgtcggataccgaaatgacttccattggcggaatcatccacgtggaccagatcgtgcaaatggcgagccaactgttcctgcaagatcaggtgtccataggagcgatggatacgctggaaaaggaccaggccactggcatttgtcacttcttctacgactccgccccttccggcgcttatgggactatgacctacctgacgagagctgttgctagctacctgcaagagctgctgcctaacagtggctgccagatgcag

SEQ ID NO: 6177 - DNA, 3705 bp, Artificial Sequence
  derived and/or modified sequence
atgcggagcaggtcaaactccggtgtgcgattggatggatacgctaggctggtgcagcaaactattttgtgctaccagaaccccgtgacggggctgctgtccgcatcccacgaacaaaaagatgcctgggtgagagacaacatttactcgattcttgcagtgtgggggttgggtatggcataccgcaagaatgccgatagggacgaagataaggcaaaggcatacgagctggaacagaacgtggtcaagctcatgcgcggactccttcagtgcatgatgaggcaagtggccaaagtggagaaattcaagcatacccagagcaccaaggattcccttcacgccaagtataacaccgcaacctgcgggaccgtggtgggagatgaccagtggggacatctccaagtggacgcaacctccctgtttctcctgttcttggcccaaatgaccgcttccggactgcggatcattttcaccctggatgaggtggcgtttattcaaaatctcgtcttttacatcgaggcggcatacaaggtggcggattacggaatgtgggaaagaggtgacaagactaaccaaggaattccggaactcaacgcatcctccgtgggtatggcaaaagcagcgttggaggcgattgatgagctcgatctgttcggagcccacggaggcaggaagtccgtgattcacgtgcttccagatgaagtggaacattgtcaaagcattttgttctcaatgcttccaagagcatcgacttccaaggagattgacgcaggacttctctcgattatctcattccctgcattcgcagtggaagatgtcaacctggtcaatgtgaccaagaatgaaatcatctccaagttgcaaggtcgttacggttgttgtaggttcctgcgggatggatacaagacccctagagaagatccgaacagattgcattacgatccagctgagcttaagctgtttgaaaacattgagtgtgaatggccagttttctggacttacttcattatagatggcgtgttttcgggggatgcggtgcaagtgcaagaataccgggaagcactcgaaggaattctgattcgtggcaagaacggtatcagacttgtgcctgaactgtacgcagtgccgccgaacaaagtcgatgaagagtacaaaaatcctcacacggtggatagggtgccaatgggtaaggtccctcatttgtggggacaaagcctgtacattctttcaagcctgctggcagaaggatttcttgccgcaggggagattgacccactcaatcggaggttttccacctccgtgaagccagacgtggtggtgcaggtgaccgtgctggcggaaaacaatcacattaaggacctgctgagaaagcatggggtgaacgtgcagtccatagcagacatccatcctattcaagtccaacctggacggattctctcacatatctacgcaaaactgggcagaaacaagaacatgaatctgagcggcagaccatacagacatattggagttctgggaacttccaaactgtacgtgatacggaaccaaatctttacttttacccctcaatttaccgatcagcaccatttctaccttgcactggataatgagatgattgtcgaaatgcttcggattgagctggcatacctctgtacttgctggcggatgactggtcggcctaccctgactttccctatatcccgcaccatgttgaccaacgacggatcggatatccattccgcagtcctgagcactattagaaagctggaggacgggtacttcggaggtgcacgggtcaaacttggtaatctttccgaatttctgaccacttcattctacacctaccttacttttcttgaccctgattgtgacgagaaactgtttgataacgcctccgaaggtacctttagccctgattccgatagcgatctcgtcggctaccttgaagatacgtgcaaccaggagagccaagatgaactggaccattacattaatcatctgctccagagcacctccctcagaagctacctgccacctctttgtaaaaacacggaggataggcatgtcttttccgcaattcactcaacgcgcgatatcttgtcggtgatggccaaggcaaaggggctggaagtgccgtttgttccgatgacccttccaaccaaagtgctctcagcccatcgcaagtcactgaatctggtggattccccacagccactgctggagaaggtacccgagtccgattttcaatggccaagagatgatcacggggatgtggattgtgagaaactggtcgaacaactcaaagattgctcgaaccttcaggatcaggcggatattctgtatatcctgtacgtgattaaggggcctagctgggacactaatctctcgggacaacatggagtcacggtgcaaaacctgctgggcgagctttacggcaaagctgggcttaaccaagagtgggggcttattagatacatttccggcctgctgcggaagaaggttgaagtcctggcggaagcctgtaccgatcttcttagtcatcagaagcaactgaccgtggggttgcctcccgaaccccgggagaagatcatttccgctccgcttcctccagaagagcttacgaagctgatatacgaagccagcggccaggatatatccattgcggtgcttactcaggaaattgtggtgtatctggctatgtacgtgagggcacagccctcactgtttgtggagatgctccggctgagaataggactgataattcaggtcatggcgactgaacttgcacgctcacttaactgctcgggagaagaggcatccgaatcactgatgaatctgagtccttttgacatgaagaatctccttcaccatatcctgagcggcaaagagtttggtgtggaacgctctgtccgccccatccattcgtccactagctcgccaactatttcgatccacgaggtcgggcataccggggtgactaagacggagcgctcaggaatcaaccgacttcgatcagagatgaagcagatgaccagacgattctccgcggatgaacagttcttttcggtcggacaagccgcaagctcttccgcccactcgtcgaaatccgctcgctcgagcactccctcctccccaaccggaacctcgtcatccgattccgggggtcaccacattggatggggcgagcgccagggacaatggctccggagaaggcggctcgatggagcaatcaatagggtgcctgtcggattttaccaaagagtctggaaaattctccagaagtgtcacgggctctccatcgatggctacgtgctgccgagctccaccaccagagaaatgacccctcatgagatcaagttcgcagtgcatgtggaatcggtgctgaatagggtcccccagccagaatatagacaactgcttgtggaagcaattatggtgcttaccctgctttcggatactgaaatgacgagcatcggaggaattatccatgtggatcaaatagtgcaaatggcttcgcaactgtttctgcaggaccaagtctcgattggtgcaatggacacgctcgagaaggatcaggcgactggtatctgtcacttcttttacgactcggccccgtcaggtgcatatggtaccatgacctacttgacccgagccgtggcgtcgtaccttcaagagttgctgcccaacagcggatgtcaaatgcag

SEQ ID NO: 6178 - DNA, 3705 bp, Artificial Sequence
  derived and/or modified sequence
atgcgctcgcgctcgaactccggcgtgagattggacggatacgcccggctggtgcagcaaaccattctctgctaccaaaatcctgtgacgggacttttgtcagctagccatgaacaaaaggacgcatgggtcagagataacatttacagcatcctcgccgtctggggcctgggaatggcatatcgcaagaatgctgatcgggacgaagataaagcgaaagcatacgagctggaacagaacgtggtcaagctgatgcgcggcctcctccagtgcatgatgcgtcaggtcgccaaggtggagaagttcaaacacactcagtccaccaaagactcgctgcacgctaagtacaacaccgcgacttgtggaactgtggtcggagacgaccagtgggggcatcttcaagtggacgcgactagcctcttcttgctgttcctggcccaaatgaccgcctccggactccgcatcatctttaccctggacgaagttgcgtttatccagaacctggtgttctacatcgaagccgcttacaaggtcgcggactacggcatgtgggagcgcggtgataagaccaaccaaggtatcccggaactcaacgccagcagcgtcggaatggccaaagccgccctcgaggccattgacgaactcgaccttttcggagcacatggcgggcgcaaatccgtcatccacgtcttgccggacgaagtggaacattgtcaatcaatcctcttctcaatgctcccccgggcctcgacgtcaaaggagattgacgctggactcctctccatcatcagcttcccagctttcgctgtggaagatgtcaacctggtcaatgtcaccaagaacgagattatctcgaagctgcaggggcggtacggctgttgtcgctttctgagagacggatacaaaaccccacgggaggatccgaatcgcctccactacgacccagcggagctgaagctcttcgagaatatcgaatgtgaatggccagtgttttggacttacttcatcatcgacggagtgttctccggagacgcggtgcaggtgcaggaataccgcgaagccctggaagggattttgatacgcggtaagaatggcatccgcctcgtgcccgagctgtacgccgtgccgccgaacaaagtggacgaggagtacaaaaacccgcacactgtcgaccgggtcccgatgggaaaggtgcctcacctgtggggtcagagcctctacatcctctcctccctgttggccgagggcttcctggcagccggagagatcgaccccttgaaccggcgcttttcgacgtcggtcaagccagacgtggtggtgcaggtcaccgtcctggctgaaaacaaccatatcaaggacctgctcaggaaacacggagtcaacgttcaatcaatcgcggacatccatccgatccaagtgcagccaggccgcatcctttcccacatctatgcgaaactcggtaggaacaagaacatgaatttgagcggccggccttaccggcatatcggggtccttggaacctccaagctgtacgtgatccgcaatcagatcttcactttcactccgcaatttaccgatcagcaccacttctacctggcgctggacaatgaaatgattgttgagatgctgagaattgaactggcctatctttgcacttgctggcgcatgaccggacgcccaaccctgaccttcccgatctccagaaccatgctgactaatgacggaagcgatatccattccgctgttctgtcgaccatccggaaactggaagatgggtacttcggaggcgcccgggtcaagttgggcaatctttccgaattcctgacgacctcgttttacacttacttgactttcctcgacccggattgcgatgaaaagctgttcgacaatgcctcggagggtacttttagccccgactctgattccgatctggtgggatacctggaggacacttgcaaccaggagtcgcaagatgagctggatcactacatcaaccacttgctccagtcgacttcgctgcgctcgtacctcccaccactgtgtaagaacaccgaagataggcacgtgttctccgcaattcattcaactcgcgacatactctcagtgatggcgaaggccaagggactggaggtgccctttgtgccgatgaccttgccgactaaagtgctcagcgcccatcggaagtccctcaacttggtggattccccacagcctcttctggaaaaggtcccggaatccgacttccagtggccgcgggatgatcacggtgatgttgattgcgagaaactggtggaacagctcaaggactgcagcaatctccaggatcaggcagatatcctgtatatcctgtatgtcatcaagggaccgagctgggacaccaacctgtcggggcagcacggagttactgtgcagaatttgttgggcgagctctacggcaaggctggactgaaccaggagtggggactgatccgctacatctccggactgcttcgcaaaaaagtcgaggtgctcgccgaggcctgcactgacctgctgtctcaccaaaagcaacttaccgtgggactgccgcccgaaccgcgtgaaaagattatctccgctcctctccccccagaagaactgactaaactcatctacgaggcatccgggcaggatatcagcattgcagtcctgacgcaggagatcgtggtctacctcgccatgtatgtgcgggcccaaccttccctgttcgtcgagatgctgcgtctgagaatcgggctgatcattcaagtaatggcgactgagctggccagatcgctcaactgctctggagaagaggcctcggaaagcctcatgaacctgagcccatttgacatgaagaacctgcttcaccatatcttgtcaggtaaggagttcggagtcgaacgatcggttagaccgatccactcgtccaccagctcgcctaccatctccatccatgaagtcggacatactggcgtcactaagaccgaacggtccggcatcaatagactccgctcagaaatgaagcagatgacgcgcaggttttccgcagacgaacagttcttctcggtgggacaggcggcatcgagctcagcacatagctcgaagtcggccagatcctccaccccgtcatcgccgactggaactagctcctccgatagcggtggacatcatatcggatggggcgaacggcaggggcagtggctgcggaggcgccgcttggatggtgccatcaatcgcgtgcctgtggggttctaccagagggtgtggaagatacttcagaagtgtcacggactgtcaatcgacggatacgtgctgccttcatccactacccgcgaaatgaccccgcacgaaatcaagttcgctgtccatgtggagtccgtgctgaaccgcgtcccccagccggaataccggcaacttctggtggaagcaattatggtgctgacgctgctctccgacaccgaaatgacgtcgatcggaggcatcatccacgtggaccagatcgtgcagatggcctcccagttgttcctgcaggatcaagtcagcatcggtgccatggacacgttggaaaaagaccaagcgactggtatttgccatttcttctacgactccgcaccgtcaggggcttacggaaccatgacctaccttactagagcggtcgccagctacctgcaagaactgttgccgaactcggggtgccagatgcaa

SEQ ID NO: 6179 - DNA, 3705 bp, Artificial Sequence
  derived and/or modified sequence
atgcgctcacggagcaactcgggcgtcagactcgacggctacgccagacttgtccaacaaaccatcctctgctaccagaacccggtcactggtctgctgagcgcgtcccacgaacagaaagatgcctgggtccgggacaatatctattcaattctcgcggtgtggggtctgggaatggcgtacagaaagaatgcagatcgcgacgaggacaaggcaaaggcctacgaactggaacaaaatgtggtcaagttgatgcgaggactgctccagtgcatgatgcggcaagtggcaaaggtggaaaagtttaagcatactcagagcaccaaggatagcttgcacgcaaagtacaacacggccacctgcggaaccgtcgtgggtgacgaccagtggggacatttgcaggtagacgccacttcgttgttcctcctcttccttgcgcaaatgacggcgtctggcctccgaatcatattcaccctggatgaagtggctttcattcaaaacctggtgttttacatcgaagcagcctacaaggtcgcagactacggaatgtgggaaaggggcgataaaaccaaccagggcatcccggagcttaacgcctcaagcgtgggaatggcaaaggcagcgctggaggcgatcgacgagttggacttgtttggagcccatggcggacgaaagtcagtcatccacgttctcccggatgaggtggaacactgccagtctatcctcttcagcatgcttccgcgggctagcacctcgaaggagattgatgctgggctcttgtctatcatctccttcccagctttcgccgtggaggacgtcaatctggtgaatgtcaccaagaacgagatcatctctaagctccaaggtagatacggctgttgcaggttcctgcgcgatggttacaagaccccacgcgaggaccctaaccgcctccactacgacccggcagaactgaagctgttcgaaaacattgagtgtgaatggcccgtattctggacctacttcatcatcgacggtgtgttcagcggagacgcagtccaggtgcaggaatacagagaagcgctggaaggaattctgatccggggaaagaacggtattcgcctcgtcccggagctgtacgccgtgccgcctaacaaggtcgacgaagagtacaagaatccccacaccgtggatcgtgtgccgatgggcaaagtcccgcacctctggggccaatcgctgtacattctgtcgtccttgctggccgaaggattcctggctgcgggcgagatcgacccgctcaatcggcgattctccacttccgtgaaaccagatgtggtggtccaggttactgtgctcgcggagaataaccacatcaaggatcttctgcgcaagcatggggtgaacgtgcagtcgatcgctgacattcatcctattcaagtgcaacctggacgcatcctctcccacatctacgctaaactgggacgcaacaagaacatgaacctctcgggtagaccgtatcggcatatcggagtcctcggaacgtcgaagctctacgtaatcaggaaccagattttcacttttaccccacagttcactgaccagcaccatttctacctcgccctcgataatgaaatgattgtagagatgctccggatcgagctcgcatacctgtgtacttgctggcggatgacggggcgccccaccctgacttttccgattagccgcaccatgctcaccaacgacggaagcgacatccactccgcggtcctgtccactataagaaaactggaggatggatacttcggaggggcacgcgtcaagctcgggaacctgtccgaatttctcactacttccttctacacttatctgacgtttctcgacccggactgcgatgagaaattgttcgacaacgcctccgagggaactttctcccctgactctgacagcgatctggtgggataccttgaggatacctgcaatcaggagtcacaagatgagcttgaccactacatcaatcatctgctgcaatcgactagcctgcggagctacctgcctccactgtgcaagaacaccgaagatcgtcacgtgttttctgccatccattccacccgcgacatcctttcggtgatggctaaagccaagggactggaagtgcctttcgtccctatgactctcccaacgaaggtgctctcagcacatcgcaagtcactgaacttggtggactctcctcagccgttgctggagaaggtgccagaatcggacttccaatggcccagagacgaccacggtgacgtggactgcgagaagctggtggaacagctcaaagactgttcgaacctgcaggaccaagctgatatcctttacatcctgtacgtcatcaagggaccgtcctgggataccaacctttccggacaacatggggtgaccgtccaaaaccttctgggagaactgtacggaaaagccggcctgaatcaggagtggggactcatccggtacatctctggtctgctgcggaagaaggtggaagtgctggccgaggcgtgcactgacctgctgtcgcaccaaaagcagctgacggtgggtctgccgccagaaccgagagagaaaatcatctccgccccgttgcccccggaagagctgaccaaattgatctacgaagcgtcgggacaagacattagcatcgctgttctgacccaggaaatcgtggtgtacctggccatgtacgttcgcgcccagccatccctctttgtcgaaatgcttagactgaggatcgggctgatcatccaggtgatggcgactgagctcgcacggtcgctcaattgctccggagaggaagcctctgaatcactgatgaatctgtctcctttcgacatgaaaaatcttctgcaccacatcttgtcgggcaaggaattcggcgtggaacggagtgtaagacccatacattcatcgacctccagccccactatctcgatccacgaagttgggcacaccggggttactaaaaccgaacggagtgggatcaaccgacttcggtcggaaatgaagcagatgacccgccgcttctcagccgatgagcagttcttttccgtgggccaggccgcgtccagctcagctcatagctcgaaaagcgccaggtcgtccaccccaagctcaccaacggggacttcatcaagcgattcagggggccaccatatcggatggggagagagacaaggacagtggctcaggcgccgccggctggatggggccatcaacagagtgccggtgggattctaccagcgcgtgtggaaaatacttcagaagtgtcatggcctcagcatcgatggctatgtcttgccttcgagcactacccgcgagatgaccccacacgaaatcaagtttgctgtgcacgtggagtcggtgctgaatcgggtgccacaaccggaatacaggcagttgctggtcgaagcaatcatggtgctgactttgctgtctgatacggagatgacttcaatcggaggaatcattcacgtggatcagatcgttcagatggcctcccaactgttcctgcaagaccaagtgtcgatcggagcgatggacaccctcgaaaaagaccaggccaccggcatttgccatttcttttacgattccgccccgagcggtgcatatggtactatgacctacctgactcgggcggtggcctcctatctgcaggaactgctgccgaacagcgggtgccagatgcag

SEQ ID NO: 6180 - DNA, 3705 bp, Artificial Sequence
  derived and/or modified sequence
atgcgctctcgctcaaacagtggagtccgcctcgacggttacgcccgcctggtgcagcagaccatactttgctaccagaaccccgtgacaggcctgctttcagcatcccacgagcaaaaggacgcttgggttagggataacatctattcaatcctggcagtatggggtctgggaatggcctacagaaaaaacgccgaccgtgatgaagacaaggctaaagcctatgagttggaacagaatgtcgtcaaacttatgcgcggactgctgcaatgtatgatgcgccaagtggccaaagttgagaaattcaaacacactcagtcaacaaaggacagtctgcacgcaaagtacaataccgccacctgcggcaccgttgtgggcgacgatcaatggggccacctccaggtggacgccaccagcctgtttcttctgttcctggctcagatgacagcctccggactgagaatcatttttaccctggacgaagtggctttcatccagaatctggtgttctacatcgaggctgcatacaaagtcgccgactatggcatgtgggaacgtggtgacaagactaaccagggcattcctgaactgaacgcttcctccgttggcatggctaaagctgccttggaggctatcgacgaactggacctttttggcgctcatggtggcagaaagagtgtaattcacgttctgcccgatgaggtcgaacactgccagagcatcctcttctcaatgctcccacgtgcctctacctccaaagagatcgatgctggccttctgagtataatttcatttccagcttttgctgttgaagatgtcaaccttgtgaatgtaacaaagaacgagatcattagcaaactgcagggccgctacggctgctgccgcttcctccgtgacggctacaagacacctcgcgaggaccccaacagacttcactacgaccccgccgaattgaagttgtttgagaatatagagtgcgagtggcctgttttttggacctactttatcatcgacggtgtgttttctggagacgctgttcaggtccaagagtatcgtgaggctctggagggtattctgatcagaggaaagaatggcattcgtctggtacctgagctttacgcagtcccacccaacaaagtggatgaagaatataagaatcctcacactgttgaccgtgtaccaatgggaaaagttccacacctttggggacaatcactgtatatcctgagctcactgttggccgaaggcttcctggctgctggagaaatcgatcccttgaacagaaggtttagtactagtgtcaagccagatgtcgttgttcaggtgacagtccttgccgaaaataaccacataaaggacctgctgagaaaacacggagttaacgtgcaatccatagccgacattcaccccatacaggttcagcctggccgcattctttcccatatctatgccaagttgggcagaaataagaacatgaacctttccggacgtccctaccgtcatataggcgtgctgggaacttcaaagttgtacgtgatcaggaaccagatctttactttcactcctcaattcactgatcagcatcatttctatttggccctggacaacgagatgattgttgagatgctgagaatcgaactcgcatacttgtgtacatgctggagaatgaccggccgccctacactgacattccctatttctcgcactatgcttacaaatgacggttctgacatccattctgccgtcctctccacaattagaaagttggaagatggctacttcggcggcgcccgtgtaaagctcggcaacctctcagagttcctcaccacctctttttacacatatctcacatttttggatccagattgcgacgaaaagttgttcgacaacgcatccgaaggaacttttagccccgattccgatagcgacctggtaggttacctggaagatacttgcaaccaggagtcacaggatgagctggatcactacataaaccacctgctccagagcaccagtcttagaagctaccttcctcctctttgtaaaaacacagaggataggcatgtgttcagcgctatccattccacccgtgatatcctcagtgtcatggctaaagcaaaaggcttggaagtgccttttgtgcccatgacactcccaactaaagtcctttccgcacacaggaaatcattgaatttggtggatagcccccaacctttgttggagaaggtgccagaatccgacttccagtggcctagggacgaccacggcgatgtagactgcgaaaagctggttgagcaactgaaggactgtagcaatctgcaagaccaggccgacattttgtatatcctttacgttatcaagggcccttcttgggatacaaacctgtccggtcagcacggcgtcacagtgcagaaccttttgggagagttgtacggtaaggccggccttaatcaggagtggggcctgattaggtatatctccggcctgttgagaaagaaggtcgaagttcttgccgaagcttgcactgaccttctgtcccaccagaagcaactcactgtgggcctgccacccgagcctagagaaaaaatcatttccgctcccttgccccccgaagagcttacaaaactgatctacgaggcatccggccaagatatttctattgctgtattgacacaggagatcgttgtatacctggctatgtatgtccgtgcacagccttccctgtttgtagagatgctcaggttgcgcattggtctcatcatccaagtaatggctacagagctcgccagaagtctgaattgcagcggcgaggaagccagtgagtctctgatgaatctgagccccttcgacatgaagaacttgcttcaccatatcctgagcggaaaggaattcggcgttgagcgtagcgtacgcccaattcatagctccacatcatctcccaccatttccatccatgaggtgggtcacaccggtgtcacaaagactgagaggagtggcatcaataggctccgcagcgaaatgaagcaaatgacccgccgcttcagtgccgacgaacaattcttttccgtaggtcaagctgcttccagtagcgctcactctagcaaatcagcccgctcctccactccctcttcccccacaggaactagcagttctgacagcggtggtcatcacattggatggggagaaagacagggacagtggctgcgtagacgcaggctggacggcgctattaatcgtgtgccagttggattctaccaacgcgtctggaaaattctgcaaaagtgtcacggtttgtcaattgacggctatgtattgccatcctcaacaactcgcgagatgacacctcacgagatcaagttcgccgtgcacgtcgagtcagtcctgaacagagtgccacagcctgaatacaggcaactcctggtggaggccatcatggtgctgacattgctcagcgatacagagatgacttccattggaggcattatccacgtggaccagattgttcagatggctagtcaactcttcttgcaggaccaggtcagcatcggcgccatggataccttggaaaaggatcaggcaacaggtatctgccatttcttctacgatagtgcaccatctggagcatacggcacaatgacctacctgacacgtgctgtggcttcctatctccaggaactgctcccaaacagcggatgccaaatgcag

SEQ ID NO: 6181 - DNA, 3705 bp, Artificial Sequence
  derived and/or modified sequence
atgcgttctcggtcgaatagtggagtgcgtctggacggttacgcacgattggtgcagcagactattctgtgttatcagaacccagtgaccggactgctgtctgcatcgcatgaacaaaaggacgcatgggtcagagataacatttactcaatacttgctgtgtggggtctgggaatggcataccgtaagaacgcggatagagatgaagataaggcgaaggcatacgaactcgaacagaacgtcgtgaaactgatgagaggcctgcttcaatgcatgatgagacaggtggccaaggtggaaaagttcaaacacacgcaatcgaccaaggactcgctgcatgcaaaatacaatactgcaacctgtgggactgtggtcggggatgatcaatggggtcaccttcaagtggacgcaacttcccttttcctgctttttctcgcacaaatgactgcctcgggactgagaattatcttcaccctcgacgaggtggcctttatacagaatcttgtgttttacattgaagcagcttacaaggtggctgattacggaatgtgggaaagaggagataagactaatcagggaattcccgagcttaatgccagctcagtggggatggcgaaggccgccctcgaagcaattgacgagctggatctttttggagcacatggtggtcgcaaatcggtgatccatgtgcttccggacgaggtggagcattgccaatcaattctcttttcaatgctgcctagagcatctacctcgaaggaaattgacgctggccttctttcgatcattagctttcctgcattcgcagtggaagatgtcaacctcgttaatgtgacgaagaatgagatcatctccaagctgcaaggaagatacggatgttgccgttttcttcgggatggatataagacccctcgagaagatcctaaccggctgcactacgaccctgcggaactgaaactttttgaaaacatagagtgtgaatggcctgtgttttggacctacttcattatcgatggcgtgttttcgggagatgctgtgcaagtgcaagaatacagagaagccctggaaggaatccttatacggggtaagaacgggatccgactggtccccgaactgtacgctgtgcctccaaacaaggtcgacgaggaatacaaaaatccacacaccgtcgatagggttcctatgggcaaggtgcctcatctctggggacagtcgctttacattctgtcatcgcttctggctgaaggttttctggcggcgggtgaaatcgatccacttaatcgcaggtttagcacctccgtgaagccagatgtggtcgtgcaggtgaccgtgcttgcggaaaacaaccatatcaaggacctcctgcgcaaacatggtgttaacgtacagtcgattgccgatatccatcctatacaggtgcagccgggacgtattctgtcacatatctacgccaagctgggtagaaacaagaatatgaacctttctggcagaccttacagacacattggagtcctgggaacctcgaagttgtacgtgatacgtaatcagatctttacgtttactcctcaattcactgatcagcatcatttctatctggccttggataacgaaatgatcgtggagatgctgagaatcgaacttgcatatttgtgcacctgctggagaatgacgggcagaccaactctgacctttcctatcagccgtaccatgctcaccaacgacggttcggatatccatagcgcagttctgtcgactattcgaaaactggaagatggatactttggaggtgcaagggtgaaactcggcaacctgtcggagttcctcactacctcattctacacttacctcacttttctggacccagactgtgacgaaaaactgtttgataacgcatccgaaggaacttttagcccagattcagatagcgatcttgtgggttacctggaggatacctgcaatcaggagtcgcaagacgaacttgaccattacataaaccacctgctgcaatccacctccctgagatcgtaccttcctccactgtgtaagaacaccgaggaccgacatgtgttctccgcaattcatagcaccagagatatcctttcagtcatggcaaaagcaaaaggactggaagtgccattcgtccctatgacccttccaactaaggtgttgtccgctcatagaaagtccttgaacctggtcgacagccctcagcccctcctcgaaaaggtgcctgagtcggatttccaatggccacgcgacgatcatggtgacgtggactgtgaaaaacttgtggaacaactgaaggattgctccaacctgcaagaccaagcagacatactttacatcctctacgtcataaagggtccctcctgggacactaaccttagcggacagcatggagtgaccgtgcagaacctgctgggcgaactgtacggtaaggcagggttgaatcaggagtgggggcttatcagatacatatcaggactgctgcgaaagaaggtggaagtgttggcagaagcatgtactgacctcctgtcccaccaaaaacaactgaccgtgggactccctccggaaccccgggaaaagattatctccgcaccactccccccagaagaactgactaaactcatttacgaggcatctggtcaagatatttccattgcggtgctgactcaagaaatcgtggtttacctggcaatgtacgtgcgtgctcagccatcactgtttgttgagatgctccgccttagaataggactcatcattcaggtgatggcaaccgagcttgcacgttcccttaactgttcaggtgaagaagcctcggagtcactgatgaacctttcccccttcgacatgaaaaaccttctgcatcatattctcagcggaaaggaattcggagtggaacgttccgtgcggccgatccattcatccacgtccagcccgacgatttcaatacatgaggtcggacatactggggtgacgaaaactgagaggtcaggaatcaaccgcctcaggtcagagatgaagcagatgacgcgcaggttttcagcagacgaacagttctttagtgtcggacaagcagctagcagcagcgctcacagctcaaaatccgcacggtcgagcactccatcatcgcctactggaactagctcgtccgacagcggaggtcatcatatcggatggggcgagagacaaggacaatggctgcgacgacgccgattggacggtgccatcaaccgcgtcccggtcggattttaccagcgcgtgtggaagatccttcaaaaatgtcatgggctttccattgatggttacgtcctcccatcgagcaccacccgggagatgacccctcacgagattaagtttgcggtgcatgtcgaaagcgtgctgaacagggtcccacaacctgaatataggcaacttctggtggaagcaatcatggtgctgaccttgctgagcgacacggaaatgaccagcattggtggcataattcacgtcgatcagattgtgcagatggcctcgcaactgttcctccaagatcaagtgagcattggagcaatggataccctcgaaaaagaccaggccactggcatctgtcatttcttttacgattcggctcctagcggtgcgtacggcaccatgacttatcttactcgcgcagtggcatcgtacctccaagaactccttcctaatagcggctgtcaaatgcag

SEQ ID NO: 6182 - DNA, 3705 bp, Artificial Sequence
  derived and/or modified sequence
atgaggtctcgctctaacagcggcgtgcggctggacggttacgctcgtctcgtgcagcaaacaattctgtgttatcagaaccctgttactggcctgctgtcggctagccatgagcagaaggacgcatgggtccgcgacaacatttactccattctggccgtgtggggactggggatggcctatcgtaagaatgcagatcgggacgaggataaggctaaggcttacgagttggaacaaaacgtggtgaagctgatgagaggtctactacagtgcatgatgagacaggtagctaaggtggaaaagttcaaacatacccagtctaccaaggacagtctgcatgccaaatacaatacagctacgtgcgggaccgtggtcggcgatgaccagtggggacatcttcaagttgacgccacatccctcttcctgctcttcctcgcacagatgaccgcatcaggcctgagaatcatatttacccttgacgaagtggcctttattcagaatctggtcttctatatcgaggctgcctacaaagtagcagactatggaatgtgggagcgcggcgacaaaacaaaccagggcatccctgagttaaatgctagcagcgtaggcatggcaaaggctgctctggaggcaattgacgagttagacctctttggtgcccatgggggccggaaatctgtgatccacgtgttacctgatgaggtagaacactgccaatccattctgttttctatgctgccccgggccagcacctctaaggagatcgacgcaggactgttaagcatcatctcattccccgctttcgcagtagaggatgtaaatctcgtcaacgttaccaagaatgaaatcataagtaagctgcaaggccgctacggatgctgtcggtttctgcgggacggatacaagacgcccagggaggaccctaacaggctgcattatgaccctgccgaactgaaactgtttgagaatatcgagtgcgagtggccagtgttctggacttattttatcatcgacggagtcttctccggcgacgcggttcaagtgcaggaataccgggaggcccttgagggcattttgattaggggaaaaaacggcatccgcctcgtccccgaactgtacgccgtgccgccgaataaggtggatgaggagtacaagaatccccacaccgttgatcgagtcccgatgggtaaggtgccacacctgtggggccagagtctctacatcttgtcttccttacttgcagagggttttcttgccgccggtgagatcgatcctctgaacaggcgcttctcaacttccgttaagcccgacgtagtcgtgcaagtcacagttctggcggagaataaccacataaaagatcttcttaggaagcacggcgtgaacgtgcagagtatcgctgatatccatcccatccaagtgcagcccggcagaatcctgagtcacatctatgccaaattgggtcggaacaagaacatgaacctctctggacggccctacaggcatataggcgtactgggtactagcaagctgtatgtgattagaaaccagatctttacatttacccctcagtttacagatcagcaccatttttacttggcactcgacaacgagatgatcgttgagatgctcagaattgagctggcttacctctgtacttgctggcgcatgaccggccgtcccacactaacctttcccataagtaggactatgctgactaatgacgggtccgacatccacagcgcagttctgtccacaattagaaagctggaggatgggtactttgggggcgcacgcgtaaagctggggaatctgtctgagttcctgactacttcattctatacatatctgacttttctagacccagactgtgatgagaaactatttgacaatgcaagcgaggggacctttagccccgactcagattcagatctagtgggatacctggaggacacttgcaaccaggagtcacaggatgaactcgaccattatataaatcacttgctccagtctacgtcgcttcgaagttacctcccccccctttgcaaaaatacagaagataggcacgttttttcagcaatccattccaccagggacattttatccgtcatggccaaagcaaagggcctcgaagttccttttgtaccaatgactctgcccactaaggtgctttccgcccataggaagtccctgaacctggtagatagtccacaacctctcttggagaaagtcccggagtctgatttccaatggccgcgcgatgatcatggggacgtcgactgcgagaaattggtggaacagctcaaagattgtagcaatctgcaggaccaggccgacatcctttacattctctacgtaattaaggggcctagctgggatacaaatctctcgggacagcacggggtgacagtccagaatctgttaggggagctgtacggtaaggctggactcaatcaggagtggggactgatacggtacatttctgggctactgcggaaaaaagtggaggttcttgcagaagcttgcaccgatcttttgtctcaccagaaacaactgaccgtgggcctgccacctgaaccaagagagaaaatcatctctgcgccactgccaccggaggaactgaccaaactcatctacgaggccagtggacaggacatctcaattgcagtactcacacaggaaatcgttgtctatctggctatgtacgtcagagctcagccatccctcttcgtggaaatgctaaggctccgaatcggactgattatccaggtgatggcgaccgagctcgccagaagcctgaattgctccggagaagaggcttctgaaagccttatgaatctcagtccattcgacatgaagaatctattgcaccatattctgtctggcaaagaatttggtgtcgaaaggagcgttagacctatccactcttcgacatcctctcccacaataagtattcacgaggtgggacataccggggtaaccaagacagagagatccggcattaaccggctccgaagcgagatgaagcagatgactcgacgattttctgcagacgagcaatttttttcggtggggcaggcggccagcagctccgcacattcaagcaaatccgcgcgtagcagcaccccctctagtcccactggaacctcctcgtcagactctggtgggcatcatatcgggtggggagaacggcaaggacagtggctgaggcgacgccgcctcgacggagctattaatcgggtgccggtgggattttaccagcgcgtctggaagatactgcagaagtgccatggactttccattgatgggtatgtgctcccctcatctaccacgcgcgagatgactcctcacgagatcaagttcgcagttcacgtggaatcagttctgaaccgcgtccctcaacccgagtatcgccagttactcgttgaagcgattatggttttgaccctgctctccgacaccgagatgactagtattggaggcattatacatgttgaccagatcgttcaaatggcttcccaactattcttgcaggatcaggttagcatcggagctatggacacgcttgagaaggaccaagcgacaggcatttgccatttcttctacgattcagccccatccggtgcttacggtacaatgacgtaccttacccgcgccgtcgcatcttacctccaggaactccttcccaattcaggatgtcagatgcag

SEQ ID NO: 6183 - DNA, 3705 bp, Artificial Sequence
  derived and/or modified sequence
atgagatcgcggtccaattcaggcgtgagactggatggctacgcaagacttgtccagcagaccattctctgctaccaaaacccggtgactggcctgctgagcgcatcgcacgagcagaaggatgcgtgggtgcgggacaatatctactctatcctcgctgtctgggggttgggcatggcctaccggaagaacgcggacagggatgaggacaaggccaaggcctacgagctcgagcagaatgtggtcaagctgatgcgcgggctgctccagtgcatgatgagacaagtcgcgaaggtcgaaaagtttaagcacacccaatcaaccaaggatagcttgcatgcgaagtacaatactgcgacctgtggaaccgtggtgggcgacgatcagtggggacatctccaggtggatgccactagcctgttcctcctgttcttggcccagatgaccgcgtcgggtctgcggatcattttcactctggatgaagtggcattcatacagaatctggtgttctacatcgaagcggcctataaggtcgccgattacggcatgtgggaacgcggagacaagaccaaccaggggattcctgaactgaacgcgagctccgtgggaatggcgaaggccgcactggaggccatcgatgaactcgacttgtttggagcccacggcgggcggaagtctgtgatccacgtcctgccggacgaagtggaacactgtcagagcatcctgttcagtatgctcccacgcgcatcaacctccaaggaaatcgatgcaggcttgttgagcatcatctcatttcctgccttcgcggtggaagatgtcaatttggtgaatgtcaccaaaaatgagatcatttcaaagttgcagggccgatacgggtgctgccgcttcctgcgcgatggatacaagaccccacgcgaagatccgaatcggctgcactacgatccagccgagctgaaacttttcgagaatatcgaatgtgaatggccggtgttttggacgtatttcatcatcgatggagtgttcagcggggacgccgtgcaggtgcaggagtatcgggaggcccttgaaggcattctgatcagagggaaaaatggcatcagactggttccggaactgtacgccgtcccgccgaataaagtggacgaggagtacaaaaatccacatactgtggatcgcgtgccgatggggaaggtgccgcacctgtggggccagagcctctacatcctgtcctccctgcttgcggaaggatttctggcagccggagaaattgaccctctcaatcgccgcttttcaacgtccgtcaagccagatgttgtggtccaggtgactgtgctggctgagaacaaccatatcaaggacctcctcagaaagcatggcgtgaatgtgcagtccattgctgatatccaccctattcaggtgcagcctggaaggattttgtcacatatctacgctaagttgggcagaaacaagaacatgaacctgagtggacgcccgtaccggcacattggcgtgctgggcacctcaaagctctacgtgatccgcaatcaaatcttcactttcactccccaattcactgaccagcaccacttctacctcgcactggacaacgaaatgatcgtggaaatgcttcgcatcgagctggcatacctgtgtacctgctggcggatgaccggcaggcccaccctgaccttcccaatctccaggaccatgctcactaacgacggttcggacatccactcggcagtgctttccaccatccggaaacttgaagatggatacttcggtggagcacgggtgaaactcggaaacctctccgaatttctgactacttccttttacacttacctcactttcctggacccggattgcgacgagaaactctttgacaatgcgagtgaaggtacgttcagccctgatagcgattcggatttggtcgggtaccttgaggacacctgcaaccaggagtcgcaagacgagctggaccactacatcaatcatcttctccagtccacgtcactgcgctcatacctcccaccgctgtgcaaaaacactgaggaccggcatgtgttctccgcaattcactcgaccagagacattctgtcggtgatggcaaaagccaaaggactggaagtgccgttcgtccccatgacccttccgaccaaggtcctgtcggctcaccgtaagtcgctgaacttggtggattccccgcagccactcctggagaaggtgccagagtccgactttcaatggccacgagacgatcacggcgatgtggactgcgaaaagctcgtggagcaactcaaggactgttcaaacctccaagaccaggcggatatcctgtacattctgtacgtgatcaagggcccatcgtgggacactaatctctccggacagcatggtgtgacggtgcaaaatctgctgggggaactgtacggtaaggcaggattgaaccaagagtggggcctcatcagatacatctcgggcctgctccgtaagaaggtcgaggtgctggccgaagcatgtactgatctgctctcgcatcagaagcaactgaccgttggactgcctccagaaccgcgggaaaagatcatctcagccccgcttccaccggaggaacttaccaaacttatctacgaagcatccggccaggatatcagcatcgccgttctcactcaggagatcgtggtctacctcgctatgtacgtgagggctcaaccgtccctgtttgtggaaatgctgcgcctgcggattggactgatcatccaggtgatggcaaccgagctggctcggtcattgaactgtagcggtgaagaagcctccgagtccctgatgaatctgagcccattcgacatgaagaacctgctgcatcacatcctgtcaggaaaggaattcggagtggaacggtctgtcagaccgatccatagcagcacttcgtcacctaccatctcgatccacgaggtcggccacaccggcgtgactaagactgaacgctccggaatcaacagacttagatcggaaatgaagcagatgactaggcgattctcagcagacgaacagtttttctccgtgggacaggccgcttcaagctccgcgcactccagcaagtcggccagatcctcaactcctagctcccctaccggcacctctagcagcgactcgggcggtcatcacatcggatggggagagcggcaaggacagtggctccggagacggagactcgatggagccataaaccgggtccccgtgggcttttaccaacgggtgtggaagatcctgcagaagtgccacggactgtcaattgatggctacgttctcccaagctcgaccacccgagaaatgaccccacacgagattaagttcgccgtgcatgtggaatccgtcttgaaccgagtgcctcagccggagtaccggcaactcctggtcgaagcgattatggtgctcactcttctgtcggacactgagatgactagcatcggaggaatcatccacgtggaccagatcgtgcagatggcgtcccagctgtttctgcaggaccaagtgagcatcggagcgatggatactttggaaaaggaccaggccactggcatctgccacttcttctatgacagcgccccatctggggcctacggaaccatgacctacctcactagggcagtggccagctacctgcaggaactgcttccgaactcaggatgtcaaatgcag

SEQ ID NO: 6184 - DNA, 3705 bp, Artificial Sequence
  derived and/or modified sequence
atgagaagcaggtctaattcaggcgtgaggcttgatggctatgcaagactggtccagcaaactattctttgctaccagaatcctgttacgggtctgctgtccgcctctcacgagcagaaagatgcctgggtgcgcgataacatatactccatcctggccgtttggggcttgggtatggcgtacaggaagaacgctgacagggatgaagacaaggcaaaagcatatgagctggaacagaatgtcgtaaagctcatgaggggactgctgcagtgtatgatgcgccaagttgcgaaggttgagaagttcaaacacactcaatctaccaaagacagcctgcacgccaagtacaacactgccacctgcggcacagtcgtgggagacgaccagtggggccacttgcaggtggacgccacatccttgttcctgctgtttctggcccaaatgaccgctagtggactgagaatcatcttcaccctggatgaagtggccttcatccagaacttggtgttctacatagaagccgcgtacaaagtggccgactatggcatgtgggagagaggcgataaaacaaaccagggcatccctgaactcaatgcctcatcagtcggaatggcgaaggcagcccttgaagctatcgacgaactcgacttgtttggtgctcatggaggcagaaagtctgtcatccacgtactgccagacgaggtggagcattgccagtctatcttgttcagcatgctcccaagagcctccacaagcaaagagattgacgcgggcttgctgagtatcataagttttccagcatttgcagtagaggacgtcaatttggtaaacgtcaccaaaaacgaaattatctccaagcttcagggccgctatggatgttgtaggtttctcagggacggttacaagacccccagggaggatcccaaccgcctgcattacgaccccgccgagctcaaactgttcgagaatattgagtgtgagtggcctgtattttggacttactttatcatcgatggtgtgttcagcggcgacgctgtacaagtgcaggaatatagggaggctctggaaggaatcctcattcgcggtaagaatggtattcgcctggtgccggagctttatgccgtcccgcccaataaggtggatgaggagtacaaaaacccccacaccgtcgatagggtcccaatgggcaaggttccccacttgtggggtcaaagcttgtatatcttgtccagccttctggccgaaggattcctggctgcgggcgagatcgatccgcttaataggcgcttcagtacctccgtgaagccagacgtggtagtgcaagttaccgtattggctgaaaacaatcatatcaaagacttgcttcgcaagcatggagtcaacgtccaaagcattgccgacatccaccccattcaagtgcagcccggtagaatcctgtcccacatttacgccaagcttggacgcaataaaaacatgaacctgagcggccgcccgtatcgccacatcggcgtgctgggcacgagtaaactgtacgttatccgcaaccaaattttcactttcaccccgcaattcacggatcagcaccacttctatctcgccctcgataacgagatgatagtcgagatgcttaggatcgaattggcttatctttgcacctgttggaggatgactggccgccccacattgacgttcccgatctcaagaaccatgctcaccaacgatggatccgatattcactcagcagtactttctaccatcaggaagctcgaggacggctatttcggtggagcccgcgtcaagctgggaaatctgtccgaatttctgactactagcttttacacctacctgacattcctggacccagactgcgacgagaaattgttcgataatgcctcagaaggaaccttctcccctgactctgattctgacctcgtcggttacctggaggacacgtgtaatcaggagtctcaagatgagctcgatcactacattaaccatctgcttcaatctacctccctgagatcttacctcccgcccttgtgcaagaacacagaagatcgccacgttttctccgcgatccactctacaagagacatcctttccgtgatggccaaggccaagggactggaggttcctttcgtgcctatgaccctgcccacaaaggtgctgtctgcacacagaaagagcctgaacctcgtcgattctccccagccccttctggagaaggttcccgagtcagattttcagtggcctcgcgacgaccatggcgacgtggattgcgagaagcttgttgaacagcttaaagactgttcaaacctccaggaccaagccgatatcctgtacatcttgtatgtcatcaaaggcccttcttgggacaccaacctgtctggtcagcacggcgttactgtgcagaacctcctgggtgaactgtacggtaaagccggcttgaaccaagagtggggcctgattcgctatatctccggtttgctgaggaaaaaagtggaagttctggccgaggcctgtactgacttgttgtcccaccaaaagcagctgacagtgggcctcccacccgagcccagggaaaaaattatctctgcacctctgccgcccgaggaactcactaagctcatttacgaggcatctggtcaagacatctcaatagcggtcctcactcaggagatcgtggtctacttggcgatgtacgtaagagcgcagccatcactgttcgttgagatgttgagactcaggataggactcatcatccaggtgatggccacagaacttgcgaggtcactgaactgttctggagaggaagcctccgaatctctcatgaatctgtccccatttgatatgaagaacttgctccatcacatcctgtcaggaaaagagtttggcgtcgaaaggtcagtgagacccatccacagctcaacaagctctcctactattagcattcacgaagtcggacacaccggagtgacaaaaacagagaggtccggaatcaaccgcttgcgcagcgagatgaaacaaatgacaaggcgctttagcgcagatgaacagttcttcagcgtgggtcaagctgcgagttcaagcgcgcactctagtaagtcagctagatcttcaacaccttcctccccaacaggaaccagttctagtgattccggtggccatcatatcggctggggcgaaaggcagggacagtggcttaggagacgcaggctggacggagccatcaacagagtgccagtaggcttctaccagcgcgtctggaagatcctgcagaagtgccatggtctctccattgacggatacgtactcccttcttccactacacgcgagatgactcctcatgagatcaagtttgccgtgcacgtggaaagcgtgcttaacagggtgccacaacctgagtaccgccagttgctggttgaggcgatcatggtcctgacactgctctctgataccgaaatgacctctattggaggtattatacacgtcgaccagatagtgcagatggcgtcccagcttttcctgcaagaccaagtctccatcggcgctatggatacgctcgagaaagatcaggccacgggcatctgtcattttttctatgactctgcgccttcaggtgcatatggtacaatgacctacctgacaagggcggtagcctcctacctccaagaattgctccccaactcaggctgccagatgcag

SEQ ID NO: 6185 - DNA, 3705 bp, Artificial Sequence
  derived and/or modified sequence
atgcgttcacggagcaattcaggtgtgcggctggacggttacgcccgactggtccagcagaccattctttgttaccagaatcccgttacgggtctgctaagcgctagtcatgaacagaaagatgcttgggttcgcgacaacatttacagcatcctggctgtgtggggtctgggaatggcctatcgcaagaatgccgaccgcgacgaagacaaagccaaagcgtacgaactcgagcagaacgtggtcaagctgatgcgcggtctgctgcaatgtatgatgcggcaggtggcaaaagtcgaaaaattcaagcacacacagagcaccaaggactcactgcatgcgaagtacaacactgcgacctgcggtaccgtggtgggtgacgaccagtgggggcacctgcaggttgatgcgacgagcctgtttctgctgtttctggctcagatgactgcaagcggcctgcgcattatttttaccctggatgaagttgcattcattcaaaatctagtgttctatatagaggccgcttataaagttgcggactatgggatgtgggagagaggtgacaagaccaatcaaggtattccagagttaaatgcgtccagcgtgggcatggccaaggccgccctggaagcgattgatgaactagatctgtttggagcgcacggcggacgcaaaagcgtgatacacgttctgcctgacgaggttgaacactgtcaaagcattctcttcagcatgctgcctcgcgcatcgacctcgaaggagatcgacgcgggactgctgagcatcattagctttccggcgttcgcagttgaggacgtgaacctggtgaatgtgacgaaaaatgagatcatcagtaaactgcaagggagatacgggtgttgtcgttttttgcgcgatggttacaagacacctcgcgaggacccaaatcgactgcactacgacccggctgagctgaagctgttcgaaaacattgagtgcgaatggccggtattctggacctattttatcattgatggcgttttttctggggacgccgttcaggtgcaggaatatcgcgaggctcttgaaggtatactgatccgtggtaagaatgggattcgtttggtgcctgaactgtacgctgtgccgccgaacaaggtggatgaggagtataaaaatcctcacacggttgatcgggttcctatgggtaaggtgccgcacctgtgggggcagagcctttacattctgtccagcttgctcgccgaaggttttctggccgcaggggagattgatcctctgaaccgccgcttttcaaccagcgtgaaaccggacgtggtcgttcaagtgacagttttggcggagaacaatcacatcaaggatttgctccgtaaacacggggttaatgttcagagcatcgcggatattcacccaatccaggtgcagcctggccgtattctgtcacacatttacgccaaactggggcgcaacaagaatatgaatcttagcggtcggccataccggcatatcggcgtcctgggaacctctaaactctatgttatccgaaaccagatttttacgtttactcctcagttcaccgatcagcaccacttttacttagccctggacaacgagatgatcgttgagatgctgcgcattgagcttgcctacctgtgcacttgctggcgcatgacgggacgccctaccctgacgtttccgatcagtcgcactatgctgaccaacgatggctccgacatccactcagcagtgctgtccacaattcgtaaactggaggatggttactttggaggtgcacgagttaaattggggaatctgtcagagttcctgactacctctttttatacctacttgacctttctggatccagactgcgatgagaagctgttcgacaacgctagcgagggtactttttcccctgattccgatagcgacctggttggctatctggaagatacttgcaaccaggagtcgcaggatgaactggatcattacatcaaccatctcttgcagagcacctcactgcgatcttatctgcctccactgtgtaaaaatactgaggatagacacgtcttcagcgcaatccatagcacccgtgacattctgagcgttatggccaaagcaaaagggctggaggtcccttttgtgccaatgacactgccgaccaaggttctgtctgcgcaccgcaagtctctgaacctggtggacagcccacagccactattggagaaggttccggaaagcgattttcaatggcctcgcgacgaccacggcgatgttgactgcgagaagcttgtggagcagctaaaggactgtagcaatctgcaggaccaggccgacatactctacatcctatacgttattaagggcccatcttgggacaccaatctgagcggtcaacatggagtaactgtccagaatctcctgggcgagctgtatggtaaggcgggcctgaatcaggagtggggtttaattaggtacataagcggcctgttgcgcaaaaaagtggaggttctggcagaggcctgtaccgacctgctgtcccatcaaaagcaattgaccgtgggtctgccacctgaaccgcgcgaaaagattatttctgccccactgcctccagaggagctgaccaagttgatctacgaagcttcgggccaggacatctccatcgcagtgctgacgcaggagatcgtggtttacctggctatgtacgtacgcgcgcagccaagcctgtttgttgagatgttaaggctgcgcattggtctgatcatacaggtgatggccacggagctggccagaagcttgaactgcagcggtgaagaagccagtgagtctctgatgaatctgagccctttcgatatgaagaatctgctgcaccacattctcagcggaaaggagttcggcgtcgagcgttctgtgagaccaatccacagctctacctccagcccgactatcagcatccatgaggtgggtcacaccggtgtcacaaaaacggaacgcagcggtatcaaccgcctgcgcagcgagatgaagcagatgacacgtcgttttagcgcagatgagcagttcttttctgttggccaggcggccagttcctctgcgcacagctctaaaagcgcacgaagctccacgccatcatctccgacgggaaccagctcctcggattccggaggtcatcatatcggctggggtgaacggcaaggtcaatggttacgacgtagacgactggacggtgcaattaaccgcgtgccggtcggtttttatcagcgcgtttggaagattctgcaaaaatgccacggtctgagcatcgatggctacgtgctgccaagcagcacgactcgcgaaatgacccctcatgagattaagtttgcggtgcatgtcgagagcgtgctgaatagagtcccgcagccggagtaccggcaattgctggtcgaggcaatcatggtgctgaccctgctgagcgacactgaaatgactagcatcggtgggattatacacgttgaccagattgtgcaaatggcaagccagttgttcctgcaggaccaggttagcatcggtgccatggatacccttgaaaaagatcaggccacaggcatttgccacttcttctatgactcagctcctagtggagcttatggcaccatgacctatctgacccgcgccgtagcatcataccttcaagagcttctgccaaactctggttgccagatgcaa

SEQ ID NO: 6186 - DNA, 3705 bp, Artificial Sequence
  derived and/or modified sequence
atgcgctcccgctctaacagcggcgtcaggttggatggatacgcaagactcgtgcaacaaactatcctttgctaccaaaatcctgtcaccggacttctgtcggcatcacacgaacagaaggacgcctgggtgagagacaatatctactcgatccttgcagtctggggcctcgggatggcctaccgcaagaatgcagacagagatgaagataaggcaaaagcgtacgagctggagcagaacgtggtgaaactcatgaggggccttctccagtgtatgatgcgtcaggtggctaaagtggagaagtttaagcacactcagtccaccaaggactccctgcatgccaaatacaataccgcaacttgtggaactgtggtgggggatgatcaatggggacatctccaggtggatgcaaccagcctttttcttctgtttctggcgcagatgaccgcatcgggtctgagaatcatattcactctcgatgaggtcgcattcattcaaaacctggtgttttacatcgaagcagcgtacaaagtcgccgattacggcatgtgggaacgcggtgataagaccaatcagggtattcccgaacttaacgcgtcctccgtcggaatggccaaagcggcactcgaagccatcgacgaactggacctgtttggagcacatggaggccgcaagtccgtgatccatgtgcttcctgatgaagtggaacattgtcagagcattctgttttcgatgcttccgagagcatccactagcaaggaaatcgatgcgggtttgctgtctataatctcgtttcctgcttttgcagtcgaagatgtgaacctggtgaacgtcactaagaacgagatcatttccaagttgcagggtagatacggctgctgtagatttctcagagatggatacaagacccctagagaagatcccaaccggctgcattacgacccggctgaattgaagctgttcgaaaacatagaatgtgaatggcctgtgttctggacttactttatcatcgatggagtgttttccggagacgcggtccaggtgcaagagtatagagaggccctcgagggaattctcattcggggaaagaacggaattagactggtgcccgaactctacgccgtccctccaaacaaggtggatgaagagtacaagaatcctcatactgtggaccgagtcccaatgggaaaggtgcctcatctctggggccagagtctctacatcctgagcagcctgctggcagaaggctttctggcagcaggtgaaattgacccactgaataggcggttttccacgtctgtgaagccagatgtggtggtgcaagtgacggtccttgccgagaataatcatatcaaggacctgctgcggaaacacggagtgaacgttcagtcaattgcagatatccacccaatccaggtccagccgggcagaatcttgagccatatctatgccaagctggggaggaataagaacatgaatctgagcggacgtccgtaccggcatatcggcgtccttggaacctcgaaactgtacgtcatccggaaccagatctttacgtttaccccacaatttactgatcagcatcatttctacctggcactggataacgaaatgatagtggaaatgttgaggattgaattggcatacctgtgcacttgttggaggatgaccggcaggccgaccctcacctttcctatttcgagaaccatgcttaccaacgacggctcagatattcattccgcagtgctctcaaccataagaaagctggaggacggttactttggcggcgcccgtgtcaagctgggaaacctgtccgaattccttaccaccagcttttacacctaccttacctttctcgatccagattgcgatgaaaaactttttgataacgcctcggaaggcacctttagccccgattcggattcggatcttgtcgggtacctggaagatacttgtaatcaggaatcacaagacgagctggatcattacattaaccatcttctgcaatccacctcattgcggagctaccttccacctctgtgtaagaacaccgaggatcggcacgtgttttccgcaatccatagcactagagacattctttccgtcatggctaaggcaaagggacttgaggtgccattcgtccctatgaccctgcctacgaaggtgctcagcgcacatcggaagtcactgaatctggtcgattcaccacaaccactcctggaaaaggtgcccgaatccgattttcagtggccacgtgatgaccatggggacgtggattgcgagaagctcgtggagcaactcaaggactgttcgaaccttcaggaccaggcagacatcctttacattctttacgtgattaagggaccttcctgggacactaacctgtcaggtcaacacggagttacggtccagaatcttcttggggaattgtatggaaaagcaggtcttaaccaggaatggggattgattcggtacatcagcgggctgcttcgcaaaaaggttgaggttcttgccgaggcctgcaccgaccttctctcccaccaaaagcaactgactgtcggactgccgcccgaaccgcgagaaaagattatctcagccccactgcccccggaggaacttaccaaactgatttacgaagcgtcgggtcaagatatttctattgccgtgctgactcaagagatcgtggtgtacctggccatgtacgtcagggcacagccttcgctcttcgtagagatgctgcgactgcgaatcggactcataattcaggtgatggccaccgaactcgcccgttcactcaattgctcgggagaagaagcatcggagtcgcttatgaacctctcgccattcgacatgaagaacctcctgcatcatatccttagcggcaaggagtttggagttgaacgctccgtccgccctattcattccagcacgagttctcccactatctccatccatgaagtcggacacaccggtgtcactaaaaccgaacgatcaggtatcaatcgactcagatccgaaatgaagcagatgaccaggcgttttagcgcggacgaacaattcttttccgttgggcaagccgcatcgtcctctgcacattcgtccaaatcggcccggtcgtcaaccccttcgtcgcctactggcacctccagctcggactcgggaggtcatcatatcggatggggtgaacggcaaggccagtggcttcgcagaaggcgcctcgacggagccattaatcgggtccccgtgggtttttaccaacgggtgtggaagatcctccaaaaatgccacggtctgtccattgacggatatgtgctgccatcctccaccacccgagaaatgacccctcacgaaatcaaatttgcagtccacgtcgaaagcgtcctcaacagagtccctcagcctgaatacagacaactgcttgtggaagcaattatggtgcttactcttctctcagacaccgaaatgacttcaattggtggtatcattcatgtcgaccaaattgtgcagatggcaagccagctttttctgcaggatcaggtcagcattggagccatggatacgttggagaaggaccaggcaaccggaatatgccatttcttctatgattcggcaccttcgggagcctacggaactatgacgtacctgaccagggccgtggcatcgtaccttcaagaactcctcccaaactcgggttgccagatgcaa

SEQ ID NO: 6187 - DNA, 3705 bp, Artificial Sequence
  derived and/or modified sequence
atgagatctagatccaacagcggagttcggctagatggatacgcgagactggtccagcagaccatactgtgctaccagaatccagttaccggactgctgtcagcttcccacgagcagaaggatgcttgggtgcgcgacaatatctactccatcctggccgtctgggggctgggaatggcctatcgcaaaaatgccgacagagacgaggataaagccaaggcctatgaactggaacagaacgttgtcaaactcatgagggggctactccaatgtatgatgcgccaagtggccaaagttgaaaaatttaaacatacccagagtacgaaggattccctgcacgctaaatacaatacggccacatgtggaaccgtggtaggggacgaccagtggggacacctgcaggtggacgccacgtcacttttcctgctttttctggctcagatgactgcgtcaggtctcaggatcatcttcaccctcgacgaggtggcctttatccagaacttggtgttctatattgaggccgcgtacaaggtggccgattacggtatgtgggagcggggcgacaaaacaaaccaaggtatccctgaactaaacgcctcttctgtggggatggctaaggcagctctggaagctatcgatgagctggacctatttggcgcacacgggggacggaagagtgtgatccatgtgttaccagatgaagtcgagcactgtcagtctatcctgttttcgatgctacccagagcatcaacttctaaagagattgatgcgggcctgctgtccataatcagttttccggccttcgcagttgaagacgttaatctcgttaacgtcactaaaaatgagattatctccaaacttcagggtaggtatggttgttgtagattcctgcgtgacggctacaagaccccacgagaggaccctaacaggctgcactacgaccccgcagagctcaaattatttgagaatatcgaatgcgagtggcccgtcttttggacatacttcatcatcgacggggtattcagcggagacgcagtacaagtgcaggagtacagggaagctttggaggggattctaatcagggggaagaacggaatacggctggtgcccgaactgtacgctgtgcctcccaacaaagttgatgaagagtataagaacccccacactgtggatcgagttcctatggggaaggtgccccatctgtggggccagagcctttacatactctccagcctgcttgctgagggatttctggccgccggcgaaatcgatccactgaatagacgattctccacctcagttaagcctgacgtcgtggtgcaagttaccgtactggccgaaaacaaccatatcaaagatctcttgagaaagcacggcgttaatgtgcagtctattgcggacattcatcctatacaggtgcagcccggtagaatcctgagccatatctacgctaaactgggacggaacaagaacatgaatctatcgggacgaccctatagacatattggtgtcctcggaacttcaaaattgtatgttattcgcaaccagatatttacgtttacacctcaattcactgatcagcaccacttttacctggccctcgataatgaaatgatcgtggagatgctacggattgaactggcctacctatgtacatgctggaggatgacagggagacccactctgactttccctatctcccggaccatgctgactaacgacggctcagacattcactctgccgtcctgtcaaccattcgaaagctggaagatggatactttggtggcgctagagtaaaattaggaaacctttcagagttcttgacgacttcattttacacctacttaacattcctggaccctgattgcgacgaaaagctcttcgataacgcctctgaggggaccttctcccccgattctgactccgatctggtaggctaccttgaagatacttgtaatcaggaatcacaggacgaactggaccactacattaatcaccttctgcagtcgacttctctccgctcctaccttccacctctatgcaagaatacagaggaccgccatgtgttttccgcgatccactcgacacgagacatcctgagcgtgatggctaaggcgaagggtctggaagtcccttttgtaccaatgaccctgcccacaaaagtgttatctgcacacaggaagtccctcaatctggtggacagtccccagcccttactggaaaaggtgcccgaatcggatttccagtggcctcgcgacgatcacggggacgtggactgcgagaagcttgtggaacagctcaaggattgctccaacctccaggatcaggccgacatcctttacattctctatgtgatcaagggcccgtcatgggacaccaacctgtctgggcagcatggtgtgaccgtgcaaaaccttttaggggagctctatggcaaggcaggcctcaaccaagagtggggtcttattcgttacatatcgggtctcttaagaaagaaggtggaggtgctggctgaggcctgtactgacctcctctcacaccagaagcagctcaccgtaggtctcccgcccgagccgcgagagaaaattatctcggccccgcttccgcccgaagaattaacgaagcttatatatgaagcgtcagggcaggacatatccatagccgtcttaacacaggagattgtagtgtaccttgccatgtatgtgcgcgcccaaccctccctgtttgtagagatgctgcgattgcgcataggacttattatccaagtcatggctaccgaactagcccgatcgctcaattgtagtggcgaggaggcaagcgagtcacttatgaatcttagtccctttgacatgaaaaacctgcttcaccatatcctaagcggcaaggaatttggagtggaacggtccgtgagacctatccatagcagtacttcctccccaactatctccatacacgaggtgggacatacaggagttacaaagaccgaacggagcggaattaaccggcttaggagcgagatgaaacagatgacacgaagatttagcgccgatgagcagttctttagcgttggccaggctgcctcttccagtgcccattcctctaagtcagctcgtagcagcacgcccagctcgcctactggaacttcatcctctgactctggaggacatcatattgggtggggtgaaaggcagggccagtggctgcggcggaggcggttggatggggcgattaaccgcgtacccgtgggcttttatcagcgggtctggaaaatccttcagaagtgccacggtctctcaatcgacggatacgttctaccttcctcgacgaccagagaaatgacgcctcacgaaattaagttcgcagttcacgtcgagagcgttctcaaccgggtgccccagcccgaatacaggcagctgctcgtggaagcaataatggttctaacgcttctgtctgacaccgagatgacatccatcggcggaattatccacgtggaccagatcgttcagatggcatcccagctcttcctgcaggaccaagtttctatcggagcaatggacacattggaaaaggaccaggctactgggatctgccacttcttttacgacagcgcaccctcgggtgcatatggcacaatgacctacttaacgcgggctgtcgcttcatacctgcaggagttactgcccaacagcgggtgccagatgcaa

SEQ ID NO: 6188 - DNA, 3705 bp, Artificial Sequence
  derived and/or modified sequence
atgcgatctaggtccaatagtggcgtgcggcttgacggatatgcccggctggtgcagcagacgatcctgtgttaccagaaccccgtcacaggtctactgagcgccagccacgaacagaaagacgcctgggttcgagataatatctactccatacttgccgtgtggggtctgggcatggcctaccggaagaatgccgatcgtgatgaagacaaggccaaagcctacgagctagaacagaatgtggtaaagcttatgagaggactgctccagtgcatgatgcgtcaagtggccaaagtggagaagtttaaacatacacagagcacgaaagattcactgcacgccaagtacaacaccgccacttgcggtacagtagtcggcgatgaccaatggggacacctgcaagtggatgcgacatccttatttttgctctttttagctcagatgactgcctctggactgcggattatctttaccctcgatgaggtggctttcatccagaacctggtattttatatcgaggcggcctacaaggtagctgattacggcatgtgggagagaggggataagactaaccaggggatccccgagctcaacgctagctctgtgggaatggcaaaggctgccttagaagctatcgacgagcttgacttgttcggagcgcacgggggacgcaagtccgtaatccacgtactgccggacgaagtagagcactgtcaaagcatcctgttttctatgcttcctagagcgtccacgtcgaaagagatcgatgctggcctcctttcaataatcagttttcctgcgttcgctgtggaggacgtgaatctggtgaatgtgactaagaacgagatcatctccaagctccaggggaggtatggctgctgtagatttctgcgggatggttacaaaacgccccgggaggatcccaatcgattgcactacgatcctgcggagctgaagctcttcgagaacatcgaatgcgaatggccggtgttttggacttacttcattattgatggagtcttctcaggggacgccgtccaggtacaggagtaccgagaggcactagaggggatcttaattaggggaaaaaacggaatcagattggtcccagaattatatgcagtgccacccaacaaagtggacgaggagtataagaatccacacaccgttgaccgcgttccaatgggtaaagttccacacctgtggggtcagagtctctatatactttcaagcctgctggccgaaggcttcttggccgccggtgaaatcgacccccttaatcgacggttcagcacgagcgtaaaaccagacgtggtcgtgcaagtaacagtcctggccgaaaacaaccatataaaggaccttctcaggaaacatggcgtgaacgttcagtcaatcgccgatatacaccccatccaggttcagcccggccggattctctcgcacatttacgctaagctgggccgcaacaaaaacatgaacctctctggtagaccttatcgtcatatcggcgtgctgggcacttccaagctgtacgttattaggaaccaaattttcacattcacaccacagttcacggaccaacatcacttctatttagcccttgataatgaaatgatcgtagaaatgctgcgaatcgagttagcatacctgtgtacctgttggcggatgaccggtaggccaacattgacattccctatctcacgaacaatgctgaccaatgacgggagtgacatccattctgccgtactctcgactatccggaaactggaggatggctacttcggtggggcacgtgtaaagttgggcaatctctcggagtttctaaccacaagcttttacacttaccttacctttctggaccccgactgcgacgaaaagctgtttgacaacgcctcggagggtacgtttagccctgatagcgacagcgacctcgtcggatatcttgaagacacatgcaatcaggagtcacaggacgaactggaccactatatcaatcacctgttgcagtcgacatcactcagaagctatctgccgcctctgtgtaaaaataccgaagatagacacgttttctcagccattcactctaccagggacatcttgtcagttatggctaaagcgaaagggctagaggtcccgttcgtgcctatgaccctgccaaccaaggtgctctcggcgcataggaaatccctgaatctggtggactcaccccagccgctgctcgagaaggtccctgaaagcgatttccagtggccgagagatgaccatggagacgtggactgtgaaaagttggtcgagcagctaaaggactgtagcaacctccaggaccaggcggatattttgtacattctatacgttatcaaaggaccatcatgggatacaaatctcagcggacaacacggcgtcaccgttcagaatcttctgggagagctgtacggaaaagctggcctgaatcaagagtgggggctaatcagatacatctccggtttgctgcgaaagaaagttgaggtgctggccgaggcatgtacagatttgctcagtcaccagaagcagctgactgtgggcttgccccccgagccacgggagaagattatatccgctcccctaccaccagaggagctgaccaagttgatctacgaggccagtggtcaggatatttcaatcgccgtgttgacccaagagattgtcgtgtatcttgcaatgtatgttcgcgcccaaccttccctgtttgtggagatgctgcgcctccgtatcggactgattattcaggtgatggcaacagagttggcacgaagcctgaattgtagcggtgaagaagcctcagagagtttgatgaatcttagcccattcgatatgaagaatctcttgcatcacattctgtcaggcaaggagtttggggtggagagaagtgtgagaccaatccatagcagtacgagctcaccaacaatttccatacacgaagtcggccacacaggggtcaccaagactgagcgctccggaattaacagactccgtagcgaaatgaaacagatgacaaggaggttctcagccgatgagcagtttttctcagtgggccaggccgcctcctcctctgcccacagcagcaagtctgccaggtcaagcacacctagcagcccaaccggcacatccagctctgacagtggggggcaccatatcgggtggggagaaagacagggacagtggctccggcggagaagactggatggcgctattaatagggttcccgttggtttctaccagcgggtctggaagatcctgcagaaatgtcacggtctttccattgacgggtacgtattgccgtcctcaactactagagagatgacccctcatgagattaagtttgccgtgcacgttgaaagtgttctgaaccgcgtccctcagcctgagtaccggcagctattagtggaggccattatggtgctcaccttgctgtctgacacagagatgacttcaattggcgggataattcatgtcgatcaaatcgttcagatggcctcacagctgttcctgcaagatcaagtctcaatcggtgctatggacaccctggagaaagatcaggccacggggatttgccattttttttacgattctgctccaagtggcgcatatggaacaatgacctacctgacacgcgccgtcgcgtcctacctccaagaattgcttcctaactcggggtgccagatgcaa

SEQ ID NO: 6189 - DNA, 3705 bp, Artificial Sequence
  derived and/or modified sequence
atgcggtcaaggtctaattcaggggttaggctcgatggatatgcaagactcgttcagcagacaattttgtgctaccagaatcccgtgactggattattatctgcttcccacgaacagaaagatgcctgggtgagagataacatatacagtatccttgctgtgtgggggcttggaatggcataccgaaagaatgcagatagagacgaagataaagctaaagcctatgaattggagcagaatgtagttaaactgatgcgggggcttctgcagtgcatgatgagacaggtggccaaggtcgaaaagtttaaacatacacagagtacaaaagattctctacacgctaaatacaatacagctacatgtggaacagttgttggagatgatcagtggggacacctccaggtcgatgctacatcactcttcctcttgttcctagcacagatgacagcctctggattgaggatcatctttacactcgatgaggtcgcattcatccagaacctagtgttttacattgaagcggcctataaagttgccgactatggaatgtgggaaagaggagataagactaaccagggaatccctgaacttaatgcatcctcagtgggaatggccaaggcagcgctcgaagcaatcgatgagcttgacctattcggagcccacgggggaaggaaatcggtcattcacgtgctccctgacgaagttgaacattgccagtctatcctcttctccatgttaccccgtgcttcaacaagtaaggaaattgacgcgggactgctctcaattatatcgtttccagcctttgcagtggaagatgtgaacctggttaacgtcacaaaaaacgaaataatctctaaactacagggacgatatggatgttgtagatttctcagggatgggtataaaactccccgagaggatcccaatagactgcactacgatccggccgaattaaaactcttcgaaaacatagagtgcgaatggcctgtattctggacatactttataatcgatggagtattttccggggatgccgtgcaggtgcaggagtatagagaagccctagaggggatccttattcgaggaaaaaatggaataaggctagtcccagaactctatgccgtcccccctaacaaagtcgatgaggaatataagaacccccacacagtcgatcgggtgcctatggggaaggtgccccacctttggggacagtcattgtacatcctgtcaagtcttctcgccgaagggttcctagctgcaggggaaatagatccactaaaccgccgattttcgacatcggttaaacccgatgtagttgtgcaggtgactgtgctcgccgaaaataaccacataaaagaccttctaagaaagcacggggttaatgttcagtctatcgccgacattcatccgatccaggtccagcccgggaggatcctttcccacatctacgcaaagctaggaaggaataagaacatgaatctctcaggaagaccataccggcacatcggagtccttgggactagtaaattgtatgtcatcaggaaccagatctttactttcacaccccagtttactgatcagcatcatttctatctcgcactggacaatgaaatgatagtcgaaatgttaaggatagaactcgcatacttatgtacttgttggcggatgacagggcggcctactctcacatttcccatatcaaggacaatgctcactaatgatggaagtgatatccactctgctgtgctttctacaatccggaaactcgaagatgggtattttggaggagcccgcgtaaaactcggaaacctgagtgagttcctcactacttctttttatacatatctgacattccttgatcctgattgtgacgaaaaattatttgataacgctagtgaggggacattttctccagattctgattcagatcttgtagggtacctggaggatacatgtaatcaggaatcccaggatgaactggatcattatatcaaccacctccttcagagtacatccttaaggtcttatttacctcccctctgcaaaaacactgaagataggcatgtcttttctgccatccactctacacgggatattctgagtgtgatggccaaagcgaaagggctcgaagtgcccttcgtacctatgactctccctactaaagtgttgtcagctcatcgaaaaagtctcaatctcgtagatagtcctcagccactactcgaaaaagtgccagaatctgattttcagtggccaagggatgaccatggagatgtagactgtgagaaactcgtggaacagttgaaagattgctccaacctacaggatcaagccgatatcctctacatcctgtatgtgataaaagggccatcttgggatacaaatctttctggacagcatggagtgacagtgcagaacctgctcggagaactgtacgggaaagccgggctcaatcaggaatgggggctaatcagatatatctctggacttttacggaaaaaggtggaagtattggctgaagcatgtactgatctcctctctcaccagaaacagctcacagtggggctgcctccagaaccaagagaaaaaatcatctctgctcccctccctcccgaagagcttacaaagttaatatatgaagcaagtggacaggatatctccatagctgtgctaacacaagaaatcgtggtgtacctcgctatgtatgtgagagcacagccctcattgttcgttgaaatgcttcggctaaggataggacttatcattcaagtgatggctacggaacttgcacgcagtctgaattgcagtggggaagaggcttctgagtccctcatgaacctgtccccttttgatatgaagaacttacttcaccacatattgtccggaaaagaatttggagtggaaaggtccgtacggccaatacattcatccacttcttccccaactatctccatacatgaggttgggcatacaggggtaactaaaacagaaagatccgggatcaatcggctcaggtccgagatgaagcagatgacacgaaggttctcagcagacgagcaatttttcagtgtgggacaggccgcctcttcctcagctcacagttcaaagtcagccagatctagtacaccttcatcacctactggaacatcctcctcagatagtggagggcaccacatcggatggggagaaagacaggggcagtggctccgcaggcggcgactagatggggctattaatagagtgccagtgggattttaccaacgggtttggaagatattgcagaaatgccatggattatccattgatggatatgtgttaccctcttctacaactagagaaatgacacctcatgaaattaaattcgcagtgcatgtcgagtctgtgctcaaccgggtacctcagccagaataccggcagcttctggtagaagcaataatggtgctgacacttctttccgatacagagatgacatcaattggggggattatccatgttgatcagatagtacaaatggcctcccagctgttcctgcaagatcaggtgagtatcggggcaatggatacactcgagaaagatcaggctactgggatctgccacttcttttatgatagtgccccatccggagcctatgggactatgacatatttaactagggcggtcgctagttacctgcaggaattgctccctaatagtgggtgccagatgcaa

SEQ ID NO: 6190 - DNA, 3705 bp, Artificial Sequence
  derived and/or modified sequence
atgagatctagaagcaattctggggtccggctcgatggttacgctagactcgtgcagcagaccatcctgtgctatcagaacccggtaaccggcctgttatctgcgtcccatgagcagaaagatgcttgggtccgagataacatctattcaatcctagcggtgtgggggctcggcatggcctacagaaagaatgccgaccgtgacgaagacaaggctaaggcctacgaattggaacagaacgttgtcaagctgatgaggggccttctgcagtgtatgatgcgacaggtcgcgaaagttgagaagttcaaacatacccaatctactaaagattcactacacgccaaatataacaccgcaacctgcggaaccgtcgtaggggatgaccaatgggggcacttgcaggtggacgccacttccctgtttctcctttttctggcccaaatgaccgcctccggactgcggataattttcactctggatgaggtggcatttatccagaatctcgtgttctacatcgaagccgcgtacaaagtggcagattacggtatgtgggagaggggcgacaaaactaatcagggtattccggagctgaatgcatcctcagtgggtatggcaaaggcggccctggaggccattgatgagctggacctattcggagcccatggtggtcgaaagtcagtgattcacgttctacccgatgaggtggagcactgccagtcaattttgttttccatgctgcctcgagcctctacaagtaaagaaattgacgccggactgttgtccatcattagctttccagctttcgcggtggaggacgttaatctggtgaacgtgaccaaaaatgaaatcatatctaaattgcagggcaggtacgggtgctgcagatttcttcgagacggttacaagacccctagggaagacccaaacaggctacattacgaccccgctgaactcaaactgtttgagaacatcgaatgcgagtggccagtcttttggacctactttatcattgatggcgtgttttctggggacgcggtacaagtccaggagtacagggaggcgctggaaggcattctgatccgggggaagaacggaattaggttggtaccagagttgtatgctgtgcctccgaacaaggttgacgaggagtacaagaacccgcacactgtggacagggtccccatggggaaagtgcctcacctgtggggtcagagcctgtacattctctccagtttgctggctgaggggttcctggctgccggggagattgacccgctgaacagaagattctccactagcgtgaagcctgacgtggtggtgcaggtgactgtcttagccgagaacaaccacattaaggaccttctccgaaagcacggggtgaatgtgcagtctattgccgatattcatcctatccaggttcagcccgggagaatcttaagccatatttacgctaaactgggccggaataagaacatgaacctgtcaggcagaccctatagacacattggggtcctggggacatccaaattgtacgtcatcaggaaccagatttttacattcacccctcagttcactgatcagcaccacttttatctggcgctagacaatgaaatgattgtcgagatgctgagaattgaattggcttacttatgtacgtgctggaggatgacgggccggccgactctgacctttcccattagccgcaccatgctgacaaacgatggttcagacatacatagtgccgtcttgagcacaatcagaaagttggaggatggatacttcggcggcgccagggtgaagttgggaaatttgtcggagttcctgactacctccttctacacctacttaaccttccttgaccctgactgcgacgaaaagttgtttgacaatgcttcagaggggaccttctctcccgattcagattctgatctggttggttacctcgaagatacctgcaatcaggagtctcaggacgaacttgatcactacatcaaccatcttctgcagagcacctcactgcgctcttacctccctcccctttgcaagaacaccgaagacaggcatgtgttttcagcgattcacagtactagagatattctaagtgtgatggctaaggcaaagggactagaagttcccttcgtgcctatgactctgccgaccaaggtactgagtgcccatagaaagtccttgaacttggtggatagtccccagcccttgctcgaaaaggtacctgagagcgactttcagtggcctagggatgaccatggcgacgtggattgtgagaagctggtagaacagctcaaggactgttctaatctgcaggaccaggccgacatcctgtacattttatacgtgatcaaaggaccatcatgggataccaacctcagcggccagcatggagtgacagtgcagaatctcctgggggagctgtatgggaaggcaggacttaatcaagaatgggggcttatacggtacatttccggactgctgcggaagaaagtagaggtgctggcagaggcatgtacagacctgttgtctcaccagaaacagttgactgtagggctgcctcctgaaccccgggaaaagatcatatccgctcctctcccaccagaagagttgacgaaattgatttatgaagcttctggccaggatatttctattgccgtgctcactcaggaaattgtcgtttacctggctatgtacgtgcgggcccagccgtcgctgtttgtggagatgctgagactgcggataggactaattatccaagtcatggctaccgagctggctcgttctctgaactgctccggtgaggaggcatcagagagtctcatgaatctcagcccatttgacatgaagaacctcttacaccatatcctgagtgggaaggagttcggggtcgagagatctgtccgccccatccatagcagcactagctcacctaccatcagcatccatgaggtgggtcatacaggggtcaccaagactgaaagatccggcatcaacagacttcgatccgagatgaagcagatgaccagacgatttagtgccgacgagcagttcttttccgtgggccaggccgccagtagtagtgcccacagtagcaagtccgctagatcctctactcctagctcccccactgggacaagctcatctgacagtggcggtcaccatattggctggggggaaagacaaggtcagtggctgcgcagacggcgtttggacggcgcaataaacagggttccagtgggattttaccagagggtgtggaaaattctgcagaagtgtcacgggctgagtatagacggatacgtgctccctagcagcacgacacgcgaaatgacccctcacgaaataaagttcgcagtgcatgtggagagcgtcttgaaccgggtgccacagccggaatacaggcaactgttggtagaagctatcatggtgttaactctgttaagcgatactgaaatgacgtcaataggtggaatcatccacgtggatcagatcgttcagatggcttctcagctgtttctacaggaccaagtgtcaatcggagcgatggacactctagagaaggatcaggctacaggtatatgtcacttcttctatgatagtgctccaagtggggcctatgggactatgacctatctgacgagggcggttgcctcgtatctacaggagcttctgccaaactcgggctgccagatgcag

SEQ ID NO: 6191 - DNA, 3705 bp, Artificial Sequence
  derived and/or modified sequence
atgcgttctcgctccaattcaggggtgcgtcttgacggttacgctagactcgtgcagcagaccatcctctgctaccaaaatccagtaacagggttgttaagtgcctctcacgagcagaaagatgcctgggtcagagataacatatacagcatcctcgcggtttgggggctcggcatggcttacagaaagaacgccgatcgagacgaggataaggctaaggcttacgaactggagcagaacgttgtaaagctgatgaggggccttttgcagtgtatgatgcggcaggtcgccaaggtagagaagttcaagcatacccagtcgacgaaggacagcctccacgcaaaatataatacagcaacctgcggcactgtcgtgggggacgatcagtggggacatttgcaagtcgatgcaacaagtttgtttttattgttcctcgctcagatgaccgcttcaggtttgagaattatctttacattggatgaggtggcattcatccagaacctggtgttctatatcgaggccgcttataaggtggccgattatggaatgtgggaacgcggggacaagacgaatcaaggaatcccagagctcaacgctagctcagtcgggatggcaaaggctgcactcgaagcgatcgatgagctcgacctcttcggcgcccatggcggccgcaagtccgtcatacatgtcctacccgatgaagtggaacattgccaatcaattctgttctctatgctacctagggccagcacatctaaagagattgacgccgggttgctatctattatctctttccctgctttcgcagtggaagatgtgaacctcgttaacgttacaaagaatgaaattatatccaaactgcaaggaagatatggttgttgtaggttccttcgggacggatacaaaacacctcgggaagaccctaatcgtttacactacgatcctgccgagctcaagttgttcgagaacatcgagtgcgaatggcccgttttctggacatatttcattatagacggggtgtttagcggggatgcagttcaggtccaagaatacagggaagcactggaggggatcctaattcggggcaaaaacggaataagactcgtgcctgaactgtacgctgtgccaccgaacaaagtggatgaagaatacaagaatccccatacagtggacagagttcccatgggcaaagtgccccatctgtggggccagagtctttacattctcagttctcttctagccgaagggttcctagccgccggcgaaatcgaccccctcaacaggagattctccacatctgtaaaacctgatgtggtggtgcaggtgaccgtgttagctgaaaataaccatatcaaagacctcctgaggaagcacggcgttaacgtgcagagcattgctgatattcaccctatccaggttcagcccggtcgaatcctgagtcacatttatgcaaaactcggacggaacaaaaatatgaacctctccggccggccatacaggcatatcggcgttttgggcacttctaaactgtacgtgatcaggaaccagatatttacgtttacccctcaatttacagatcagcaccacttttatcttgccctagacaacgagatgattgtggaaatgcttcgcatcgagctggcgtacttatgtacctgttggagaatgactgggcggccaaccctgaccttcccaatcagccggaccatgctcacgaacgacgggtctgatatccactctgccgtcctatcaacaattaggaaactagaggacggctacttcggcggtgcgcgcgtgaaactaggcaacctatccgaatttctgacaacttctttttacacttatctaaccttcctggaccccgattgtgatgaaaaactgttcgataacgcctcagaaggtacttttagtccagattcagattcagatctggtggggtatctcgaggatacttgcaaccaggaaagtcaggatgagttggatcactatatcaatcatctgctgcaatccacgtcattgaggtcctatttaccgcccctatgcaagaatacggaggaccgccatgtgttcagtgccatacattccaccagagacattttgtctgtcatggccaaggctaagggtctcgaagtgcctttcgtccccatgaccctccctaccaaggtgttgtctgctcatcggaagagccttaatttggttgatagcccacagccactgttggagaaggtacctgaaagtgacttccagtggccacgtgatgaccatggagatgtggattgcgagaagctcgtggaacagctcaaagattgttccaaccttcaggatcaggcagatattctttacatcttatatgtgataaagggcccctcctgggacacaaatctgagtgggcagcatggcgtgacagtgcagaatctcttgggagaactttatggaaaagctggcttgaaccaggaatgggggctcattagatatattagcggactcctgcgcaaaaaggtagaggtactggccgaggcttgcacagaccttctctctcaccagaagcagctcacagtgggactcccccctgagcctagggaaaagatcatatcagctccgctacctccagaagagctgacgaaactgatctacgaggctagtggccaggacattagcattgctgtcctcacgcaggaaatagtcgtctatctggcaatgtacgtgcgggctcagcccagtctgttcgttgagatgctcaggctgcgtatcgggctgattatacaggtcatggctaccgagctggcgcgcagtctgaattgctctggggaggaggctagtgaatctctaatgaatctgtcacccttcgacatgaagaaccttctccatcacattctttccggcaaggaattcggggtcgagcgctctgtacgaccgatccacagctcaacgtcatccccgactatatcgatccacgaggttgggcatactggagtcactaagacagagcgatcaggcattaacaggctgcggagtgagatgaagcaaatgacccgccggtttagtgccgatgagcagttcttttctgtgggacaggcggccagctccagcgcccattccagtaagagtgccaggagttccaccccatccagccccacaggtacgtcctctagtgacagcggtggacatcatattggctggggtgaacgccaaggacagtggctgcgtcggagacgccttgacggggcaattaaccgagtgccagttggtttctaccagcgtgtgtggaagatccttcaaaaatgccacgggttaagcattgacggctatgtgctcccgtcatctacaactcgggaaatgacgccacacgaaatcaaatttgccgttcatgttgaatccgtgctgaaccgagtgccacagcctgagtatagacagcttctggtcgaggccatcatggttttgactctgctgagcgacacagagatgacctctatcggcggcattatccacgtcgatcagatagtgcagatggctagccagttatttctgcaggatcaggtttcgatcggagcaatggacactttggagaaggatcaggctactggtatttgccattttttctacgattccgcgccatccggtgcctacggtacaatgacttacctcacccgggccgtcgcatcatacctgcaggagctgctgcccaactctggctgtcaaatgcag

SEQ ID NO: 6192 - DNA, 3705 bp, Artificial Sequence
  derived and/or modified sequence
atgcggtcgagatctaattcgggcgtgagacttgacggatacgcgcgactcgtgcaacaaaccatactctgttaccaaaaccccgtgactgggcttctgtcggcctcccatgaacaaaaggacgcctgggtgcgcgataacatctactcgatactggccgtgtggggactcggaatggcatatcggaaaaatgccgacagagatgaagataaagcaaaggcctatgaattggaacagaacgtggtcaaactgatgcggggacttcttcaatgtatgatgcgtcaagtggccaaggtggagaagttcaagcatacccagtcgactaaggattccctccatgcaaagtacaataccgcaacttgcgggaccgtggtcggtgatgaccaatgggggcatcttcaggtggatgcaacttcactctttctgctgttcctggcccagatgacggcatcgggacttcgcattatctttacgctggatgaagtagcatttatccaaaacctcgtattctacattgaagcagcatacaaagtcgcagactacggcatgtgggaaagaggtgataagactaaccagggtattccagaacttaatgcaagctcggtggggatggcaaaggcggcactggaggcgatcgatgagctggatctgtttggagcacatggtggaagaaagtcggtcatccatgtcctcccggatgaggtggaacattgtcaatctatcctctttagcatgcttcctagggcatccactagcaaggaaattgacgccggtttgctgtcaattatcagttttcctgcatttgcagtcgaggatgtgaatttggtcaacgtgaccaagaacgaaatcattagcaaacttcagggacgttacggatgttgtcgatttttgcgagatggctacaagacccctagagaggacccaaatcggctgcactatgacccagctgagctgaaactgttcgagaatattgaatgcgaatggcctgtgttttggacctatttcatcattgatggggtgtttagcggggacgccgtgcaagtgcaggagtacagggaagcactcgaagggattctgatccgcggaaagaacggaatacggcttgtacctgaactgtacgcggtgcctcctaacaaggtcgatgaagaatacaagaatccacacaccgtggatcgcgtcccgatgggaaaagtgcctcatttgtgggggcagtcgctgtacatactctcctctcttctggcagaaggatttctcgcagcaggagaaattgatccgctgaaccggcgattttcaactagcgtcaaacctgatgtcgtggtgcaagtcacggtgttggcagaaaacaaccacattaaggatctccttaggaagcacggagtcaacgttcaatctattgcagatattcatccaattcaggtacagcctggtcgaatactgtcgcacatctacgcgaagctcggtcggaacaagaacatgaaccttagcggtagaccttaccgccatataggtgtccttggcacttcaaagctgtacgtgatacgaaatcagattttcacgttcactccacaatttaccgaccaacatcatttctatcttgccttggacaacgaaatgattgttgagatgttgcgaattgaattggcttacctttgtacttgctggcgcatgactggtcgccctactcttacgttcccaatttctaggactatgcttaccaacgacggttcagatattcactcggcagtcctgagcactatcaggaagctggaggacggatacttcggaggagcacgcgtcaagctcggcaatctgtctgaattcctgaccacttcattttacacgtacctgacctttctcgatcctgactgcgatgaaaaactttttgataacgcatccgaggggaccttctcgcctgatagcgatagcgatctggtgggatacctcgaagatacctgcaaccaggagtcacaggatgaacttgaccattacattaaccatctccttcaatcgacctcgctgcggtcgtacctccctccattgtgcaagaacactgaagatcgccatgtgtttagcgcaattcactcgactcgcgatatcctgtcagttatggcgaaggctaaaggtctggaagtcccatttgtgcccatgactctgccaactaaggtgctgtcggcacaccgaaaaagcctgaatcttgtcgactccccccagcctctgttggagaaagtgcctgagtccgactttcagtggccccgtgatgatcacggagatgtggattgtgaaaaactggtcgagcaactgaaggactgttcgaatctgcaagaccaagcagacatattgtacattctgtatgttatcaaaggcccttcatgggataccaacctgagcggtcaacacggagtgaccgtgcaaaacctgctcggagaactgtacggtaaggcaggcctgaatcaggaatggggactgattaggtacatcagcgggcttcttcggaagaaggtggaagtgcttgcggaagcatgcaccgaccttctgtcccaccagaagcaacttaccgtcggtctgccccctgaaccacgagaaaagatcattagcgcaccattgccacctgaagagcttactaaattgatttacgaagcaagcggtcaagacatcagcattgccgtgctgacccaagaaattgtggtctacctggcaatgtacgtgcgtgcccagccttcactgtttgtggagatgttgcgtcttagaattggtcttatcattcaggtgatggccacggaacttgccagatctctcaattgtagcggagaagaagcaagcgaatcgctgatgaatctctcaccattcgatatgaagaacctgcttcatcacatcctgagcggtaaggaatttggagtggagcggtcagtgcggcccatccattccagcacctcttccccgactatttcgattcacgaggtgggacatactggcgtgactaagactgagcggtcaggtattaacaggcttagaagcgaaatgaagcagatgacccgtcgcttctcggccgatgagcaattcttctcggtgggtcaggcagccagctcctccgcacactcgtcaaaatccgctcgctccagcactccaagttccccgacgggcacttcgtcgtccgattccggagggcatcatattggctggggagaacgtcagggacagtggttgcgcagaagaaggcttgacggcgccattaatcgagtgccagtcggattttaccagcgcgtctggaagatacttcaaaaatgtcacggcctctcaatagatggttacgtgcttccatcgtccaccacccgggaaatgaccccacatgagatcaagtttgcagtgcatgtggaatcggttctgaatagggtgccgcagcctgaatacaggcaactcctggtggaggccatcatggtgctgaccctcctgtcggacactgaaatgacctccatcggaggaatcatacatgtggaccaaatcgtccagatggcatcgcaactcttccttcaagatcaagtttcgatcggagctatggatacccttgagaaggatcaagctaccggcatctgccatttcttttacgacagcgcgccttccggagcatatggtaccatgacttatctgacgcgcgctgtggcgagctacctgcaagaactgctgccaaatagcggatgtcagatgcag

SEQ ID NO: 6193 - DNA, 3705 bp, Artificial Sequence
  derived and/or modified sequence
atgcggagcagatcaaattcaggcgtgcgactggacggttatgccaggttggttcagcagacaatcctttgttaccagaaccccgtgacaggcttgttgtccgcctcgcatgagcagaaggacgcctgggttcgggacaacatctatagtattctggctgtgtggggcctgggcatggcgtaccgaaagaacgccgatcgggatgaagacaaagccaaagcctacgaactcgaacagaacgtggttaagctaatgagagggctactgcagtgtatgatgaggcaggtagccaaggttgaaaagtttaagcatactcaaagtacaaaggatagtctgcatgcaaaatataacactgctacttgtgggaccgtggtgggtgatgatcagtggggtcacttgcaggtggacgcgacttccctcttcctcctgttcctcgcgcagatgactgcttcaggcctgagaatcatattcaccctggatgaggtcgcctttattcaaaaccttgtgttctacattgaagctgcatacaaggttgccgactacggaatgtgggaacgaggtgataaaaccaaccaagggataccggaactcaacgcctcaagcgttgggatggcgaaggctgccctggaggccatagacgaactggaccttttcggagcacatggtggcagaaagtccgtgatccacgtcctgcccgatgaagtcgaacactgccagtcaattcttttcagcatgctgccccgggcctcaacttccaaagagattgatgcaggactactgagcatcatcagctttcccgctttcgcagttgaagacgtaaatctggttaatgttacaaagaacgaaatcatctccaaactgcagggcagatatggatgttgtagatttttacgcgacgggtacaagacaccgagagaggaccccaatcggttgcactacgatcccgccgaattgaaacttttcgagaacatagagtgcgagtggcccgtattttggacgtactttatcattgacggggtattcagtggcgacgcagtacaggttcaggagtacagggaagcattggaaggcatattgatcagaggaaaaaatgggatcagactcgtccctgaattgtatgccgtgccccctaacaaggtcgacgaggagtacaaaaaccctcacactgtggatcgggttcccatgggcaaggttccccatctgtgggggcagagcttatatatcttaagttctctgctggccgagggattcctggctgctggagagatcgatccattgaaccggagattttctacatcagtgaagcctgatgtggtggttcaggtgaccgtgcttgccgaaaacaaccatatcaaagatctgttacgcaagcacggtgtgaatgtgcaaagcatagcagacatacatccaatacaagtccagccaggccggatactgagccatatttatgcaaagctcggcaggaacaaaaacatgaacctgagcgggagaccgtacagacatataggggtgctaggcacctccaagttatatgttatcagaaaccagatatttaccttcacaccccagttcacggaccagcaccacttctacctggcccttgacaatgagatgattgttgaaatgctacgtatcgagctcgcttacctctgcacctgttggagaatgacaggcagacccaccctgacgtttcccatttctcgtactatgctgacgaacgatggcagcgacatccacagcgccgtcctttccaccataagaaaactcgaagatggatacttcggaggcgcccgggtgaagctcggtaatctgtccgagtttctgacaaccagtttctatacctatttgactttcctcgaccccgactgtgacgagaagctgttcgacaatgccagcgagggtacattttctcctgactccgacagtgatctggtgggttatctggaggatacttgcaatcaagagagccaggatgaattggatcattacataaatcacctgctgcaatccaccagcctcagatcctatctgccccccctgtgcaagaataccgaggataggcatgttttctctgccattcattcaacaagagacatattgagcgtcatggccaaggcaaaaggcttagaggtgccctttgtgcccatgactctccctacaaaggtgctctcagctcatcggaagagtttgaatttggtggattcaccacaacccttgctggagaaggtgcctgagagcgattttcaatggcctcgtgatgaccacggcgacgtggattgcgagaagctggttgaacagctgaaggactgctcgaacctccaggaccaggctgacattctttatatattgtacgtgataaagggcccatcttgggatacgaatctgtccggccagcacggtgtgaccgtgcagaaccttctgggggaactgtatggtaaggccggacttaaccaggagtgggggctcataagatatatctcaggcttactgaggaaaaaagttgaggtgctagcagaggcctgcactgacctgctgagccaccaaaaacagctcactgtgggcctgcctcctgaaccaagggaaaagatcatctccgcaccactgccccctgaggagttaactaagttgatttacgaggcctccggacaggatatcagcatcgccgtactgacgcaggagattgtggtttatcttgcgatgtatgtgagggctcagccttccctttttgtcgaaatgttgagactccgtatcgggttgatcattcaggtaatggctacggagcttgctcgcagccttaactgtagtggtgaagaggcatccgagtccctgatgaatctgagccccttcgatatgaagaacctgttgcatcacatcctgtctggaaaggagttcggcgtagagcgctcagtaaggccgattcactcttcgacctctagtcctaccatttcaatccacgaggttggacacactggggtgacgaaaactgaaagatccggtatcaataggctgcgctcggaaatgaagcagatgacacgccgattttcagcagacgaacagttcttttctgtagggcaagccgcttcctctagtgctcacagctccaaaagtgcccgcagctctactccttcaagtcctacgggcacttcctcttccgactctggtggccaccatattggatggggcgagcggcaaggacagtggctgcggcgccggcggctggatggggccattaaccgggttcctgtgggcttttatcagcgggtatggaaaatcctgcagaagtgccacggactgagcattgacggatatgtgcttccttctagcacgacccgcgagatgacaccacacgagattaagtttgccgtgcatgttgagagtgtcctgaatcgggtaccccagcctgagtatcggcagcttctggttgaggcaattatggtgctaaccttgctctccgataccgaaatgacatcaataggaggaattatccatgtcgaccagattgtccagatggcatctcagctgtttctgcaggaccaggtgtcaattggtgccatggacaccttagagaaggatcaggcaaccggaatttgtcatttcttttatgacagcgccccttcaggcgcatatggcaccatgacctacctcacacgggcagtcgcctcatatttgcaggagctcctccccaacagcggctgtcagatgcaa

SEQ ID NO: 6194 - DNA, 3705 bp, Artificial Sequence
  derived and/or modified sequence
atgcgctctcgctcaaatagtggtgtgaggttggatggatacgcaaggttggtgcaacaaacaattctctgctaccagaatcccgtgaccggccttttgagcgcttcacacgagcagaaagatgcctgggtgagagacaacatctatagtatactcgcagtgtggggtctggggatggcctataggaagaatgcggaccgcgatgaggataaggccaaagcctatgaattggagcagaatgtagtcaaactgatgagagggctgctgcagtgcatgatgaggcaggtagccaaagtggagaagttcaagcacacgcaaagtaccaaagactcccttcacgctaagtacaacaccgcaacatgcgggactgtcgtgggggacgaccagtgggggcacttacaggtcgacgcaacgagcttgtttttactgtttctggctcaaatgactgctagcggactccgcataatttttactctggacgaggtcgccttcatccagaacttggtgttctatatcgaggccgcatataaggtggccgattacgggatgtgggaacgtggtgataagacaaaccagggaataccagagctgaatgcgtcatctgtgggaatggcgaaggctgcactggaggccattgacgaactagatttgtttggtgctcacggaggccggaagtccgtgatccatgtcctgcccgatgaagtggagcactgccagtcaattctgtttagtatgctgcctcgcgcttcaacctcgaaagagatcgatgccggactcctttcaatcattagtttcccagcgtttgctgtggaagacgtgaaccttgtcaacgtgacaaaaaacgagatcatctccaaactccaaggcagatacgggtgctgtcgatttttaagagatggttacaaaacaccaagagaggatcctaaccgtttacattacgacccagctgaattgaaactgtttgaaaatatagaatgcgagtggccggttttttggacttacttcatcatcgatggggtgttttccggcgacgctgtccaggtgcaggaatatagagaggcattagaaggcatcctgattcgtggcaaaaatgggattagactagtgccggagctatacgctgtgccccccaacaaggtcgatgaagaatataagaatcctcacacagtggatcgggtacctatggggaaggtgcctcacctgtggggacagtcactctatattctgagtagtctcttagctgaaggcttcttagccgccggcgaaattgatccactcaaccggaggttctctactagcgtgaaacccgacgtggtcgttcaggttacagtgctggctgaaaacaatcatattaaggacctgttgcggaagcacggggtcaatgtgcagtccattgcggatatacaccctatccaggtgcagccaggtcgcatactgagccatatctacgccaaactcggacgcaataagaatatgaacctctcaggccgaccctaccggcacattggggtgcttggaaccagcaagctgtacgtaattcgaaaccagatctttaccttcacgccacagttcactgatcaacatcacttctacctggcgcttgataatgagatgatcgttgaaatgctgcgaatagaactggcttatctgtgtacttgttggcgaatgacgggacgccctactttaacattccccatttctaggaccatgttgaccaatgatgggagtgatatacattccgcggttcttagtaccatccgcaaactggaggacgggtattttggcggggctcgcgtaaaactcggaaacctctctgagttcctgacaacatcattctacacatacctgacctttctagaccctgactgtgacgagaaactcttcgacaacgctagtgagggtacgttctctcccgattccgacagcgatctcgtgggctacttagaggatacttgcaatcaagagtcgcaggatgagttagaccactatatcaatcatcttctccaaagcacctctctgagaagctatctgcccccactatgcaagaacactgaagacagacatgtcttttccgcgatccactccacaagagatatattgtctgtgatggctaaagcaaaagggctagaggtcccatttgttcccatgactctacctactaaggttctgagcgcccatcggaaaagcctgaatttagtcgactcaccccagcccctgctggaaaaggttcccgaatcggactttcagtggcctcgggacgaccatggcgatgtggattgcgagaagctggtggaacagctgaaggattgttctaatttgcaggaccaggccgatatcttgtatattctgtatgttatcaagggccctagctgggatacaaatctcagtggccagcatggcgtaaccgtgcagaacctgctgggcgaactttacggaaaagctggccttaatcaggagtggggcctcattcggtacatctctggactgcttcggaagaaagtcgaagtcctcgccgaggcttgtaccgatttgttaagccaccagaagcaattgaccgtgggtctgcccccagagccgcgagagaaaatcatatctgcccccttacctcccgaggaactgacaaagttgatctacgaagcttccggccaagacatatcaatagcggtcttgactcaagaaatcgtggtttacctggcgatgtatgtgcgggcccagccttcgctgttcgtggaaatgttacgtcttcgaataggtctgatcattcaggtgatggccaccgagctggccagatccctaaattgcagcggggaggaagcgagtgagagtctgatgaacctgtcaccctttgatatgaagaatcttcttcaccatattctctcaggtaaagaattcggcgtggaacggtcagttagaccaatccactcctccacaagttcaccaaccattagcatccacgaagtagggcacacgggagtgaccaagacggaaagatctggaattaaccgattaaggagtgagatgaaacagatgacaagaagattttcggcagacgagcagtttttttccgtcggccaggctgcttctagcagcgctcacagcagtaagtccgcaagatcttccaccccaagttcccccactggtacatcctcttccgattccgggggccaccatatcggctggggcgagagacagggacagtggctccgcagacgccggctggatggagcgataaacagggttccagttggattctaccagcgcgtctggaagatcctacagaagtgtcacggactgtcgatcgacgggtacgtgttgccatcatccaccacccgtgagatgactccccacgaaattaaattcgccgtccacgtggagtcagtgcttaatagggttccccagccagagtaccgccaactgctcgtcgaagcaattatggtcctcaccttgctctctgacacagagatgacctctattggaggaattatacacgtggaccagatcgtgcagatggcgtcacagctgttcctccaagatcaggtatctatcggcgctatggacacactggaaaaagaccaggcaactggtatttgccactttttttatgactccgcccctagcggtgcctacgggactatgacgtacctgacccgggcagtggcttcttacctgcaggagttactgccgaacagcggctgtcaaatgcag

SEQ ID NO: 6195 - DNA, 3705 bp, Artificial Sequence
  derived and/or modified sequence
atgcgctcgcgctcgaactcgggcgtccggctggacggctacgcgcgcctcgtgcaacaaacgatcttgtgctaccaaaacccggtgactggactcctctcagccagccacgaacaaaaagacgcttgggtgcgcgacaatatctactccatcctcgcagtctggggactgggtatggcataccggaagaacgcggatcgtgatgaagataaggcaaaggcgtacgaactcgagcaaaacgtggttaagctgatgagaggccttctgcaatgcatgatgaggcaggtggccaaggtcgaaaagttcaagcatacgcaatccactaaggactccctgcacgctaaatacaacaccgcgacttgtggaaccgtggtgggagacgaccaatgggggcatctgcaagtcgatgcaacctccctgttcctcctgtttttggcccaaatgaccgcttcaggactgcgcatcatcttcaccctggatgaagtcgcttttatccaaaacctcgtgttctacatcgaagccgcgtacaaggtggcggactatggaatgtgggagcgaggtgacaagaccaaccaagggatcccagagcttaacgcctcatccgtgggaatggcgaaagccgccctcgaggcgatcgacgaactggatctgttcggagcccacggcggtaggaaatcggtgatccacgtgctccctgacgaggtggaacactgtcagtcgatcctgttctcgatgctgccgagagctagcaccagcaaagagattgacgcaggactcctgtcaattatctccttcccggccttcgcagtcgaggacgtgaacctcgtgaatgtgactaagaacgaaatcatctcgaagctccagggccgctacggatgttgccgctttctgcgggacggatacaaaacgccgcgggaggacccgaaccggcttcactacgacccagccgaactgaagctgttcgaaaatatcgaatgcgagtggccggtcttttggacgtacttcatcatagacggcgtgttttccggagacgcggttcaggtgcaggagtacagagaagcgctggaaggaatcttgatcagaggaaagaacggtatccgcttggtccccgaattgtacgccgtgccaccgaacaaagtcgacgaagaatataagaacccccacactgtcgatcgagtcccgatgggcaaagtgcctcatttgtggggacagtcgctctacattctttcgtcgctgttggccgagggattcctggcagcaggagaaatcgatccgctcaacaggcgattttctactagcgtgaagcctgacgtggtggtgcaggtgactgtactggccgagaataatcacatcaaagatctgctgaggaaacatggggtcaacgtgcaatcaatcgcagatattcatccgatccaagtccagcctgggcggatcctcagccatatctacgcgaagctcggccggaataagaacatgaatctgtcggggaggccataccgccatatcggagtgctgggaactagcaagctgtacgtgatccgcaaccagatcttcacgttcaccccacagttcaccgaccaacatcacttctacttggccctggataatgagatgatcgtggaaatgctccggatcgaactggcctacctctgtacttgctggagaatgactggacgcccaacgctgacctttcccataagccgcactatgctcactaacgacggatccgatatccatagcgccgtgctgtctaccatcaggaagctggaagatggttacttcggcggggcaagagtcaagctgggaaatctctccgaatttctcactacctcattctacacttacctcactttcctggacccggactgcgatgaaaagctcttcgacaacgcttcggagggaaccttctcccctgatagtgactcggaccttgtcggctacctggaggatacttgcaatcaggaaagccaggatgagctggaccactacatcaatcatctgttgcagtcgacctccctgcggtcatatctgccgccactttgcaagaataccgaagatcggcacgtcttttcagctatccattcaacccgggatattctctcggtgatggccaaggccaaaggactggaagtgcccttcgtccctatgaccctcccgactaaggtgctgtccgcccatcggaagtctctgaaccttgtggactcccctcaaccgctcctggagaaagttccagagagcgacttccagtggccccgcgatgatcacggggatgtcgattgcgaaaaactggtcgaacagttgaaggactgttcgaacctgcaggatcaggctgatatcctctacatcctgtacgttatcaagggtccgtcttgggacactaatctgtccggccaacacggcgtgaccgtccagaaccttcttggggaactgtacggcaaggcgggactgaaccaggaatggggcctcatcagatacatcagcggactgttgcgtaaaaaggtggaagtgctggccgaggcttgcactgaccttctctcacaccagaagcagctcaccgtcggcctcccgcccgagccacgggaaaagattatttccgcgcctctgccacctgaggaacttactaaactgatctacgaggcctcaggccaggacatctcaattgcagtgctcactcaggagatcgtggtgtacctggcgatgtacgtcagagcacaaccgtccctctttgtggaaatgttgcggctgcgcatcggattgatcattcaagtgatggctactgagctcgcacgcagccttaattgcagcggagaggaggccagcgaatcactgatgaatctgagcccgtttgatatgaaaaacctgttgcatcacatcctgagcggtaaagaattcggcgtggagcggagcgtgcgcccgatccattcctcgacctccagcccaacgatctcgatccacgaggtgggtcacaccggagtgaccaagactgaaagatcgggaattaaccgcctgagatcagaaatgaagcagatgactcggcgattctccgccgacgaacaatttttctccgtgggtcaggccgcctcgtcctcagctcactcgtcaaagagtgcacgctcatcgaccccgtcgtcgccgaccggtactagcagctcggacagcggagggcaccatatcgggtggggagagaggcaggggcagtggctgagacggagacgcctcgatggagcgattaatagagtcccggtgggattctaccagcgcgtctggaagatccttcagaagtgccacggcctgtccatcgacggatacgtcctgccctcgtccacgacccgggagatgacccctcacgaaatcaagttcgcagtgcacgtcgaatctgtgctgaacagggtcccacagccagagtaccggcagctcctcgttgaggctattatggttctgactcttctgtccgacaccgaaatgacctccatcggcggaatcattcacgtggaccagatcgtgcagatggcctcacagctgttcttgcaggaccaggtgtcgattggagcgatggataccctggagaaggaccaggccaccggcatctgccacttcttctacgactcggccccatccggagcttacgggaccatgacttatctgacccgcgccgtggcgagctatctgcaagagctccttccgaacagcggatgccaaatgcag

SEQ ID NO: 6196 - DNA, 3705 bp, Artificial Sequence
  derived and/or modified sequence
atgcgctcccgctcgaactccggcgtcaggcttgatggctacgcgagactggtgcaacaaactattctttgttaccaaaatcccgtgactggacttctctccgcgtcgcacgaacagaaagatgcctgggtccgggacaacatttactcgattctggcagtgtggggtctgggtatggcatatcggaagaacgctgacagggacgaagataaggctaaggcgtacgaactcgaacaaaatgtggtgaaactcatgaggggactgctgcagtgcatgatgcgtcaagtggccaaggtggaaaagtttaagcatacccaatctactaaagattcgcttcacgccaagtacaacaccgcaacctgtgggacggtcgtgggtgatgatcaatggggacatttgcaggtggatgctacttcgcttttcctgttgtttctggcccaaatgaccgcctccggacttaggatcattttcactcttgacgaagtcgccttcatacaaaatcttgtgttctacattgaggcagcgtataaggtcgcagattacggtatgtgggaacggggcgataaaactaatcagggaattccggagctgaacgcgtcgtccgtggggatggccaaagcggcgcttgaagcgatagacgagttggacctgtttggggcacacggtggccgtaaaagcgtgatccatgtgcttcctgatgaggtggagcactgccagtcaattttgttttccatgcttcctagggccagcacgtcgaaggagattgacgcaggtctgctttccattatcagctttcccgccttcgcagttgaggacgtcaatcttgtgaatgtgactaaaaacgaaatcataagcaagctgcagggaagatatggctgctgtcgctttctccgcgatggctataagacccctcgggaagatcctaatcggcttcattatgatcctgcagaattgaagctcttcgagaacattgaatgtgaatggcctgtgttctggacctactttatcattgatggagtgttttctggtgatgccgtccaggtgcaagaatacagggaggctcttgaaggaattctgataagggggaaaaatggaatccgcctggtgccagaactctacgcagtccctccaaataaggtggatgaagagtacaagaaccctcatacggtggatagagtgcctatgggtaaagtgccccacctctggggacaatccctgtacatcctgtcctcgcttctcgcagaaggatttcttgccgcaggggaaatcgatcctctgaaccggcggttttcgaccagcgtgaagccagatgtggtcgtgcaagtgaccgtcctcgccgaaaacaatcatatcaaggatctgcttcgcaagcatggagtcaatgtccaaagcatcgcggatattcatcctatccaggtgcaacccggacggatcctctcccacatctacgcgaagctcggaagaaacaaaaacatgaacctttccggtagaccctaccggcatattggagtcctgggaacctccaaactgtacgtcatccgtaaccaaatctttacttttacccctcaatttacggatcaacatcatttctacctcgcattggataacgaaatgatcgttgaaatgttgagaatagaactggcatacctttgcacttgttggcggatgaccggtcgtccaaccctgacgttccccatttcacgaactatgctgacgaacgatggttccgacattcattcggcagtgcttagcaccattagaaagctcgaggatggatactttgggggtgcaagagtgaagctcggtaacctgagcgaattcctgaccacgtccttttacacctatcttacctttctggaccccgactgtgacgaaaaactctttgataacgcatcagaaggcaccttcagccctgacagcgattccgacctggtggggtacctggaggacacttgtaaccaagaatcgcaggatgaactcgatcattacattaatcacctccttcagtcgacctcgctcagatcctacctcccgcctctttgcaagaacactgaggaccgtcatgtgttctcagcgatacactcgaccagagacattctgtccgtcatggcgaaggcaaagggcctggaagttcctttcgtgccaatgactctgcctaccaaggtgctgtcagcgcatagaaagtcactgaatctcgtcgattctccacaaccacttcttgaaaaggtgcctgagagcgattttcaatggccgagagacgatcacggagacgtggactgtgaaaagttggtggaacagctgaaggattgctcaaaccttcaagatcaggcagatatactttacatcttgtacgtcattaagggaccgtcttgggacacgaacctcagcggacagcacggcgtcaccgtgcagaacttgcttggagagctctacggaaaggcaggtcttaatcaggagtggggcctcatccggtacatttcaggactccttaggaagaaggtggaggtgcttgcggaagcatgcactgacctgctcagccatcaaaagcaactgactgtgggactcccacctgagccgcgagaaaagattatcagcgcacctctgccgcccgaagaactcaccaagctgatttacgaggcatcaggacaagatattagcatagcagtcctgacccaggagatcgtggtgtaccttgctatgtatgtgagagcacaacctagcttgtttgtggaaatgctgcggcttagaattggcctgattatccaggtgatggcgactgagctggcaaggtccctgaactgttcgggcgaagaagcatccgagtccctgatgaacctgtcccccttcgatatgaagaaccttctccatcatattctgtccggcaaggagtttggagtggaacggtcagtgcggccaattcacagctccacctcgtcgcctaccatttctattcacgaagtgggacataccggcgtgactaagactgaaagatccgggattaatcgccttagaagcgagatgaagcaaatgacccgtagattctctgcagacgagcagttctttagtgttggacaggcggcctcctcctccgcacattcgagcaaatccgcgcggagcagcaccccttcctcgccaactggtacctcatcatcggattcgggaggacatcatatcggctggggtgaaagacaggggcagtggctgaggcgccggcggctggatggggcaatcaatagagtcccagtgggtttctaccaaagagtctggaagatcctccagaagtgtcacggcctgtcaattgatggatatgtgttgccatcgagcacgactagagaaatgactccccatgaaatcaagttcgccgtgcatgtcgaaagcgtcctgaatagagtgccacaacctgaataccgccaattgcttgtggaagccatcatggtgcttaccctcctctccgacaccgagatgaccagcatcggaggaatcattcacgtcgatcagatcgtgcagatggcatcgcaactctttctccaggaccaagtgagcattggagcaatggacaccctcgaaaaggatcaggcaactggtatctgtcactttttctacgattcggcaccttcgggcgcatacggaactatgacctatctgacccgggccgtggcgtcgtacctgcaagagctcctccctaattctggatgtcaaatgcag

SEQ ID NO: 6197 - DNA, 3705 bp, Artificial Sequence
  derived and/or modified sequence
atgagatccaggtccaacagcggcgtacgacttgatggttatgcaagactcgtccagcagacaatactgtgctatcagaacccagtaactggattgttgtcagcgtcgcatgaacagaaagacgcctgggtgagggacaatatctattccatcttagctgtatgggggctgggcatggcataccgaaagaatgccgaccgggacgaagacaaagccaaggcctatgagctcgaacagaatgtggtcaaactcatgagggggctgctgcaatgtatgatgagacaggtcgccaaggtagaaaaatttaagcacacccaatctactaaggatagccttcacgctaaatataacaccgcaacttgcggaactgttgtgggtgacgatcagtggggtcatctgcaggtggatgccacatcgctgttcctccttttcctggcccagatgaccgcctcaggcctccgtattatcttcaccctcgatgaggtcgcctttatccagaatctggtcttttacatagaagcagcctacaaggtggcggattatggcatgtgggagagaggtgacaaaacaaatcaaggcattcccgagctcaatgcgagcagcgttggcatggcgaaggccgcactggaagccatcgacgaattagatcttttcggagcgcacggcggccgcaagtctgtcatccatgttctgccggatgaagtggagcactgtcagtctatactgttctccatgctgccacgggcatccacttccaaagagattgatgctggcttgctctcaattatttcatttccagcgtttgccgtggaggacgtgaacttggtaaacgttaccaagaatgaaatcatttccaagctgcagggacgttatgggtgttgtagatttcttcgagatggttataagacgccccgcgaagatcccaatcgacttcactatgatcctgcagaactaaaactctttgaaaatattgagtgtgagtggccggtgttctggacctacttcatcatcgacggagttttcagcggcgacgccgtgcaggtgcaggagtatcgggaagctttggaggggattttaatcaggggcaagaatggcattagacttgtcccggagctctacgctgtgccacctaacaaagtggatgaggagtataagaacccacacaccgtcgaccgcgtgcccatggggaaagtgccacatctatggggacagtccctgtatattctgagttcactcttggctgagggctttcttgctgctggagaaatcgatccgttaaaccgtcgcttctctacaagtgtgaagcccgatgtggtcgtccaggtcaccgtgcttgcagaaaacaaccacatcaaggatctgttaaggaaacacggagtgaatgtgcagagcatagcagacatccaccccattcaagtacagccgggacggattctgagccacatatacgcaaagcttggacggaataagaacatgaacctgagtggcagaccctataggcacataggcgtgctgggcacaagtaaactgtatgttatacgcaatcaaatttttacttttactccccaattcacggatcagcatcatttctatctggctttagataacgagatgattgtagaaatgctgaggatcgagctggcatacttatgtacatgctggcgcatgacagggcgccccactctaacatttccaatcagcaggacaatgctgactaacgacgggtcggacatacactcggctgtactcagtactataagaaagttggaagacggctattttggaggagcgcgcgtgaagttgggaaaccttagtgagtttctgaccactagtttttatacatacctgacattcctcgatccagactgtgatgaaaaactctttgataatgcctctgaggggaccttttcccctgattctgacagtgatctggtcggatacctagaggatacttgtaatcaggagtcccaggacgaactggaccactacatcaaccacttactgcaaagcactagcctgaggtcctatctcccgcctttatgtaagaacacggaggatcgacacgtctttagcgcaatccacagcacacgggatatcctgtcagtgatggccaaggcaaaaggcctggaggtgccgttcgtgccaatgaccctgcctactaaagtattaagtgcccatcggaagagcctcaaccttgtggactcccctcagccactcttggagaaggtacctgaaagcgatttccagtggccacgggacgatcatggggatgtagattgtgaaaaacttgtggaacagctcaaggactgttccaatttgcaagatcaggctgacattttgtacatactgtacgtaattaagggcccatcttgggatacgaaccttagcggccagcacggcgtaaccgtacagaatttgttgggagagctttacggaaaggccggactaaaccaggaatggggtttgatccgctacatatcaggactgctccggaaaaaggttgaggttctcgcagaagcctgtacagatctgctgagtcaccagaagcagttgaccgtcggcctgccccctgaacctcgggaaaagatcattagtgcaccactcccccctgaagagctcaccaagctcatctacgaggcctctgggcaggacatttccatcgctgtgctaacccaagagattgtggtctacctggcaatgtacgtgagggctcagccctccctgtttgtggagatgttgaggttgcggatcggcctcataatccaggttatggccactgaattagcacgttccctcaattgttcaggcgaggaagcctccgagtccctaatgaaccttagccccttcgacatgaagaatctactgcatcatattctgtcaggaaaagagtttggcgtcgaaagatccgttcggcccatccactcttcaacatcaagtcccacaatctccatccacgaggttggccacactggcgtcaccaaaacggagcgtagcgggataaatcggttgagaagcgaaatgaaacagatgacacggaggttctcagccgatgagcaattcttttctgtgggacaggcagctagtagctccgcccactctagtaagtccgcaagaagtagtactccaagcagcccgacaggcacgagctccagtgacagcggaggccaccacatcggctggggcgagcgtcaggggcagtggctccggaggcgccggctggatggcgccattaaccgggtcccagtgggcttctaccagcgcgtgtggaagattctacaaaaatgccacgggctcagcatagatggctatgtactgcccagttccacaactcgagaaatgactccacatgagatcaaattcgcagtgcatgtggagtcagtgctgaaccgtgtaccacagccagagtatcgccagctcctggtcgaggccatcatggtgctgacactgctcagcgacacggagatgacctccataggcggtatcatccacgttgaccagattgtccagatggcctcacagctgttcctgcaagaccaggtgagcatcggcgcgatggacacgctggagaaggaccaggccacggggatatgccactttttttacgactctgctccctcaggggcctatggaacaatgacctaccttacccgggcggtcgccagctatctgcaggaactgcttccaaattctggctgccagatgcag

SEQ ID NO: 6198 - DNA, 3705 bp, Artificial Sequence
  derived and/or modified sequence
atgaggtcacgttctaactcaggcgtacgcctggatgggtatgccagactggtacaacagaccatcctgtgttatcagaatcctgtaacaggccttctttctgcctcccacgagcagaaggatgcttgggtgcgggacaacatatatagtattctggccgtctggggcctcggtatggcctataggaaaaatgccgaccgtgacgaggataaagcgaaggcctacgaattggaacagaatgtcgtgaagttaatgcgtggcctgctacaatgcatgatgcggcaggtggctaaagtggagaagttcaagcacacgcagagcaccaaagactctcttcacgcgaagtataataccgcaacctgcgggaccgtggtgggcgatgatcagtggggccaccttcaggttgatgctacttccctgtttttgctctttcttgcacagatgacagccagcggacttagaattatctttacgctggacgaggtcgctttcatccagaatctggttttttacatagaggccgcgtacaaggttgctgactatggtatgtgggaaaggggcgataaaaccaaccaaggtattcctgaacttaacgcgagctctgtgggtatggcaaaggcagccctcgaagctatcgacgaattggatctgtttggcgcacatggaggcagaaagtccgtcatccatgtgctacccgacgaggtggagcactgccaaagcatcctatttagcatgctgccaagggcaagtacgagtaaagagatcgacgcgggactgctttccattatttcatttccagcctttgctgtggaggatgttaacctcgtaaacgtaaccaaaaatgagataatcagcaaactacagggaagatacgggtgctgtcgatttctacgggatgggtataagaccccccgcgaggacccaaatcgcttacactatgatccagcagaactgaagctgttcgagaacattgagtgcgagtggcctgtgttctggacatactttatcatcgacggcgtgttttccggcgatgccgtccaggtgcaagagtacagggaagccctggaggggatcctgatccgcggaaagaacggaatccgccttgtgccagagctgtatgctgtcccaccgaacaaggtggacgaagagtacaaaaatccgcacactgtggaccgggtcccaatgggcaaagtgccacacctatggggtcaatcactctacatcctaagtagcttgttggccgaaggtttcctggccgctggggagatcgaccctctgaaccgacgtttttcaacaagcgttaagcccgatgtcgtcgtgcaagtgaccgtgctggcagagaataatcatattaaagacctgcttagaaaacatggtgttaatgtacagagcatcgctgatatacaccccatccaagtccagccagggcggatcctgtcccatatatacgccaaattggggcgaaacaaaaatatgaatctgtcagggaggccatacaggcacatcggcgtgctgggcacctctaaactgtacgtcatccgaaaccagattttcacctttaccccacagtttacagatcagcaccatttttatctggctctcgacaacgaaatgatcgtggagatgcttcggatagaactggcatatctatgcacttgttggcgcatgacaggacggccaaccctgacttttcccattagcagaactatgctgacaaacgacggctcagatatccacagcgctgtcctttccacgattaggaaacttgaagacggctacttcggcggcgcccgggttaagctggggaatttgtcggagttccttacgacatctttttatacttacttgacctttctcgacccagactgtgatgagaagcttttcgacaatgcgtctgaggggacgttttccccagacagcgactcagacctagtgggttacctagaagacacatgcaaccaggagtctcaggacgaattggatcactacatcaatcatcttttgcaatctacatcattgcggagctatcttccacccctctgcaagaataccgaggaccggcatgtgttcagcgccattcacagcacccgagacatcctctccgtcatggccaaggctaagggcctggaggtgcctttcgttcccatgaccctgccgactaaggttctgtcagcccaccggaagagtcttaatcttgtggactccccacagcctctcctggagaaagtgccagaatcggactttcagtggcccagagacgatcatggggacgtggattgcgaaaagctggtggagcagctaaaggattgttccaacctacaggatcaggcagatattctatatatcctttatgtgattaaaggtccgtcctgggacacgaacctatcaggacagcacggggtgacggttcagaacctcctgggagagctgtatgggaaggcggggctcaatcaggagtggggcctcatacggtatatctccggtctgctgaggaaaaaggtagaagtactggctgaagcctgtactgacctattgtcacatcagaagcagcttacagtcggattgccgccagagccacgtgagaagattatctctgcccctctacctccagaggaactgaccaaactgatctatgaggcttctgggcaggatatttctatcgcagtgcttacccaggagatcgttgtgtatctggctatgtacgttagggctcagccaagtctgtttgtcgaaatgcttcgcctgcgcattgggcttataatccaggtgatggccacagagctcgcaagatccctgaattgctctggcgaagaggcctccgagagcttaatgaatctgagtccatttgatatgaaaaacctcttgcatcatattctgagtggcaaggagttcggcgtcgagcggtcagtaagacctatccattccagtacatcttcaccgaccatcagtatccacgaggtcgggcatactggagtcactaagacagagcgttcaggcatcaataggctccgaagtgagatgaagcagatgacgaggcggtttagcgccgacgagcagttctttagtgtggggcaggctgcgagcagctccgcccattcctcaaagtcagcacgctctagcacaccatcctcccctacgggcacgagttcctccgactccggtggacaccacatcgggtggggagaaagacaggggcagtggctgaggagacgcagactcgacggagcaattaatcgcgtcccggtggggttctatcagcgcgtgtggaaaattctacaaaaatgccacgggctgtcaattgacggctacgtgcttccctctagtacgactcgagagatgacgccacatgagatcaagttcgccgttcacgtcgaatctgtgctaaacagagttccccaacccgagtacagacagctgttggtggaagcaataatggtgttgacactcctgtcagacacagagatgacaagtattggaggaatcattcacgttgatcaaattgtacagatggcgagccagcttttcctccaggatcaagttagcataggggcaatggacacacttgaaaaggatcaggccacaggtatttgtcactttttctatgactccgcacccagtggggcgtacggaacgatgacatatctgaccagagccgtggcatcttatctgcaggaactcttgcccaattcaggttgccagatgcag

SEQ ID NO: 6199 - DNA, 3705 bp, Artificial Sequence
  derived and/or modified sequence
atgcgttcgcgttcgaattcgggtgtacgtctagatggttatgcgcgattagtacaacaaacgatattatgttatcaaaatccggttacgggtttactatcggcgtcgcatgaacaaaaagatgcgtgggtacgtgataatatatattcgatattagcggtatggggtctaggtatggcgtatcgaaaaaatgcggatcgagatgaagataaagcgaaagcgtatgaattagaacaaaatgttgtaaaattaatgcgaggtttactacaatgtatgatgcgacaagttgcgaaagttgaaaaatttaaacatacgcaatcgacgaaagattcgctacatgcgaaatataatacggcgacgtgtggtacggtagtaggtgatgatcaatggggtcatttacaagtagatgcgacgtcgctatttctactatttttagcgcaaatgacggcgtcgggtttacgtataatatttacgttagatgaagttgcgtttatacaaaatctagtattttatatagaagcggcgtataaagtagcggattatggtatgtgggaacgaggtgataaaacgaatcaaggtataccggaattaaatgcgtcgtcggttggtatggcgaaagcggcgttagaagcgatagatgaattagatttatttggtgcgcatggtggtcgtaaatcggtaatacatgtattaccggatgaagtagaacattgtcaatcgatattattttcgatgctaccgcgtgcgtcgacgtcgaaagaaatagatgcgggtctattatcgataatatcgtttccggcgtttgcggtagaagatgtaaatctagttaatgtaacgaaaaatgaaataatatcgaaactacaaggtcgttatggttgttgtcgatttttacgagatggttataaaacgccgcgtgaagatccgaatcgtttacattatgatccggcggaattaaaactatttgaaaatatagaatgtgaatggccggtattttggacgtattttataatagatggtgtattttcgggtgatgcggtacaagtacaagaatatcgtgaagcgctagaaggtatactaatacgtggtaaaaatggtatacgactagttccggaattatatgcggtaccgccgaataaagtagatgaagaatataaaaatccgcatacggtagatcgagtaccgatgggtaaagtaccgcatttatggggtcaatcgctatatatactatcgtcgttattagcggaaggttttctagcggcgggtgaaatagatccgctaaatcgtcgattttcgacgtcggttaaaccggatgtagtagtacaagttacggttctagcggaaaataatcatataaaagatttattacgaaaacatggtgttaatgttcaatcgatagcggatatacatccgatacaagtacaaccgggtcgaatactatcgcatatatatgcgaaactaggtcgaaataaaaatatgaatttatcgggtcgtccgtatcgtcatataggtgttctaggtacgtcgaaattatatgtaatacgaaatcaaatatttacgtttacgccgcaatttacggatcaacatcatttttatctagcgttagataatgaaatgatagttgaaatgctacgtatagaattagcgtatctatgtacgtgttggcgaatgacgggtcgaccgacgctaacgtttccgatatcgcgtacgatgttaacgaatgatggttcggatatacattcggcggtattatcgacgatacgtaaattagaagatggttattttggtggtgcgcgtgttaaattaggtaatctatcggaatttttaacgacgtcgttttatacgtatctaacgtttttagatccggattgtgatgaaaaattatttgataatgcgtcggaaggtacgttttcgccggattcggattcggatctagttggttatctagaagatacgtgtaatcaagaatcgcaagatgaattagatcattatataaatcatctattacaatcgacgtcgctacgatcgtatttaccgccgctatgtaaaaatacggaagatcgtcatgttttttcggcgatacattcgacgcgtgatatactatcggtaatggcgaaagcgaaaggtctagaagtaccgtttgtaccgatgacgctaccgacgaaagttctatcggcgcatcgtaaatcgctaaatttagtagattcgccgcaaccgttattagaaaaagttccggaatcggattttcaatggccgcgtgatgatcatggtgatgtagattgtgaaaaactagttgaacaactaaaagattgttcgaatttacaagatcaagcggatatattatatatattatatgtaataaaaggtccgtcgtgggatacgaatctatcgggtcaacatggtgtaacggttcaaaatctactaggtgaattatatggtaaagcgggtttaaatcaagaatggggtttaatacgatatatatcgggtttattacgtaaaaaagtagaagtactagcggaagcgtgtacggatctattatcgcatcaaaaacaactaacggtaggtctaccgccggaaccgcgagaaaaaataatatcggcgccgttaccgccggaagaattaacgaaattaatatatgaagcgtcgggtcaagatatatcgatagcggtactaacgcaagaaatagtagtatatctagcgatgtatgtacgagcgcaaccgtcgctatttgtagaaatgctacgtttacgtataggtctaataatacaagtaatggcgacggaattagcgcgatcgctaaattgttcgggtgaagaagcgtcggaatcgttaatgaatttatcgccgtttgatatgaaaaatctactacatcatatattatcgggtaaagaatttggtgtagaacgatcggtacgtccgatacattcgtcgacgtcgtcgccgacgatatcgatacatgaagttggtcatacgggtgttacgaaaacggaacgatcgggtataaatcgtttacgatcggaaatgaaacaaatgacgcgtcgtttttcggcggatgaacaatttttttcggtaggtcaagcggcgtcgtcgtcggcgcattcgtcgaaatcggcgcgatcgtcgacgccgtcgtcgccgacgggtacgtcgtcgtcggattcgggtggtcatcatataggttggggtgaacgtcaaggtcaatggttacgtcgacgacgtttagatggtgcgataaatcgtgtaccggtaggtttttatcaacgtgtatggaaaatactacaaaaatgtcatggtctatcgatagatggttatgttctaccgtcgtcgacgacgcgagaaatgacgccgcatgaaataaaatttgcggtacatgtagaatcggtactaaatcgagttccgcaaccggaatatcgacaattactagtagaagcgataatggtattaacgctattatcggatacggaaatgacgtcgataggtggtataatacatgtagatcaaatagtacaaatggcgtcgcaattatttttacaagatcaagtatcgataggtgcgatggatacgttagaaaaagatcaagcgacgggtatatgtcattttttttatgattcggcgccgtcgggtgcgtatggtacgatgacgtatctaacgcgtgcggtagcgtcgtatttacaagaattattaccgaattcgggttgtcaaatgcaa

SEQ ID NO: 6200 - DNA, 3705 bp, Artificial Sequence
  derived and/or modified sequence
atgcgctcccggtccaactctggcgtcaggttggacggatacgcgcgccttgtccagcaaaccatcttgtgctatcaaaacccggtgaccggccttctgtcggccagccatgagcagaaagacgcctgggtcagagacaatatctactcaatcctggcggtgtggggccttggaatggcctaccgcaagaacgccgacagagacgaggacaaggccaaggcttacgaacttgagcagaacgttgtgaagctgatgaggggactgttgcagtgcatgatgcgccaagtcgcaaaggtggaaaagttcaaacacacccagtcgaccaaggattcgctgcatgccaaatacaacaccgcgacttgcggaactgtggtgggggatgaccaatggggtcatttgcaagtcgacgccacctcactgtttctgcttttcctcgcccagatgaccgcgtccggcctccgcatcatctttactctcgatgaagtcgcctttatccagaatctggtgttctacatcgaggcagcctacaaggtggcagattacggtatgtgggaaaggggagataaaacgaaccaaggtatcccggaactgaacgcttcatccgtgggcatggcgaaggcagccctcgaagcaatcgacgaactggatctctttggcgctcatggagggcgcaagagcgtgatccatgttctgcctgatgaagttgagcactgccagtcaattctcttttcgatgctgccgcgggcatcaacctcaaaggaaatcgacgccggcctcttgtcgatcatttcgttccctgccttcgccgtcgaggacgtgaacctcgtgaatgtcacgaagaacgagatcatcagcaaactccagggtcgctacggatgctgcagatttctgagagatggatacaagacccctcgcgaagatcctaatcggctgcattacgatccggcagaacttaagctgttcgaaaacatcgagtgtgaatggccggtgttctggacctacttcataatcgatggagtgttctccggcgatgctgtgcaggtgcaggaataccgggaagctctcgaaggaatcctgattcgcggtaaaaacggtatccgcttggtgccagagctgtacgccgtgccgccgaataaggtggatgaggagtacaaaaacccgcacaccgtggaccgcgtgcctatgggaaaggtcccgcacctctggggacaatcgctgtacattctgtcatctctgctggccgagggattcctcgccgccggagagatcgacccactgaaccgccggttctccacgtccgttaagcccgacgtggtcgtgcaagtgaccgtgctggccgaaaacaaccatatcaaggatctccttaggaaacacggtgttaatgtgcaaagcatcgcagatattcacccgatccaggtccaaccggggcgcatcttgtcgcacatctacgcgaagctgggacgcaacaagaatatgaatctctctggacgcccgtacagacatatcggagtgctcggaacgtcgaagctgtatgtgatccgcaatcaaatcttcaccttcaccccccagttcaccgatcagcaccacttctacctggcgcttgacaacgagatgatcgtggaaatgttgcggatcgaactggcctacctgtgtacgtgctggagaatgactggccggccgactctgactttcccaattagcaggaccatgctgaccaatgatgggtccgacatccactcggcggtcttgtccactatccggaagctcgaggacggctacttcggaggtgccagagtcaagctgggcaatctcagcgaattcctcaccacgagcttctacacctatctgacgtttctcgacccggactgcgatgagaagctgttcgacaatgcctctgagggcaccttctcgcccgactcggacagcgacctcgtcgggtacctcgaggacacttgcaaccaggaaagccaagatgagcttgaccactacatcaaccacttgctgcagtcgacttcgcttcgctcctacttgccacccctgtgcaagaatactgaagatcgccacgtcttttccgccatccactccactcgggacattttgtcggtcatggccaaggcaaaaggacttgaagtcccatttgtgcctatgactctcccgaccaaggtgctgtcggcgcacagaaagtcactgaacctggtggactcgccccagccattgctggaaaaggttccagaatctgactttcagtggcctcgggatgatcacggagatgttgactgtgagaaacttgtggagcagcttaaagactgttccaatctccaagatcaagctgacatcctgtatatcttgtacgtgatcaaaggaccatcctgggatacgaacctctcgggacaacacggagtgactgtgcagaacctgctcggcgagctctacgggaaggccggactgaatcaagagtgggggcttatccgctacatctcgggcctgctccggaaaaaagtggaagtcctggctgaagcctgcactgacctcctgtcacaccagaagcaactgactgtcgggctgccaccggaacctagagaaaagatcatctcagcacctctgccgccagaggaattgactaaactgatatacgaggcgtcggggcaagacatctccatcgcggtgctgacccaggagatagtcgtgtacctcgcaatgtacgtccgagctcaaccatcccttttcgtggaaatgctgcggctcagaattggcctcatcatccaggtgatggccacggaactggcacgatcacttaattgctccggagaagaggcatccgaatccctgatgaacctcagcccattcgatatgaagaatctgctccatcatattctgagcgggaaggagttcggtgtggagcggagcgtgcgaccaattcactccagcacttcgtcgcccactatttcgatccatgaggtgggtcatacgggagtcaccaagaccgagagatcgggcattaacaggctgcggtccgagatgaaacaaatgactaggcgcttctccgcggacgaacagttcttcagcgtcggacaggctgcatcatcatcggctcattcgtcgaagagcgctcggtcctcgactccaagctcacctacgggaaccagctcctcagattccgggggccaccacatcggatggggagagagacagggacagtggctccgacgccgccggttggacggggcgatcaaccgcgtgcctgttggattctaccagcgggtgtggaaaatcctccagaagtgccacggactgtcaatcgatggatacgtgttgccctcatccacgacccgggaaatgactccgcacgaaatcaaatttgcggtccacgtggaaagcgtcctcaatagggtgccgcagcccgagtaccgacagctgttggtggaagcgattatggtcctgactctgctgtcagacactgaaatgacttcaatcggaggcatcatacatgtggaccagatcgtccagatggcctctcagttgtttctgcaagaccaggtgtccatcggggctatggatactctggagaaggaccaggcgaccggaatttgtcatttcttctatgactccgccccgagcggagcttatggcactatgacctacctgacccgggctgtcgcatcttatctgcaagaactgctccccaacagcggttgccagatgcag

SEQ ID NO: 6201 - DNA, 3705 bp, Artificial Sequence
  derived and/or modified sequence
atgaggagtaggtctaactcaggggtccgacttgatggctatgcgcgactggtgcagcagactattctttgttaccaaaacccagtcaccggtttgctaagcgcctctcacgaacagaaggatgcctgggtgcgagacaatatctatagtatcttggctgtctggggtctaggaatggcatatcgaaagaatgcagacagagacgaggacaaggcgaaggcttatgaacttgaacaaaatgtcgtcaagctgatgcgaggccttttgcagtgtatgatgaggcaagtggccaaagtagaaaagttcaagcatacccagtctaccaaagacagcttacatgcaaaatacaacactgcaacatgcggaacagtcgtgggggacgatcagtggggtcaccttcaggtggacgcaacctcactcttcctcctgtttctcgcccaaatgacagctagcggtctcagaattatttttacactggacgaagtggcgttcattcagaacctcgtgttctacattgaggcggcttacaaggttgcagactacgggatgtgggaaaggggggacaaaaccaaccagggcatccctgagctgaatgcaagctcagttggcatggccaaagccgctttagaagctattgacgagctcgatcttttcggagcgcatggaggccggaagtccgtgatccacgtactgcctgatgaggtggagcactgccagtcaatattattcagtatgctgccacgtgccagcacctctaaggaaatcgacgctggtctcctgtctattataagctttcccgcatttgcggtggaggatgttaacttggtgaacgtgacgaaaaacgaaattatatcaaaattacagggcagatacggctgttgtcgatttctgcgagatggatacaaaacaccgagggaggatcccaataggctgcactatgacccagcagaactgaagttatttgaaaatattgagtgcgaatggcccgttttctggacatatttcattattgatggcgtattctccggcgatgctgtgcaagtacaagaatatagggaagcacttgaaggtattctgatccgaggaaagaatgggattcgactggtccccgagctctacgcagtgccccccaataaggtcgacgaagaatataaaaatccccataccgtcgatcgtgtgccgatgggtaaggtccctcatctctggggacagagcctttacatcctgtcttcacttctagctgagggcttcctggccgctggagagatcgatccactgaatcggagattttccactagtgtgaagcctgatgtggtcgtgcaggtcacagtcctggccgagaacaatcacattaaagacttgttgcgaaaacacggggtgaacgtccagagcattgcagatatccaccccatccaggtacagcccggcaggatactgtcccatatttacgccaaactggggcgaaataaaaatatgaatctgagtggacggccctataggcatattggggtgttgggcaccagtaagttgtatgtgattaggaaccagatatttacatttaccccacagtttacagatcagcatcacttttacctggcactggataatgagatgattgttgaaatgcttagaatcgaactggcctacttgtgcacatgttggcgtatgacaggcaggccaactctgactttccctatttctagaaccatgctgaccaacgacggttctgatatccactctgctgtcttgagcacaatcaggaagctggaagacggttactttggtggcgcacgagtgaaactgggcaatctgagtgaattcctgactacatccttttacacatacctgacgtttttagaccctgattgtgacgaaaagctgttcgacaatgcatccgaaggcacctttagtcctgacagcgatagtgatcttgtcggatacttggaggacacctgtaaccaagaatcccaggacgagctcgatcactacattaatcacctgctgcagtcaacctctctgcgatcgtatttgccacctctctgcaagaacactgaagacagacacgtgtttagtgccattcattccacccgtgacattctctcagttatggctaaggcgaagggcctcgaagtgccctttgttccaatgacactacccacgaaagttctgtctgcccatagaaagagcctcaacctagtggactccccccagccgctcctcgaaaaagtacctgagtccgactttcagtggccccgggacgatcacggagacgtggactgcgagaagcttgtggagcagctgaaggattgttcaaacttgcaagatcaagcagatatcctgtatattctctatgtgatcaagggccctagttgggacactaatctgtctggtcagcacggagttactgtgcagaatttgcttggtgaactgtacggcaaagcagggttgaaccaggaatggggcctcattaggtatatctctggtcttctaaggaagaaagtggaggtgctagctgaggcttgtaccgatctgctatcccaccagaaacagctcacagtcggcctgcccccagaaccaagagagaaaattatcagcgcccccctgccgcctgaagagctaacaaagttaatatatgaagcaagcggacaggatatttccatagcagtgttaacacaggaaattgtagtttatttagctatgtatgtacgcgcccagccaagcctgtttgtggagatgctgcgtcttcgaattggtcttataattcaggtgatggccactgagttagccagaagtctgaattgttccggtgaagaggcctctgaaagcttaatgaacctttctccatttgacatgaagaatctgctgcaccacatcctcagcgggaaagagtttggggttgagcgtagtgtaagacctattcactcctccacatccagcccgacaatcagtatccacgaagtgggccatactggggtcacaaaaaccgaacgatccgggatcaatagactgcgcagcgaaatgaagcagatgactaggaggttctctgccgatgagcagttctttagcgtgggacaagctgccagcagctctgctcactcgtcaaagtccgccagaagctccaccccctcgtcccctaccgggacttcgagctccgattctggcgggcaccatattggatggggcgagagacaaggccagtggctgcgaaggagacgattggatggcgctatcaaccgagtaccagtgggcttctaccagagggtgtggaaaattcttcagaagtgccatggcttatctattgacgggtacgtgctgcctagctccaccacccgagaaatgaccccacacgagatcaagttcgctgtccatgttgaatccgtgctcaacagagtgccgcagcccgagtacaggcaactgctcgttgaggcgattatggtgcttacactcctcagtgacacagaaatgacctctattgggggcattattcacgtagaccaaatcgtgcagatggcatcccaacttttcctacaggaccaggtgagtatcggagcgatggacacacttgagaaagaccaagcgactggtatttgccatttcttttatgattcagcaccatcgggggcatatggtacaatgacctacctgacccgcgccgtggcctcataccttcaggaactgctccccaacagtggctgtcaaatgcaa

SEQ ID NO: 6202 - DNA, 3705 bp, Artificial Sequence
  derived and/or modified sequence
atgaggtccaggtctaattctggcgtcagattagatgggtacgcccggttggtgcagcagactattctttgctatcaaaatcctgtgacaggccttctgagcgccagccacgaacagaaggacgcgtgggtccgtgataatatttatagcatattggcagtctggggactgggtatggcatacagaaagaatgccgatcgcgatgaagataaggccaaggcatatgagttggagcaaaatgtagtgaagcttatgagagggttgttgcaatgcatgatgcgacaagttgcgaaagtggagaaattcaaacacacccagagtacaaaggatagcctccatgccaaatataataccgcgacatgcggcacagtggtcggcgatgatcaatgggggcacctccaggttgacgccacttcgctgtttctgctctttctggcccaaatgacggcgagtgggttgaggattattttcactctggacgaggtggcatttatccagaacttggtcttttatatcgaggccgcctataaggttgcggactatggcatgtgggagagaggggacaagacaaatcagggcatcccagagctgaacgccagttcggtggggatggcgaaggctgccctggaggccatagacgagctggaccttttcggggcacatggggggaggaaatccgttatacatgtgctcccagacgaggtagaacactgtcagtccatcctgtttagtatgctaccacgcgcatcaacaagtaaagagatagacgctggattactgagtattatcagttttcctgccttcgccgtcgaagatgtaaatctggttaatgtaacaaagaacgagattatcagtaaactacaaggccgatacgggtgttgcaggtttctgcgggacggctacaagaccccgcgggaggaccccaatagactccattacgatccggccgagctcaaactctttgaaaacattgagtgtgagtggcccgtattctggacatactttatcattgacggcgtgttctctggcgacgctgtgcaagtccaggagtacagagaggcactggaaggtatattgatccggggaaaaaacgggatcaggctcgtgcccgagctgtatgccgtgcctccgaacaaggtcgatgaagagtacaaaaacccacatacagtggatagggttccaatgggcaaggtgcctcacctctggggtcagtccctgtatatcctgtcctccctcttagctgaggggttcctagcagcgggcgagatcgatcctctcaaccggagattttctacaagcgtaaaacctgatgtcgtggtccaagtcacagtacttgccgagaacaatcacattaaagacctgttgaggaagcacggggtgaacgtgcagtctatcgccgacatacatcccatccaagtccaacccggtcggattctaagtcatatctacgcgaagttgggacgtaacaagaatatgaatttatcaggtcggccctaccgccatatcggggtcctgggaacatccaagctgtacgtgatccgcaaccagattttcacattcacacctcagttcaccgaccaacatcacttttatttggccctcgacaatgaaatgattgtggaaatgctgaggattgagctagcctacctatgcacatgctggcgaatgacagggcgaccaactctcacgtttccaatctcccgcacaatgttgactaacgatggatcagacatccattcagctgtgctgagcactatcagaaaattggaagacggatactttggcggggccagagtgaagctcgggaatctaagcgagttcctcacgacaagcttctatacgtatttgacctttctcgaccccgattgtgacgagaagctgtttgataacgctagtgaagggactttttctcccgactccgactccgacttggtcggctatcttgaggatacatgtaaccaagagtcacaagacgaattggaccattacatcaatcatctcctccagtccacatctctgaggtcctacctgccacctctgtgcaagaacacagaggaccggcacgtatttagcgcaatccatagtactcgggacatccttagcgtaatggcaaaggctaagggactggaggtgcccttcgttccaatgacgttaccaacaaaggtgctctcagctcacaggaagagcctgaacctggtggactccccccagccattgctggagaaagtgccggagtcggattttcagtggcctcgtgacgatcatggggacgtggactgcgaaaagcttgtggaacagttgaaggactgttcaaacctgcaggaccaggctgatattctctatatcctctacgttattaaggggccttcatgggatacaaacttgagcggccaacacggcgtcaccgtccaaaacctactcggggagctatacggaaaggccgggcttaaccaggagtgggggttgatcagatatatttcaggacttttgcggaaaaaagtagaagtgctggccgaagcatgcaccgacctcttgagtcaccagaagcagctaaccgtgggcctgccaccagagccaagggagaagattatcagtgcccctctgccacctgaggagctgacaaaattgatctatgaggccagtggccaagacataagtatcgctgtcctgacacaggagattgtcgtctatctagcaatgtacgttagagcacaaccgagcctattcgtagagatgctgagactccgaatcggactgattatccaggtgatggccactgagctcgccagatcccttaattgcagcggcgaggaagctagcgagagtctgatgaatctctcaccatttgatatgaaaaaccttcttcaccatatccttagcggaaaggagttcggagttgagcgatctgttcgacctatacatagttcaacgagctctccaactatttctatccacgaggtcgggcatacgggggtgactaaaaccgagagatccggaattaatagactgaggtccgaaatgaagcagatgacaagaaggttcagcgcggacgaacagttcttcagcgttggccaggcagcttcctcctctgctcattccagcaaaagtgcccggtcatccaccccctccagtccaaccgggacatctagttcagattcaggaggccatcacatcgggtggggtgaacgtcaaggacaatggttaaggagaagaaggctggacggggcaatcaatagggtaccggtggggttttatcagcgcgtttggaaaatcctgcagaagtgccacggactcagtattgacgggtatgtcctcccgtccagcacaacccgggaaatgacaccacacgagattaagttcgctgtgcacgtggagagcgttctgaaccgagtgcctcagcctgaatatcggcagctcctggtggaggcgatcatggtccttactctgttgtccgatacagagatgacctccattggtggcataatccatgtggaccagatcgtacagatggcttcacagctgtttctccaggaccaggtaagtattggcgctatggacactctggagaaagaccaggctactggaatctgccacttcttttacgactccgccccgtctggcgcttacggcactatgacatatctgacccgggcagtagcgtcgtacctgcaggaactccttccaaattcggggtgtcagatgcag

SEQ ID NO: 6203 - DNA, 3705 bp, Artificial Sequence
  derived and/or modified sequence
atgcggagccgatccaattccggtgtccggctggatggctatgcccgccttgtgcaacagacaatcttatgctaccaaaatccagtcactgggctattaagcgcttctcatgaacaaaaagacgcatgggtccgcgataatatatacagcatcctggcggtttgggggctgggtatggcctacaggaaaaatgccgatagagatgaagataaggcaaaggcatatgagctggagcagaatgttgttaagctgatgagagggcttctgcagtgtatgatgcgccaggttgcaaaggtggaaaagttcaagcacactcagtccactaaggactcactccacgcaaagtataacactgccacatgtggtacagtggtaggggacgaccagtgggggcacctgcaggtggacgcgacatcgctcttcctcctgttcttggcccaaatgaccgcctccgggcttagaataattttcacgctggacgaggtggcctttattcagaacctggtgttttatatcgaggccgcatacaaggtcgcagactatggcatgtgggagagaggagataagacaaaccagggtatcccagagctgaacgcctcatccgtggggatggcgaaggccgctctggaagcaatagatgaactggatctgtttggtgcacacggaggccgcaagagcgtcatacatgtcctgccagacgaggtggagcactgccagtctattctcttcagcatgttaccaagagccagtacctcaaaggagatcgacgccggattgttgtctattattagtttccccgcttttgccgtggaagatgtcaaccttgttaatgtaaccaagaacgagattattagcaaacttcagggccggtacggttgctgtaggttcctcagggacgggtataaaacccctagagaagaccccaaccgactgcattacgatcccgcggagctgaaactcttcgagaatatcgagtgtgaatggccagtgttttggacctactttattatagacggagtcttcagtggtgatgccgtgcaggtccaggaatatagggaagcactggaaggaatcctgataagggggaagaacggtatcaggctcgtgcctgagctttatgccgtgcctccaaataaggtagatgaggagtacaaaaaccctcacacggtggacagagtgcccatgggaaaggttccacacctgtggggacagtccctctacattcttagcagtctgctagccgaaggcttccttgccgccggggagattgatccgctaaatcgacgattcagtacctctgtgaagcctgacgtggtcgtccaggtaactgtcctggccgagaacaatcacataaaggaccttctgaggaaacacggcgttaacgttcagtctattgccgatattcacccaatccaggtccagccaggaagaattcttagccacatctatgctaagctgggtaggaacaagaacatgaatctttccggtcgaccttacagacatataggtgtccttggcacaagtaagctgtatgtcattcgcaaccagatattcacttttaccccccagttcacagatcaacatcatttctacctggcactggataacgaaatgatcgttgaaatgttgcggatcgagctggcatatctatgtacatgttggcgaatgactggtaggcctaccctcacattcccgatcagccggaccatgttgaccaatgatgggtcagatattcatagcgccgtgctctcaacaataaggaaactggaggacggctactttgggggtgcaagagtgaagctcgggaatctgtcagagttcctgactacaagcttctacacctacctgaccttcctcgaccccgattgtgacgaaaaactcttcgataacgcctccgagggaactttctcccctgactccgactctgatctcgtggggtaccttgaggacacgtgcaatcaggagtcccaggacgagctggatcattacattaatcacctactacaaagcacctccctcaggagctatcttcccccgctgtgtaagaatacggaagacagacatgtcttttccgcgattcatagtacccgggatattctgtcggtgatggccaaagcgaaaggcttggaggtccctttcgtacctatgactcttccgaccaaagtcctgagcgctcacaggaagagcctgaacttggttgatagtcctcagccgttgctcgaaaaagtgccagagtccgatttccagtggcccagagacgatcacggcgacgtcgattgcgagaaattggttgaacagctcaaggactgctcaaacttacaggaccaggcggacatactctatattctctatgtcatcaagggtcctagctgggatacaaacttgagcggccagcatggggtgaccgtgcagaatttgcttggcgaattgtatggcaaggcgggtctgaatcaggaatggggcttaatcagatacatttccggcttgctccgaaaaaaggtagaagtgcttgcagaagcttgcacagatctgctctctcaccagaagcaattaacagtagggctcccgccagagcctagagagaaaattatctctgcccctctgccccctgaggaacttactaagctgatatatgaggcttctggtcaggacatctccatcgctgtgttaacacaggagatcgtggtttatcttgccatgtacgtgcgggctcagcctagcctattcgtggaaatgctgcggctccgtatcggtctgatcattcaagtgatggctactgaattggctcggtccctaaactgtagcggagaagaggcgtcagagtccctgatgaatctctccccatttgacatgaaaaacttgctacaccacatcctttcaggaaaagaatttggggtggagcgaagtgtgcggcccattcattctagcaccagctcgcctacaatttcaatccacgaagtgggacacactggtgttaccaaaacagagagaagcggtatcaataggctcaggtcggaaatgaaacaaatgacacgccgtttttctgcggacgaacagttcttttctgtcggccaagccgccagttctagtgctcacagttctaaatccgctcgtagctcgaccccatcaagcccgactggcacatcaagctctgatagcggcggccaccatattggctggggggaacgacagggccagtggttacgtcgcaggcgcctggacggagccattaatcgcgtcccagtaggcttttatcagcgggtgtggaagattctgcaaaagtgccacggcttgtccatcgacggttacgtcctccctagctccactactcgggagatgacacctcacgaaatcaagttcgccgtgcacgttgagtcagttctgaacagggtgccacaacccgagtacagacagcttctggttgaagcaataatggttcttactctcctcagcgataccgaaatgacaagcatcggtggcattatccacgtggaccagatcgtgcagatggcgagtcaacttttcctgcaagaccaggtaagcataggggccatggacactctcgagaaagaccaggccacaggcatatgccattttttctacgacagcgccccaagcggtgcctacggaacgatgacctatctcacccgagcggtcgcatcctacctccaggagttactgcccaactctggatgccagatgcag

SEQ ID NO: 6204 - DNA, 3705 bp, Artificial Sequence
  derived and/or modified sequence
atgagatcaagaagcaattccggagtgcggctggatggctacgcccgcctggtccagcagaccatcctctgctaccaaaacccggtgaccggactgctgtcagcatcgcatgagcaaaaggatgcgtgggtgagggacaatatctattccatcctcgcagtctgggggctgggaatggcctatcggaagaacgcagaccgggatgaggacaaggcgaaggcctacgaactggaacaaaacgtggtgaagctgatgcgcggcctgctgcagtgcatgatgaggcaggtcgctaaggttgaaaagttcaaacatacccagagcactaaagacagcctgcacgcgaaatacaacacggcgacttgtgggactgtggtcggagatgaccaatgggggcaccttcaagttgacgcgacctcgctcttcctcctgttcctcgctcaaatgaccgcttccggtcttagaatcattttcactctggacgaagttgcgttcatccaaaacctcgtgttctacatcgaagctgcctacaaagtggcagactacggcatgtgggaaaggggagataagactaaccagggaattccggagctgaacgcgtccagcgtagggatggccaaggctgccctcgaagcgatcgatgagctggaccttttcggagctcatggcggaagaaaaagcgtgatccacgtccttccggacgaggtggaacattgccagagcatcctgttcagcatgctccctcgggcatcgacttcgaaagaaatcgatgccgggcttcttagcatcatctcatttcctgccttcgccgtcgaggatgtgaaccttgtgaacgtgactaagaacgaaatcatctccaagctgcagggacgctacggttgctgcagattcctgcgcgacggttacaagactcctcgggaggacccaaaccgcctgcactacgatcctgccgagctcaaactcttcgagaatattgagtgtgaatggcccgtgttctggacttacttcattatcgacggcgtgttttcgggcgacgccgtgcaggtgcaggagtaccgagaagctctggaaggaatcctgatccgcggaaagaacgggatccggctggtcccggaactgtacgccgtgccgccaaacaaagtcgatgaggagtacaaaaacccgcatacggtggatagggtcccaatgggaaaagtgccacacctgtggggtcagtccctgtacatcctctcaagcctgctggccgaaggattcctggccgccggcgagatcgatccgctgaatcgtaggttctccactagcgtgaagcccgacgtggtggtgcaagtgaccgtcctggccgaaaacaaccatatcaaagaccttcttagaaagcatggagtgaatgtgcagagcattgccgacatccatccgattcaggtccaaccgggacggatcctctcgcatatctacgctaagctcggacgcaacaagaacatgaatctctcaggtcgcccctacagacacatcggtgtgctggggacttccaaactttacgtgattcggaatcaaatcttcactttcacgccacagttcactgatcaacatcacttctacctcgcactggataacgagatgatcgtcgagatgttgcgcattgaattggcgtacctttgcacttgctggagaatgactggccgcccgaccctgacgttccctatctcaagaaccatgctgactaacgacgggtccgacatccattcagccgtgttgtccactattcgcaagctggaggacggctacttcgggggcgcccgggtcaagctcggaaacctttcagaattcctgaccactagcttctacacgtacctgactttcctggacccagattgcgacgaaaagctgttcgacaacgcctccgagggaactttcagccccgactctgattccgatctggtgggctaccttgaagatacttgcaaccaggagtctcaggacgagctcgatcactacataaaccatctgctgcagtcgacttcactcagatcgtaccttcctccactctgcaaaaacactgaggatcggcacgttttctccgccatccactccactcgcgatattctgtctgttatggctaaagctaagggactggaggtaccgtttgtcccaatgactctgccgactaaagtcctttcggcccaccgcaaatcgctgaatctcgtcgattcgccacagccgctcctcgagaaggtgcctgagtcagactttcagtggccacgcgacgatcacggagacgtcgactgtgaaaagctggtcgaacagctcaaggattgtagcaacctgcaagaccaggccgacatcctctacatcctgtacgtgatcaagggtccttcctgggataccaacctctccggacaacacggagtcactgtgcagaacctgctgggtgaactctacggaaaagccggactcaatcaggagtggggacttatccgatacatctcgggactgctgcgaaagaaggtggaagtcctcgccgaagcctgcaccgatctcctctctcaccagaagcagctgaccgtgggactccctccagagcctagagagaagatcatctccgcacccctcccaccagaagaactgactaaactcatctacgaggcttcagggcaagatatctccatcgccgtgttgacccaagaaatcgtcgtgtacctggctatgtacgtccgcgcacaaccctcattgttcgtcgagatgctgcgcctgcggatcggactgattatccaggttatggcaaccgagctggccagatcgctcaactgctcgggcgaggaagcctcggaatctctcatgaatctgagccctttcgatatgaagaacctgctccaccacattctgtcaggaaaggaattcggtgtggaaaggagcgtccggccaatccactcctcaacttcatcgccaactatctcaattcatgaagtgggccacacgggggtgacgaaaaccgaaaggtctggcatcaatcggctgaggagcgaaatgaagcagatgacgcggaggttttcagcagacgaacagtttttctcagtgggtcaagccgcgtcctcgtccgctcactcaagcaagtcggcgcgcagcagcacgccttcgtcccctactggaaccagcagctccgacagcggggggcaccatatcggatggggcgaaagacaaggacagtggctgagacgccgccggctcgacggcgccattaacagagtgccagtggggttctaccaacgagtgtggaaaatcctgcagaagtgccatggactcagcatcgacggatacgtccttccgtcgtccactacccgagaaatgaccccgcacgagataaagtttgccgtccacgtggagagcgtgttgaatcgcgtgccgcagccagaatacagacaactgttggtcgaggccatcatggtgctgactctcctcagcgacaccgagatgacttccattggggggattatccatgtcgaccagatcgtccagatggcctcgcagttgttcttgcaggaccaggtgagcatcggagctatggataccctcgaaaaggaccaggcgaccgggatctgtcatttcttttatgacagcgcaccttccggtgcctacggtaccatgacctatctgactcgcgctgtggcctcatacttgcaagaacttctgccaaactcgggatgtcagatgcag

SEQ ID NO: 6205 - DNA, 3705 bp, Artificial Sequence
  derived and/or modified sequence
atgagatctagatcaaattcaggagtcaggctagatggatatgctagattggttcaacaaacaatcttatgttatcagaatccggtgactggcttgctttccgccagtcatgaacaaaaagatgcatgggttagagataatatttattcgatcctcgcagtttggggtttgggaatggcctaccgaaagaatgcggatagagatgaagataaggcaaaggcttacgaactcgagcaaaacgttgttaaacttatgcgaggtctcctccaatgtatgatgcgacaggttgctaaagtagagaaattcaaacatactcaatctacaaaagattctcttcatgcaaagtataatactgcaacatgtggcacggtggtgggagatgaccaatggggacacctacaagtggatgcgacatcgctgttcttattgtttctggcccaaatgaccgctagtggactgcgaattatattcacactggatgaggtcgccttcattcaaaacttggtcttttacatagaagctgcttataaggttgctgattacggaatgtgggaacgaggagataaaactaatcaaggaatcccagaactgaatgcttcaagtgtcggaatggccaaagcagctctagaagcgatcgacgaattggatctctttggagctcatggaggacgaaaaagtgtgattcacgtcttaccagatgaagtcgagcattgccagtcaattttgttttctatgctaccaagagcatcaactagcaaggaaattgacgcaggtctactttcgatcatttcttttccagcttttgctgtggaggacgttaatttggtgaatgtgacgaagaatgaaatcatctcaaagttgcaaggacgatacggttgttgtagatttttacgagatggatataaaactccaagagaggatccgaaccgcttgcactatgatccagctgaacttaaattatttgagaatattgaatgcgagtggccagtgttttggacatactttattatagatggggtgttctctggagatgctgttcaagttcaggagtaccgagaagcacttgagggaattttaatcagaggaaaaaatggaatccgtctcgttccggaattatacgccgtgccgccaaataaggtggatgaggaatacaaaaatccacatacggtagatagagtgccaatgggaaaggtcccccatctatggggacaatcactgtacattttatcttctcttcttgccgaaggattccttgctgccggggaaatagacccattgaatcggagattctcaacgagtgttaagccagatgttgtcgtgcaggtcacagtgcttgctgaaaacaaccacatcaaagatcttttgagaaaacatggagttaacgtgcaatccatagctgacatccacccaattcaagtccagccaggtcgcattttgtcgcacatttacgcgaagctggggcgcaacaagaatatgaatttgtcgggaagaccttataggcacatcggagttttgggaacctctaaactgtatgtcataagaaaccaaatcttcacatttactccgcaattcacggatcagcaccacttttacttggctctagataacgaaatgattgttgagatgcttcgtattgagttggcatatttgtgtacttgctggcgtatgaccggtcgtcctactctcacctttcctatttcgagaacgatgttgaccaacgatggatcggatattcattcagctgtattgtcaaccattagaaagctcgaagatggctactttggaggggcgagggttaaactcggtaatttgtctgagtttcttaccacctctttctatacgtatctaacgtttttagatccggactgcgatgaaaaacttttcgataatgcttcggaaggcacgtttagtccagattctgattcggatcttgtgggatatttggaggatacctgcaaccaggagtcgcaggacgagcttgatcattatataaatcacttgttacaaagtacgtctctaagatcttacctgccaccgctctgcaagaatacagaagaccggcacgtctttagtgccatccattcaacccgtgatatactctcagttatggctaaagcaaaaggacttgaagttccattcgtgccaatgacactaccgactaaggttctatcagctcatcgaaaatcacttaatttggtagatagtccacaaccactacttgaaaaagttccagaaagcgattttcaatggccacgtgacgatcatggagatgttgactgcgagaaacttgtggaacaactcaaggattgctccaatctgcaggaccaagcggacatactatatattttatacgtaatcaagggcccgagttgggacactaatttgtcaggacagcacggagttacagtccagaatttgcttggtgaactctacggaaaggcaggattgaatcaagagtggggactcatacgttatatctccggtctcctcagaaaaaaagtagaggttttggctgaagcgtgtacggacctactttcccatcagaaacaattgacggtaggactaccaccagagccaagggaaaaaatcatctctgcaccattgccaccggaagagctcacgaaactgatctatgaagcatcgggacaagatatttcgattgctgtactcacacaggaaatcgtcgtctatcttgcaatgtacgttcgcgcacagccaagtttattcgtcgagatgctaaggctgagaattggcctgattattcaagtcatggctacggagcttgctcgatctttgaattgttcaggagaagaggcaagtgagtcccttatgaacctaagcccttttgatatgaagaatctgttacaccatattctttcaggaaaagagttcggagtagagagaagtgtccgtccaattcattccagtacttcctcgcctacgatctcgatacacgaagtcgggcacaccggagtaacgaaaactgagaggtctggaattaatcgacttaggtcggaaatgaagcaaatgacgcgaaggttctcagctgatgagcaattcttcagtgtgggacaggccgcgtcgtctagtgctcactcatcaaagtcagcccgttcatcgacgccaagctcgccaactggcacctcttcatcagattcaggtggacatcatattggatggggagagagacaaggacaatggctaaggcggagacgactcgacggcgctattaatagagtgccagtaggtttttatcagcgtgtatggaaaattttgcaaaagtgtcacggacttagtatcgacggctacgtattaccatcgagtacaacgcgtgaaatgactccacacgagattaagttcgctgtacacgttgaatcagttcttaatagagtaccgcaacctgaatatcgtcaactgctggtcgaagcaataatggtattgaccttactttcagatacggaaatgaccagtattggaggaattatacatgtggatcaaattgtgcagatggctagccagctttttttgcaggatcaagtgtcaattggcgcgatggatactttggagaaggatcaggccacaggcatttgtcattttttttatgattcagcaccaagtggtgcctatggaacaatgacttacctaacacgcgctgttgcatcttaccttcaggaacttttaccaaacagtggatgtcaaatgcaa

SEQ ID NO: 6206 - DNA, 3705 bp, Artificial Sequence
  derived and/or modified sequence
atgcgctccagaagtaattctggggttaggctggacggttacgccagattggtacagcagaccattctgtgctatcagaacccggtgacaggtctactgagcgcatcacacgagcagaaggatgcttgggttagagataacatatattctattctcgccgtgtggggcctcgggatggcctatcgtaaaaacgccgatcgcgacgaggataaagccaaagcctacgaactcgagcagaacgtggtgaaacttatgcgaggactactacaatgcatgatgcgccaggtggccaaggttgagaaattcaagcatacccagagcaccaaggatagccttcacgcgaaatacaatacagccacctgtggcacggtggtaggggacgatcagtggggtcaccttcaggtggacgctaccagcttatttcttctgtttctggctcagatgacagccagcggcctccgaattatattcacattagacgaggttgcctttatccagaacctggtgttttatattgaggccgcctataaggtagccgactacgggatgtgggagcgcggcgacaagacaaaccaggggatccctgagttgaatgcctcatcagtaggaatggccaaggccgccctggaagcaatagatgagctggacctcttcggagcccacggaggtcgaaaatccgtgattcacgttttaccggacgaggttgaacattgtcaaagcatcctgttttccatgttgccgcgagcatcaacaagtaaggaaatagatgctggcctactgtccataattagcttccccgcctttgcagtggaggatgtaaatttagttaatgtgaccaaaaatgagataattagtaagttgcagggccgatacggttgctgcagattcctgcgcgacggctataaaacccctagggaagatcccaaccgtttacactacgaccccgcagaactcaaactgttcgaaaatatcgaatgtgaatggccggtgttttggacatactttataatcgacggcgtcttttctggcgatgctgtccaggtccaggaatatagagaagcactggaaggtatcctaatccgaggcaagaatggcatccggcttgttcctgaactctatgcagtcccaccaaacaaggtggatgaagaatacaaaaatcctcatactgtcgatcgagtccctatgggcaaggtcccccacttatggggtcaatctttatacatactatctagcttgttagcggaaggctttctggctgccggggaaatagaccctctcaataggcgatttagtacctccgttaagcccgatgtggtcgtccaagttactgtacttgcagaaaacaatcacatcaaagatttacttcggaaacacggagtcaacgtgcaatccattgccgatattcaccctatccaggttcagcccggtcgaattctctctcatatttacgctaagctaggaaggaataagaacatgaacctgagcggaaggccctaccggcatattggtgtgctgggaacaagtaagctctacgttataagaaaccagatttttactttcacacctcagttcactgaccaacaccatttttatctggctctggacaatgagatgattgtggagatgttaaggatcgaactggcttacttatgtacatgttggcgaatgacaggtcggccaacgcttacgttccccatctcacggaccatgctgactaacgacgggtctgatattcatagtgctgtgctctcaaccattcgaaaattggaagatggatactttggcggggcaagagtcaaactggggaatctgagtgagtttctgactacatccttttacacttacctgacattccttgaccccgattgtgatgaaaagttatttgacaatgcatccgaaggcaccttctctcccgattctgattcagaccttgtgggttatttggaggatacctgcaaccaagagtcgcaggatgaactagaccattatatcaaccatctcttgcagagcacttccctccgtagctatctgcctcccttgtgcaagaatacagaggaccgccatgtgttcagtgccatccattccactcgcgatattctgagtgtaatggccaaagccaagggtctagaggttccattcgtgcccatgacgttgcccaccaaggtcctcagtgcccacagaaagagtctcaatctggtggacagtccacaacccctattggagaaagtgccagagtccgatttccagtggcccagggatgaccatggcgatgtggattgcgaaaagctggtagagcagcttaaggactgtagcaacttgcaggaccaggctgacattctttatatcctatacgtgatcaaggggccctcatgggatactaatctctccgggcagcacggcgtgacagtgcagaacctgctgggggagctatatggcaaggcgggattgaaccaagaatggggactcatacgttacatctcaggactcctgcggaaaaaagtcgaggtgctggcagaggcctgtaccgaccttctatctcatcagaaacagctcacagtcggactgccgccggaaccccgcgaaaaaatcatctctgctccattgccacccgaggaacttaccaagctgatctatgaggcctcaggccaggatatttccatagccgtgttaacacaggagatcgttgtgtacctggccatgtacgtgcgcgcccaaccaagcctgttcgtggaaatgctgcgtctgagaattggcctgattattcaggtgatggcaacggagttagcccggtccttgaattgtagtggagaggaggcatctgaatctttgatgaacctcagtccctttgatatgaaaaacctattgcatcatattctgtcggggaaagaatttggtgtggagcgcagcgtgcggccgatccactcatctacaagctctcccaccatcagcattcacgaggtcggccacaccggcgtgaccaaaaccgagaggtcgggtatcaataggctgcgcagcgagatgaagcagatgactaggcgctttagcgccgatgagcagttcttcagtgtcggacaggccgcctcgtccagtgcccattccagtaagagcgcccgttcaagtacaccctcctcgccaactggtacatcttcatccgatagtggaggtcaccatattggttggggagagcgacaagggcagtggctgagaaggcgtcgcctggatggagccatcaaccgcgtgcccgtgggcttttaccagcgggtctggaagatcctccaaaagtgccacggattgagtattgacggctatgttctaccatccagtacaactagggagatgacgccgcatgaaattaaattcgcagttcacgtggagtccgtactgaatcgggtacctcagcccgagtaccggcagttgcttgtcgaagcaattatggttctgactctcctgtccgataccgaaatgacatcaatcggcgggattatccatgtcgatcaaatcgtccagatggcctctcagctgttcctgcaggatcaggtgtcaataggagccatggacacactggagaaagaccaggcgacagggatctgtcactttttttacgactccgcaccctctggcgcttatggaactatgacctatcttacacgtgccgttgcttcctacctccaggaactcctgcccaatagtggatgccagatgcag

SEQ ID NO: 6207 - DNA, 3705 bp, Artificial Sequence
  derived and/or modified sequence
atgcgcagcagaagtaacagcggcgtgagactggacggatatgctcgcctggtccagcaaacaattctgtgctaccagaatcccgtgaccggcttattgagcgcatctcacgaacagaaagatgcatgggttagggacaacatttacagcatcctcgcagtatggggacttggaatggcctacaggaaaaacgccgaccgggatgaagacaaagcaaaggcctatgagctagagcagaacgtagtcaagctcatgcgcggactgctgcagtgcatgatgcgccaagtcgctaaagtggaaaagtttaaacatacacagtcgaccaaggattcactgcatgccaaatacaataccgcaacctgcgggacggtggtgggagatgatcaatggggccatctccaagttgatgccacaagcctgttcttgttattccttgctcagatgactgcaagcggcctcaggatcatcttcactctggatgaggtcgcatttatccaaaacctcgtgttttatatcgaagcagcatataaagtagctgattatggaatgtgggaacgtggggacaaaactaaccaaggaatcccagagctgaacgcttccagcgtaggaatggctaaagcagctctcgaggcaattgacgagttggatctgttcggggctcacggaggcagaaaatccgtcatccatgtgttgccagatgaagtcgagcattgccaatctatcttgttcagtatgcttcctcgggccagcacttcgaaggaaatcgatgctggtctgctcagtattatatcattcccggcctttgccgttgaagacgttaatcttgtcaatgtcaccaagaacgagattatctcgaagttacaggggaggtacgggtgttgccgctttctcagggacggatataaaaccccaagggaggatcccaacaggctccactatgaccctgctgaactcaagctgtttgagaacatcgagtgtgaatggcccgttttctggacctatttcatcattgacggagtttttagcggagacgcggtccaggtgcaagaatacagggaagctctggaaggcatccttatccgggggaagaatggcatccgtttggtgccggaactgtacgccgtgccccccaataaagtggacgaagagtacaaaaacccacacacagtggatagagtccctatggggaaggtcccacatctgtggggccagtcactctatatcctttcgagtctcctggcagagggcttcctggccgcaggggagatcgatcccctgaacaggagattctcaaccagtgtgaaaccagacgtggtggtccaagtgaccgtattagcagaaaacaatcatatcaaggatctgctccgaaagcacggggtgaacgttcagtctattgccgacattcacccaattcaggtccaacccggccgaatcctttctcacatctacgccaaacttgggaggaataaaaacatgaacctgtccgggagaccttacagacacattggcgtgctggggacttccaaactgtacgtgatccgtaaccagatatttacgtttacccctcagttcaccgaccaacaccacttctatttagctctcgacaacgagatgatcgtggaaatgctccgcatcgaattggcgtacttatgtacatgctggagaatgacaggtaggccgacactgacatttccaattagcagaaccatgcttaccaatgacggctcagacatacacagtgcggtgttgtccactatcaggaaactggaggacggctactttggtggcgcaagagtgaaactcgggaaccttagtgaattccttaccacttctttctacacataccttacatttctggatccggactgcgacgagaaactcttcgacaatgcttctgaaggaacatttagtcctgatagcgacagcgacctggtgggctatttagaagatacctgcaaccaggaatcacaagatgagctagatcattatataaatcatctgctgcaaagtaccagcctgcgaagctacctcccacctctgtgcaaaaataccgaggacagacacgtattttccgcaatccattctacccgagatatcctgagcgtaatggctaaggcaaaaggactggaggtgccattcgtacccatgacgctgcctactaaagtcctttccgcccacagaaagtcactcaaccttgtggatagcccccagccactgctggaaaaggtgccagagtccgactttcagtggcctcgcgacgaccacggagatgtagattgcgaaaagcttgttgaacagttaaaagactgctccaacctccaggatcaagctgacattctgtacatcttgtatgtgataaagggaccctcttgggataccaatctctcaggccaacacggcgtgacagtgcagaatctgctcggggagttgtatggcaaagccgggcttaaccaagaatggggattgattaggtatatcagcggactcctccgcaaaaaggtagaagtactggccgaagcttgcacagatctgctcagtcaccaaaaacagcttaccgtcgggctgccccccgagcccagggaaaaaatcattagcgcaccgctcccacccgaggagctgactaaactgatctacgaggcctccggccaggatatctcgattgcagtgttgacccaggagatcgtggtatacctggctatgtacgtgagagcccagccaagcctgttcgtggagatgcttagactgaggattgggcttatcatacaagttatggccactgagttggctaggagtctgaactgttccggtgaagaagctagcgagtctcttatgaacttgtcaccctttgatatgaagaatttgctgcaccacatcttgagcggaaaagaattcggagtcgagcggagtgtccggccaatccattcaagtacaagcagccctacaatctctatccacgaggtgggtcacaccggcgtgaccaagacagaaagatcgggaatcaacaggttgcgttctgagatgaaacagatgacacggcggtttagtgctgatgagcagtttttttctgtaggccaggccgcttccagttctgcccactcaagtaagtcggccaggtcatctacgccaagctcaccgaccgggactagctcgtcagattcaggcggacaccatattggatggggggaacgccaaggacagtggcttaggagaagacgcctggatggagctatcaatcgcgtccccgtcggattctaccagcgcgtctggaaaatccttcaaaaatgccatggccttagcatcgacgggtatgtactgcccagttccaccacccgcgagatgaccccacacgagatcaaatttgcagtccacgtggagtccgtgttgaatagagttccacagccagaataccgtcaacttcttgttgaggccattatggtgcttacccttctgtctgacaccgaaatgacctctattggaggaattatccacgttgatcaaattgtgcagatggcttcacaactgttcctgcaagatcaggttagtatcggagccatggatactcttgaaaaggatcaggcgactgggatctgccacttcttttacgattcagcgcctagtggggcttacggcactatgacatacttgactcgcgcagttgcgtcttatctgcaggaattgttgccaaacagcggatgtcagatgcag

SEQ ID NO: 6208 - DNA, 3705 bp, Artificial Sequence
  derived and/or modified sequence
atgcggagccggagtaactccggtgtcagactcgacggttacgcccgccttgtccaacaaaccatcctgtgttaccagaaccctgtcactggactcctgagcgcatcgcacgaacaaaaggatgcatgggtccgagacaacatttactcaattctggctgtgtgggggctgggtatggcgtaccgcaagaacgccgaccgggatgaggataaggcaaaggcctatgaactggaacaaaatgtcgttaaactgatgcgaggtcttttgcagtgtatgatgcgacaggtggctaaagtggagaaattcaagcatactcagtccaccaaggacagcctgcatgcaaagtacaacactgcaacgtgtggtactgtggtcggagatgatcagtggggtcacctccaggttgatgcaacgtccctttttcttctgtttctggcgcaaatgacggcttccggcctccggatcatctttacccttgacgaagtggcatttatccaaaacctcgtattctacattgaagcagcctacaaggtggcagactacggtatgtgggagagaggtgacaagaccaaccagggcatccctgagctgaacgccagctccgtcggaatggcaaaggcagcgcttgaggcaattgatgaacttgatctctttggggcacacggtggacgtaagtccgtgatacatgtcctgcctgatgaggtggagcactgccaatcgattcttttttcgatgcttccaagagcgagcacctcaaaggaaatagacgccggcctgctgtccatcattagctttccagcgttcgcggtcgaagatgttaatctcgtcaacgtcacgaagaatgagatcatatcaaaacttcagggccggtacggttgctgccgtttcctcagagatgggtacaagactccaagagaagatccgaaccgccttcactacgacccggctgaactcaagttgttcgagaatatcgaatgtgaatggcccgtgttttggacttacttcattatagatggcgtttttagtggagatgccgttcaagtgcaagagtacagagaagcacttgaaggtatcctcatacgcggcaaaaatggcataaggcttgtgcctgagttgtacgcagtgccccccaacaaggtcgatgaagaatacaaaaaccctcataccgtcgatagggtccctatgggcaaggtgccccatctgtgggggcagtcgttgtacatcctgtcctcacttctggccgaaggatttttggcggccggtgaaattgacccccttaatcgcaggttctcaacttcggtgaagcctgacgtggtcgtgcaggtgacggtgcttgcagagaataaccacattaaggatcttctgaggaagcatggagttaacgtccagtcaatcgcagacatacaccctattcaggtgcaaccgggcagaatcctgtcacatatctacgcaaagctgggcagaaataagaacatgaatctgagcggaaggccttaccgccatattggagtgctggggacttcgaaactgtatgtgattagaaatcagattttcacttttactccccagtttaccgatcaacatcatttctacctcgcgctggataatgaaatgatcgtggaaatgcttcgcattgaactggcttacctttgtacctgctggcggatgactggtcgacctactctcactttccctatttcccgtaccatgttgaccaatgatggatccgatatccactccgcagtgctgtccactattaggaagctggaggacggttactttggtggggcccgggttaaactcgggaatctgtcagaatttcttaccacctccttctacacctacctcacttttctggatccggattgcgatgagaaactctttgataacgcgtccgagggtaccttttcccctgattccgactcagatctggtgggataccttgaggacacctgtaaccaagaaagccaagacgagctggatcattacatcaaccacttgcttcaatcgaccagcctcagaagctatttgccacccctttgcaaaaacaccgaggatcgacatgtgttttcagcaattcatagcacgcgcgacatcttgtctgtcatggcaaaagcaaaggggctggaagttccatttgtcccaatgactctgccaactaaggtgttgtcggcacatcgcaaatcactgaatcttgtggattcgcctcaacctcttctggaaaaggtccctgaatccgatttccagtggcctcgggatgatcacggagacgtggactgtgagaaacttgttgaacaacttaaggattgcagcaaccttcaagatcaagctgatatcctgtatattctgtacgtcatcaaaggccctagctgggacaccaacctcagtggtcagcacggagtgacggtgcaaaacctcttgggggaactttacggaaaggccggtctgaaccaggagtgggggcttattcgatacataagcggattgcttcgcaagaaagtggaagtgttggcagaagcatgtactgaccttctgtcacatcagaagcaactgactgtgggactgcctcctgagcctcgcgagaagatcatttcggcgcctcttccaccggaggagcttactaaactcatttatgaggcctcaggacaggacattagcatcgccgtgctcacccaagaaatcgtggtctacctcgcaatgtatgtccgggcacaaccttccctctttgtcgaaatgctgcggctccgtattgggctcattatccaagtgatggccaccgaactcgcgagatccctgaattgttcgggtgaagaagctagtgaatcattgatgaacctgtcgccgtttgatatgaaaaacctgctccatcatattctttcggggaaggaatttggagtggaaaggagtgtcaggcctattcacagcagcacctcgagccccaccatttcaatacatgaagtggggcacactggggtgactaagactgagaggtctggcattaacagactcagaagcgaaatgaaacaaatgaccaggcgctttagcgctgatgagcagttcttttccgtggggcaagcagcatcctcgtccgcgcatagctccaaatccgcccgatcgtcaacgcctagctcccctaccggcacctcgtcctccgactcggggggccaccatattggatggggcgaaagacaaggacagtggctgcgaagaaggagacttgatggagccataaaccgtgtgcctgtcggcttctaccagcgagtgtggaagatcctgcaaaagtgtcatggactttcgatagatggatacgtgctgccaagctccaccaccagggaaatgaccccgcacgaaatcaagttcgcagtacatgtggaaagcgtgctgaaccgggtccctcagcctgaatacagacaacttttggtcgaggctatcatggtgctgactcttctctccgacaccgaaatgacctcgattggaggaataatccacgtcgatcagattgtgcagatggcctcacagttgtttcttcaggatcaagtcagcattggtgcaatggacactcttgagaaggatcaggcaacggggatttgtcatttcttttacgattctgcaccatcgggcgcgtacgggactatgacttacctcaccagggccgtggcatcttacctgcaagaactgcttcctaattcaggttgtcaaatgcag
